United States Patent Application Publication US 2004/0234960 A1 - sequence listing, part 9

SEQ ID NO: 27005 - DNA, 705 bp, Artificial Sequence
  chemically treated genomic DNA (Homo sapiens) CpG-island No: 27005
tgtcgtcggtttttatttaggtcgaggtggttcggttttatgtatcgcgacgtaacgcggggaggtagataaggtatagggcggcgtttataatttatgttaattcgttttatgtgttcgtcgaggcggtataaatcgtcgtgacgattagcggtttaatgatcgaagttaggttggtaagagtcgcgagcgatttttgaagttgtttttgatggtcggtatttatttgtttggatagtatggtttgtaacgcgggtatttcgatgtcgtcggaagcgagaagattaataatggggaaggttatttagtttcgcgtttcgaacgttagtaagacgtagattagcgcgtcggtcggtatgtcggcgataatgggttggtttttcgtcgaacgtttggggggcggattagtgacgaaaggtttgagcgaggggcgtgtaagatttcgaattcgtaagcgataaggcgattatcggcgcgttttaagcgaagcggtttttcgttgaaaatgatttagagcgttgttcggattttgttttcgagttgtttgataaagaaataagtataagtgtcggcgacgatagttatgttttcggtttaatcggaggagttgttggtgttgaaggtttttaagggtattcggcgggtttgttattgtgggatattttggttttaattaaattcgcggtcgttaatttatatttattt

SEQ ID NO: 27006 - DNA, 705 bp, Artificial Sequence
  chemically treated genomic DNA (Homo sapiens) CpG-island No: 27006
aaataaatataaattaacgaccgcgaatttaattaaaaccaaaatatcccacaataacaaacccgccgaatacccttaaaaaccttcaacaccaacaactcctccgattaaaccgaaaacataactatcgtcgccgacacttatacttatttctttatcaaacaactcgaaaacaaaatccgaacaacgctctaaatcattttcaacgaaaaaccgcttcgcttaaaacgcgccgataatcgccttatcgcttacgaattcgaaatcttacacgcccctcgctcaaacctttcgtcactaatccgccccccaaacgttcgacgaaaaaccaacccattatcgccgacataccgaccgacgcgctaatctacgtcttactaacgttcgaaacgcgaaactaaataaccttccccattattaatcttctcgcttccgacgacatcgaaatacccgcgttacaaaccatactatccaaacaaataaataccgaccatcaaaaacaacttcaaaaatcgctcgcgactcttaccaacctaacttcgatcattaaaccgctaatcgtcacgacgatttataccgcctcgacgaacacataaaacgaattaacataaattataaacgccgccctataccttatctacctccccgcgttacgtcgcgatacataaaaccgaaccacctcgacctaaataaaaaccgacgaca

SEQ ID NO: 27007 - DNA, 705 bp, Artificial Sequence
  chemically treated genomic DNA (Homo sapiens) CpG-island No: 27007
aagtggatgtggattagcggtcgcgaatttaattagaattaaaatgttttataatggtaggttcgtcgaatgtttttaagaatttttaatattagtagttttttcggttgggtcgggggtatgattatcgtcgtcggtatttatgtttgtttttttattaagtaattcgagggtaaggttcgggtagcgttttgggttatttttagcgaaggatcgtttcgtttgaagcgcgtcgataatcgttttgtcgtttgcggattcggaattttgtacgtttttcgtttaagtttttcgttattggttcgttttttaaacgttcggcgaagaattagtttattatcgtcggtatgtcggtcgacgcgttggtttacgttttgttggcgttcggaacgcgaggttggatggttttttttattattaattttttcgttttcggcggtatcgggatgttcgcgttgtaggttatgttgtttaggtaggtagatgtcgattattagggatagttttaaggatcgttcgcggtttttattagtttaatttcgattattggatcgttgatcgttacggcgatttatgtcgtttcggcgagtatatggaacgggttggtatggattgtaggcgtcgttttatattttgtttgttttttcgcgttgcgtcgcggtgtatggagtcgggttatttcgatttgaatggaagtcggcggta

SEQ ID NO: 27008 - DNA, 705 bp, Artificial Sequence
  chemically treated genomic DNA (Homo sapiens) CpG-island No: 27008
taccgccgacttccattcaaatcgaaataacccgactccatacaccgcgacgcaacgcgaaaaaacaaacaaaatataaaacgacgcctacaatccataccaacccgttccatatactcgccgaaacgacataaatcgccgtaacgatcaacgatccaataatcgaaattaaactaataaaaaccgcgaacgatccttaaaactatccctaataatcgacatctacctacctaaacaacataacctacaacgcgaacatcccgataccgccgaaaacgaaaaaattaataataaaaaaaaccatccaacctcgcgttccgaacgccaacaaaacgtaaaccaacgcgtcgaccgacataccgacgataataaactaattcttcgccgaacgtttaaaaaacgaaccaataacgaaaaacttaaacgaaaaacgtacaaaattccgaatccgcaaacgacaaaacgattatcgacgcgcttcaaacgaaacgatccttcgctaaaaataacccaaaacgctacccgaaccttaccctcgaattacttaataaaaaaacaaacataaataccgacgacgataatcatacccccgacccaaccgaaaaaactactaatattaaaaattcttaaaaacattcgacgaacctaccattataaaacattttaattctaattaaattcgcgaccgctaatccacatccactt

SEQ ID NO: 27009 - DNA, 847 bp, Artificial Sequence
  chemically treated genomic DNA (Homo sapiens) CpG-island No: 27009
gtcgggtatttatttttagaagtcgtagggatagcgaggcggtaggttgggcgttttgttgcgttcgtttttagcgttttttatggtgttcggcggcggcggagttcggcggcggtagcggtggcggcggttgggttcgggtttcgttttgaggaggcggtggcggcggcgtcggggggttcggggcggggggagggggaaggagcgggcgcgcgggcgggcgcgagttcggggttcggagtcgggattttaggtcggttagttggaggcgggtcgtattattcggtttgcggagacggggagggggcggagaggcgcggagagaagaaggagggagtcgaggaggaggggcgtgcggacgtatcgaggatcgcgggggaggagggatatagacgttttcggcgggttttatcgtcgttttttagttagagagatgttttgtgcggtggcgtagggaaggatcggagtttttcgtcggtttcggagtcgtagcggtcgttttgaagtttcgggttttgttgttttcgtaatatcgttttttttttcggaggttgcgttgatcggataatggtcgtttcgtttttttttcggcgtgcgtttttttcgaggagttataatggtttcgttcgggggagttaacgttaaagtttagtcgttgattagttgggattcgggcgtgttatttcgtttcgcgttttaaaggcggagtgcggggttgtgggagaaaacgagagtttcgggttgtcgttcggcgacgggcggttgaggttttcgtatttttagaatttttagaatttgaagtaaatttattttttttttgtttgaagaaggggagtaggtttttgag

SEQ ID NO: 27010 - DNA, 847 bp, Artificial Sequence
  chemically treated genomic DNA (Homo sapiens) CpG-island No: 27010
ctcaaaaacctactccccttcttcaaacaaaaaaaaaataaatttacttcaaattctaaaaattctaaaaatacgaaaacctcaaccgcccgtcgccgaacgacaacccgaaactctcgttttctcccacaaccccgcactccgcctttaaaacgcgaaacgaaataacacgcccgaatcccaactaatcaacgactaaactttaacgttaactcccccgaacgaaaccattataactcctcgaaaaaaacgcacgccgaaaaaaaaacgaaacgaccattatccgatcaacgcaacctccgaaaaaaaaaacgatattacgaaaacaacaaaacccgaaacttcaaaacgaccgctacgactccgaaaccgacgaaaaactccgatccttccctacgccaccgcacaaaacatctctctaactaaaaaacgacgataaaacccgccgaaaacgtctatatccctcctcccccgcgatcctcgatacgtccgcacgcccctcctcctcgactccctccttcttctctccgcgcctctccgccccctccccgtctccgcaaaccgaataatacgacccgcctccaactaaccgacctaaaatcccgactccgaaccccgaactcgcgcccgcccgcgcgcccgctccttccccctccccccgccccgaaccccccgacgccgccgccaccgcctcctcaaaacgaaacccgaacccaaccgccgccaccgctaccgccgccgaactccgccgccgccgaacaccataaaaaacgctaaaaacgaacgcaacaaaacgcccaacctaccgcctcgctatccctacgacttctaaaaataaatacccgac

SEQ ID NO: 27011 - DNA, 847 bp, Artificial Sequence
  chemically treated genomic DNA (Homo sapiens) CpG-island No: 27011
tttagaaatttgttttttttttttagatagggggaagataagtttgttttagattttaaaagttttaagaatacgaaggttttagtcgttcgtcgtcgggcgatagttcgaggttttcgtttttttttatagtttcgtatttcgtttttgaggcgcggaacgaagtggtacgttcggattttagttgattagcggttgggttttggcgttggttttttcgggcgagattattgtgatttttcgggaggggcgtacgtcggggagggggcggagcggttattgttcggttagcgtagttttcgggggaggggacggtgttacggagatagtagggttcggggttttagagcggtcgttgcgatttcggagtcggcggggggtttcggtttttttttgcgttatcgtataggatatttttttggttggggagcggcggtgagattcgtcgagggcgtttgtgttttttttttttcgcggttttcggtgcgttcgtacgtttttttttttcggttttttttttttttttttcgcgttttttcgtttttttttcgttttcgtaggtcgagtggtgcggttcgtttttagttgatcggtttggaatttcggtttcgagtttcggattcgcgttcgttcgcgcgttcgtttttttttttttttttcgtttcgagtttttcgacgtcgtcgttatcgtttttttagagcggggttcgggtttagtcgtcgttatcgttgtcgtcgtcgagtttcgtcgtcgtcgagtattatgggagacgttgggagcgagcgtagtaaagcgtttagtttgtcgtttcgttgtttttgcggtttttgggggtaagtgttcggt

SEQ ID NO: 27012 - DNA, 847 bp, Artificial Sequence
  chemically treated genomic DNA (Homo sapiens) CpG-island No: 27012
accgaacacttacccccaaaaaccgcaaaaacaacgaaacgacaaactaaacgctttactacgctcgctcccaacgtctcccataatactcgacgacgacgaaactcgacgacgacaacgataacgacgactaaacccgaaccccgctctaaaaaaacgataacgacgacgtcgaaaaactcgaaacgaaaaaaaaaaaaaaaaacgaacgcgcgaacgaacgcgaatccgaaactcgaaaccgaaattccaaaccgatcaactaaaaacgaaccgcaccactcgacctacgaaaacgaaaaaaaaacgaaaaaacgcgaaaaaaaaaaaaaaaaaaccgaaaaaaaaaaacgtacgaacgcaccgaaaaccgcgaaaaaaaaaaaacacaaacgccctcgacgaatctcaccgccgctccccaaccaaaaaaatatcctatacgataacgcaaaaaaaaaccgaaaccccccgccgactccgaaatcgcaacgaccgctctaaaaccccgaaccctactatctccgtaacaccgtcccctcccccgaaaactacgctaaccgaacaataaccgctccgccccctccccgacgtacgcccctcccgaaaaatcacaataatctcgcccgaaaaaaccaacgccaaaacccaaccgctaatcaactaaaatccgaacgtaccacttcgttccgcgcctcaaaaacgaaatacgaaactataaaaaaaaacgaaaacctcgaactatcgcccgacgacgaacgactaaaaccttcgtattcttaaaacttttaaaatctaaaacaaacttatcttccccctatctaaaaaaaaaaaacaaatttctaaa

SEQ ID NO: 27013 - DNA, 977 bp, Artificial Sequence
  chemically treated genomic DNA (Homo sapiens) CpG-island No: 27013
gtttttagcgttcggttagcgtagaggtgttttggtcggtcgtattaattttcggagtcgaaagtagagtttaggtatcgttatttgtaagagagggagaatgttaggtaaatattcgattcgtatatacgtttacgcgtgtttatcggtattgcgcgcgtttttttcgttttcgcgtcgttttcgttaggtggagggggtggggacggtcgggataggcgggagtttagaggagggagtcgtagaaggggtttttcgtttgagttaacgtagtggtggtatttagaggtgaacgcgggagcggtcgtttgcggagggtattcggttgcgtggcgttcgttcgggtcgttgttgcggtagaggtgttttggttgggcggttgggcgtttggggttcgacgtcggtcgggatttttgggtgtgcgcggagatgcgcgtcgcggaggcgaatggagggaggaggagaaggagaaagaggagaaagaggggaggggggggggggggggggtgggcgaagcggtaagcgcggggcgtaggcggatcggcggtcgggttgttgggttgttgggttgtcggggaggaaggttgtgtgtggttacgttgtgcgttacgtgttgagagcgcgagttgttagtcgtagtcgggcgacgttaaagtcgggtgcgcggttttgtcgtttgttttcgcgttttttttgttttttttttgttttgtttttttgtgttagtcgagtttattagtatggataacgtcgaaaggtttcgcgaggtcggcggtatttggtttttaatttttttcgttaaagcgttttttcgtttttcggggagtttcgcggtggcgaatgttcgttatgtatttttgatgtcgtcgtttgcgtttgtacgttgaagggttagttattattttagatttagggtaattatatgatacgttatttttttttcgtcgtttaaggttttttaggattcgttatgtttg

SEQ ID NO: 27014 - DNA, 977 bp, Artificial Sequence
  chemically treated genomic DNA (Homo sapiens) CpG-island No: 27014
caaacataacgaatcctaaaaaaccttaaacgacgaaaaaaaaataacgtatcatataattaccctaaatctaaaataataactaacccttcaacgtacaaacgcaaacgacgacatcaaaaatacataacgaacattcgccaccgcgaaactccccgaaaaacgaaaaaacgctttaacgaaaaaaattaaaaaccaaataccgccgacctcgcgaaacctttcgacgttatccatactaataaactcgactaacacaaaaaaacaaaacaaaaaaaaaacaaaaaaaacgcgaaaacaaacgacaaaaccgcgcacccgactttaacgtcgcccgactacgactaacaactcgcgctctcaacacgtaacgcacaacgtaaccacacacaaccttcctccccgacaacccaacaacccaacaacccgaccgccgatccgcctacgccccgcgcttaccgcttcgcccacccccccccccccccccctcccctctttctcctctttctccttctcctcctccctccattcgcctccgcgacgcgcatctccgcgcacacccaaaaatcccgaccgacgtcgaaccccaaacgcccaaccgcccaaccaaaacacctctaccgcaacaacgacccgaacgaacgccacgcaaccgaataccctccgcaaacgaccgctcccgcgttcacctctaaataccaccactacgttaactcaaacgaaaaaccccttctacgactccctcctctaaactcccgcctatcccgaccgtccccaccccctccacctaacgaaaacgacgcgaaaacgaaaaaaacgcgcgcaataccgataaacacgcgtaaacgtatatacgaatcgaatatttacctaacattctccctctcttacaaataacgatacctaaactctactttcgactccgaaaattaatacgaccgaccaaaacacctctacgctaaccgaacgctaaaaac

SEQ ID NO: 27015 - DNA, 977 bp, Artificial Sequence
  chemically treated genomic DNA (Homo sapiens) CpG-island No: 27015
taagtataacggattttggaagattttgggcggcggagaggagatagcgtgttatgtaattattttgggtttaaggtggtagttggttttttagcgtgtaaacgtagacggcggtattagaaatatataacgggtattcgttatcgcggagtttttcgagaggcgagggagcgttttggcgggggaggttggaggttagatgtcgtcggtttcgcggagtttttcggcgttgtttatattgatgagttcggttgatataggaaggtagagtaaaggaggggtagaggaggcgcggaggtaggcggtagagtcgcgtattcggttttgacgtcgttcggttgcggttagtagttcgcgtttttagtacgtagcgtataacgtgattatatatagttttttttttcggtagtttagtagtttagtagttcggtcgtcggttcgtttgcgtttcgcgtttgtcgtttcgtttatttttttttttttttttttttttttttttttttttttttttttttttttttttttttattcgttttcgcggcgcgtattttcgcgtatatttagggatttcggtcggcgtcgaattttaggcgtttagtcgtttaattagggtatttttgtcgtagtagcggttcgagcggacgttacgtagtcgggtgtttttcgtaggcggtcgttttcgcgtttatttttggatgttattattacgttagtttaagcggggaattttttttgcggtttttttttttaaattttcgtttgtttcgatcgtttttattttttttatttggcgggggcggcgcggaagcgaagaggacgcgcgtagtgtcggtgggtacgcgtagacgtgtgtgcggatcgggtatttgtttggtatttttttttttttgtaagtggcggtgtttggattttgttttcggtttcgggaattggtgcggtcggttagagtatttttacgttggtcgggcgttaaaggt

SEQ ID NO: 27016 - DNA, 977 bp, Artificial Sequence
  chemically treated genomic DNA (Homo sapiens) CpG-island No: 27016
acctttaacgcccgaccaacgtaaaaatactctaaccgaccgcaccaattcccgaaaccgaaaacaaaatccaaacaccgccacttacaaaaaaaaaaaaataccaaacaaatacccgatccgcacacacgtctacgcgtacccaccgacactacgcgcgtcctcttcgcttccgcgccgcccccgccaaataaaaaaaataaaaacgatcgaaacaaacgaaaatttaaaaaaaaaaaccgcaaaaaaaattccccgcttaaactaacgtaataataacatccaaaaataaacgcgaaaacgaccgcctacgaaaaacacccgactacgtaacgtccgctcgaaccgctactacgacaaaaataccctaattaaacgactaaacgcctaaaattcgacgccgaccgaaatccctaaatatacgcgaaaatacgcgccgcgaaaacgaataaaaaaaaaaaaaaaaaaaaaaaaaaaaaaaaaaaaaaaaaaaaaaaaaaaaaaaaataaacgaaacgacaaacgcgaaacgcaaacgaaccgacgaccgaactactaaactactaaactaccgaaaaaaaaaactatatataatcacgttatacgctacgtactaaaaacgcgaactactaaccgcaaccgaacgacgtcaaaaccgaatacgcgactctaccgcctacctccgcgcctcctctacccctcctttactctaccttcctatatcaaccgaactcatcaatataaacaacgccgaaaaactccgcgaaaccgacgacatctaacctccaacctcccccgccaaaacgctccctcgcctctcgaaaaactccgcgataacgaatacccgttatatatttctaataccgccgtctacgtttacacgctaaaaaaccaactaccaccttaaacccaaaataattacataacacgctatctcctctccgccgcccaaaatcttccaaaatccgttatactta

SEQ ID NO: 27017 - DNA, 696 bp, Artificial Sequence
  chemically treated genomic DNA (Homo sapiens) CpG-island No: 27017
gcgcgacgttcgtagggcgaattgtatttttttgagttttcgttttatggtttgagtcgtcgtagggcgcgggttcgcggttcgttaggggacggttattatagagacgtagtcggtattggcgagcgagcgagtaggcggcgtacggagcgcgtgggcgtgtttcggcggggttgcgtagttcgttttattttattttattttagttaggtcggtcgtttttattaggtttagttttagagtttaggtcggtcggtcgggttcgcgtgttttcggcgggttgcgtagagcgcgggagcggtttggggttgggtatgttgggagtttttcgggtaacggtcgtcgtcgttatagttatatagtcgtcgttattgcgttcgttttcggtgagcgtcgttgacgcgcggagatgaaattttcggtttcggtgttggcgttcgtgtttttgttcgtggtcgagataacggcggcgtttagtttgagtagtatttatcgttcgggcggggatcgtatgtggtaggcgttgacgttgtttttttcgttattgttttgcgcgttcgtgtagtttacgttttttttcgtatatcgcgattttagtcgcgatcgttcgttcgtattgttgttgtatttgttgtaatttgggtttttttttaggtgcgtgtagaagtttagagttagttttaggtcgtagtttcg

SEQ ID NO: 27018 - DNA, 696 bp, Artificial Sequence
  chemically treated genomic DNA (Homo sapiens) CpG-island No: 27018
cgaaactacgacctaaaactaactctaaacttctacacgcacctaaaaaaaaacccaaattacaacaaatacaacaacaatacgaacgaacgatcgcgactaaaatcgcgatatacgaaaaaaaacgtaaactacacgaacgcgcaaaacaataacgaaaaaaacaacgtcaacgcctaccacatacgatccccgcccgaacgataaatactactcaaactaaacgccgccgttatctcgaccacgaacaaaaacacgaacgccaacaccgaaaccgaaaatttcatctccgcgcgtcaacgacgctcaccgaaaacgaacgcaataacgacgactatataactataacgacgacgaccgttacccgaaaaactcccaacatacccaaccccaaaccgctcccgcgctctacgcaacccgccgaaaacacgcgaacccgaccgaccgacctaaactctaaaactaaacctaataaaaacgaccgacctaactaaaataaaataaaataaaacgaactacgcaaccccgccgaaacacgcccacgcgctccgtacgccgcctactcgctcgctcgccaataccgactacgtctctataataaccgtcccctaacgaaccgcgaacccgcgccctacgacgactcaaaccataaaacgaaaactcaaaaaaatacaattcgccctacgaacgtcgcgc

SEQ ID NO: 27019 - DNA, 696 bp, Artificial Sequence
  chemically treated genomic DNA (Homo sapiens) CpG-island No: 27019
cgaggttgcggtttggggttggttttgggtttttgtacgtatttgaaaaggggtttaagttgtagtaggtgtagtagtagtacgagcgggcggtcgcggttgaggtcgcggtgtacgaagagaagcgtgagttgtacgagcgcgtaaggtagtagcgagaaaagtaacgttagcgtttgttatatgcggttttcgttcgagcggtaggtgttgtttaggttgagcgtcgtcgttgtttcggttacgaataggaatacggacgttagtatcgaggtcgggaattttattttcgcgcgttagcggcgtttatcggggacggacgtagtggcggcggttgtgtggttgtggcggcggcggtcgttgttcgaggggtttttagtatgtttagttttaaatcgttttcgcgttttgcgtagttcgtcgagggtacgcgggttcggtcgatcggtttgggttttggaattggatttggtgggggcggtcgatttggttggggtggggtggggtggggcgagttgcgtagtttcgtcgggatacgtttacgcgtttcgtgcgtcgtttgttcgttcgttcgttagtgtcggttgcgtttttgtggtgatcgttttttggcgggtcgcgaattcgcgttttacgacggtttaggttatggagcgggagtttaaaaggatgtagttcgttttgcgggcgtcgcgt

SEQ ID NO: 27020 - DNA, 696 bp, Artificial Sequence
  chemically treated genomic DNA (Homo sapiens) CpG-island No: 27020
acgcgacgcccgcaaaacgaactacatccttttaaactcccgctccataacctaaaccgtcgtaaaacgcgaattcgcgacccgccaaaaaacgatcaccacaaaaacgcaaccgacactaacgaacgaacgaacaaacgacgcacgaaacgcgtaaacgtatcccgacgaaactacgcaactcgccccaccccaccccaccccaaccaaatcgaccgcccccaccaaatccaattccaaaacccaaaccgatcgaccgaacccgcgtaccctcgacgaactacgcaaaacgcgaaaacgatttaaaactaaacatactaaaaacccctcgaacaacgaccgccgccgccacaaccacacaaccgccgccactacgtccgtccccgataaacgccgctaacgcgcgaaaataaaattcccgacctcgatactaacgtccgtattcctattcgtaaccgaaacaacgacgacgctcaacctaaacaacacctaccgctcgaacgaaaaccgcatataacaaacgctaacgttacttttctcgctactaccttacgcgctcgtacaactcacgcttctcttcgtacaccgcgacctcaaccgcgaccgcccgctcgtactactactacacctactacaacttaaaccccttttcaaatacgtacaaaaacccaaaaccaaccccaaaccgcaacctcg

SEQ ID NO: 27021 - DNA, 712 bp, Artificial Sequence
  chemically treated genomic DNA (Homo sapiens) CpG-island No: 27021
gcgtcgcgtttagcgcgtttagagttgttttcgcgtattttatatttgggtatcgcgtttcggaggaggatcggggcgtacgtttggcgtatttagggttgtaacgttttcgggattgttacgttcgcggagcgattttacgttattgaggtttcggtttcgtttttgtttcggcgttacgtttgtagtcgcggtcgtttaagtggtcggagtcgggttcgtttttatttgtgcgtttttagttgagtagcgcgcggaggatagaggtagcggcggcgcgggcgttcggtattttagcggcgggttttgcggcggcggcggcggtagcggcggcgatttttttcgttgtttgggacgttagggggagggcgtttcgttttgttgtttatttataaggtcgcggttacggtcggggattgggcggtgagtaggtgtgttcgttttggttttgttggtattgatagtcgacgtcgtcgtttacgtttttttgcgtttattttttcgttttcgttttttcgcgggggcggtttttgttggagtttcggtatttgggatttttcggagatttcgtgtttcgttttttttttttaagcgggagtttttgcggtagttcgtttttttatttacgcggaagagattagggtatcgtttatacgagaaaaattttaattttgttgtttttggtttaggtaaggagcgtaaatttgagatt

SEQ ID NO: 27022 - DNA, 712 bp, Artificial Sequence
  chemically treated genomic DNA (Homo sapiens) CpG-island No: 27022
aatctcaaatttacgctccttacctaaaccaaaaacaacaaaattaaaatttttctcgtataaacgataccctaatctcttccgcgtaaataaaaaaacgaactaccgcaaaaactcccgcttaaaaaaaaaaaacgaaacacgaaatctccgaaaaatcccaaataccgaaactccaacaaaaaccgcccccgcgaaaaaacgaaaacgaaaaaataaacgcaaaaaaacgtaaacgacgacgtcgactatcaataccaacaaaaccaaaacgaacacacctactcaccgcccaatccccgaccgtaaccgcgaccttataaataaacaacaaaacgaaacgccctccccctaacgtcccaaacaacgaaaaaaatcgccgccgctaccgccgccgccgccgcaaaacccgccgctaaaataccgaacgcccgcgccgccgctacctctatcctccgcgcgctactcaactaaaaacgcacaaataaaaacgaacccgactccgaccacttaaacgaccgcgactacaaacgtaacgccgaaacaaaaacgaaaccgaaacctcaataacgtaaaatcgctccgcgaacgtaacaatcccgaaaacgttacaaccctaaatacgccaaacgtacgccccgatcctcctccgaaacgcgatacccaaatataaaatacgcgaaaacaactctaaacgcgctaaacgcgacgc

SEQ ID NO: 27023 - DNA, 712 bp, Artificial Sequence
  chemically treated genomic DNA (Homo sapiens) CpG-island No: 27023
agttttagatttgcgttttttgtttgaattaaagatagtaaaattgaggtttttttcgtgtaaacggtgttttggtttttttcgcgtagatagggaggcgagttgtcgtagaagttttcgtttaaagaggggaagcggagtacgggattttcgaggggttttaggtgtcgggattttagtagaagtcgttttcgcgggagagcggaggcggggaagtgggcgtaggggggcgtgggcgacggcgtcggttgttagtgttagtagagttagggcgggtatatttatttatcgtttaattttcggtcgtagtcgcggttttatgaataagtaataaagcgaagcgttttttttttagcgttttagatagcggagggagtcgtcgtcgttatcgtcgtcgtcgtcgtagggttcgtcgttgggatgtcgagcgttcgcgtcgtcgttgtttttgtttttcgcgcgttgtttagttgaaggcgtataggtgaggacgggttcggtttcggttatttgggcggtcgcggttgtagacgtggcgtcggggtagggacggaatcggagttttagtggcgtggggtcgtttcgcgagcgtaatagtttcgggagcgttgtagttttgggtgcgttaggcgtgcgtttcgattttttttcggagcgcggtgtttaggtgtggggtgcgcgggggtagttttgggcgcgttgggcgcggcgt

SEQ ID NO: 27024 - DNA, 712 bp, Artificial Sequence
  chemically treated genomic DNA (Homo sapiens) CpG-island No: 27024
acgccgcgcccaacgcgcccaaaactacccccgcgcaccccacacctaaacaccgcgctccgaaaaaaaatcgaaacgcacgcctaacgcacccaaaactacaacgctcccgaaactattacgctcgcgaaacgaccccacgccactaaaactccgattccgtccctaccccgacgccacgtctacaaccgcgaccgcccaaataaccgaaaccgaacccgtcctcacctatacgccttcaactaaacaacgcgcgaaaaacaaaaacaacgacgacgcgaacgctcgacatcccaacgacgaaccctacgacgacgacgacgataacgacgacgactccctccgctatctaaaacgctaaaaaaaaaacgcttcgctttattacttattcataaaaccgcgactacgaccgaaaattaaacgataaataaatatacccgccctaactctactaacactaacaaccgacgccgtcgcccacgcccccctacgcccacttccccgcctccgctctcccgcgaaaacgacttctactaaaatcccgacacctaaaacccctcgaaaatcccgtactccgcttcccctctttaaacgaaaacttctacgacaactcgcctccctatctacgcgaaaaaaaccaaaacaccgtttacacgaaaaaaacctcaattttactatctttaattcaaacaaaaaacgcaaatctaaaact

SEQ ID NO: 27025 - DNA, 926 bp, Artificial Sequence
  chemically treated genomic DNA (Homo sapiens) CpG-island No: 27025
gtacgttcgtatttataagattttatatcgtgtacgtcggaatttacgattgtatattatgtacgttcgtatttatacgagtttatattgtgtatatacgtagttatatgatatattacgtgtgtttatatttattttatatcgtgtaggttcgtatttatacgattttatatattgtatgtttgaatttacgacgttatatcgtgtacgtttatataatttattgtgtatttatacgattttatattgtgtatattcgtatttatatgattttatattatacgtgtttatatttatacgattttatatcgtgtatttatatgatttcgtattacgtacgttcgtatttacgattttatatcgtgtatatttatacgattttataacgtgtatgttcgtattgacgattttatattatgtatttatacgattttatatcgtgtacgtttgaatttaagattttatatcgtgtacgttcgtatttataagattttacgttatgtatttatataattttatatcgtgtacgtttgaatttacgattttatatcgtgtatattcgtatttataggattttatatcgtgtacgtttttatttacgggattttatatcgtgtaggattatatttatattatatattatgtatgttcgtatttatacgattttatacgatgtacgtttatattttttatacgttagtatttatgattttatattacgcgtgtttatatttatatgattttatatcgcgtatatttatatatatattattttatattgtaaatgtttatatatgattttatattgcgtatgtgcgtatttttacgattttatattatatacgtttatatttattttgattttatattgtgtaggtttaaatttatatattttatattacgtatttatatttatatgattttat

SEQ ID NO: 27026 - DNA, 926 bp, Artificial Sequence
  chemically treated genomic DNA (Homo sapiens) CpG-island No: 27026
ataaaatcatataaatataaatacgtaatataaaatatataaatttaaacctacacaatataaaatcaaaataaatataaacgtatataatataaaatcgtaaaaatacgcacatacgcaatataaaatcatatataaacatttacaatataaaataatatatatataaatatacgcgatataaaatcatataaatataaacacgcgtaatataaaatcataaatactaacgtataaaaaatataaacgtacatcgtataaaatcgtataaatacgaacatacataatatataatataaatataatcctacacgatataaaatcccgtaaataaaaacgtacacgatataaaatcctataaatacgaatatacacgatataaaatcgtaaattcaaacgtacacgatataaaattatataaatacataacgtaaaatcttataaatacgaacgtacacgatataaaatcttaaattcaaacgtacacgatataaaatcgtataaatacataatataaaatcgtcaatacgaacatacacgttataaaatcgtataaatatacacgatataaaatcgtaaatacgaacgtacgtaatacgaaatcatataaatacacgatataaaatcgtataaatataaacacgtataatataaaatcatataaatacgaatatacacaatataaaatcgtataaatacacaataaattatataaacgtacacgatataacgtcgtaaattcaaacatacaatatataaaatcgtataaatacgaacctacacgatataaaataaatataaacacacgtaatatatcatataactacgtatatacacaatataaactcgtataaatacgaacgtacataatatacaatcgtaaattccgacgtacacgatataaaatcttataaatacgaacgtac

SEQ ID NO: 27027 - DNA, 926 bp, Artificial Sequence
  chemically treated genomic DNA (Homo sapiens) CpG-island No: 27027
atggggttatgtgagtgtagatgcgtggtgtggggtgtgtaagtttagatttgtataatatggggttaaagtgagtgtagacgtgtgtggtgtggggtcgtgagagtgcgtatatgcgtaatgtggggttatgtgtgaatatttgtagtgtggggtaatgtgtgtgtgggtgtgcgcggtgtggggttatgtgaatgtgggtacgcgtggtgtggggttatgggtgttggcgtgtggggggtgtgggcgtgtatcgtgtggggtcgtgtgagtgcgggtatgtatggtgtgtggtgtgagtgtggttttgtacggtgtggggtttcgtgagtgagggcgtgtacggtgtggggttttgtgagtgcgggtgtgtacggtgtggggtcgtaagtttaggcgtgtacggtatggggttgtgtgagtgtatggcgtggggttttgtgagtgcgggcgtgtacggtgtggggttttgagtttaggcgtgtacggtatggggtcgtgtgagtgtatggtgtggggtcgttagtgcgggtatgtacgttgtggggtcgtgtgggtgtgtacggtgtggggtcgtgagtgcgggcgtgcgtggtgcggggttatgtgagtgtacggtgtggggtcgtgtgagtgtgggtacgtgtgatgtggggttatgtgagtgcggatgtgtatagtgtgggatcgtgtgagtgtatagtgggttgtgtgaacgtgtacggtgtggcgtcgtgagtttaggtatgtagtgtgtggggtcgtgtgaatacgggtttgtacggtgtggggtgagtgtgggtatacgtgatgtgttatgtgattgcgtatgtgtatagtgtgagttcgtgtgaatgcgggcgtgtatggtgtgtagtcgtgagtttcggcgtgtacgatgtggggttttgtgagtgcgggcgtgt

SEQ ID NO: 27028 - DNA, 926 bp, Artificial Sequence
  chemically treated genomic DNA (Homo sapiens) CpG-island No: 27028
acacgcccgcactcacaaaaccccacatcgtacacgccgaaactcacgactacacaccatacacgcccgcattcacacgaactcacactatacacatacgcaatcacataacacatcacgtatacccacactcaccccacaccgtacaaacccgtattcacacgaccccacacactacatacctaaactcacgacgccacaccgtacacgttcacacaacccactatacactcacacgatcccacactatacacatccgcactcacataaccccacatcacacgtacccacactcacacgaccccacaccgtacactcacataaccccgcaccacgcacgcccgcactcacgaccccacaccgtacacacccacacgaccccacaacgtacatacccgcactaacgaccccacaccatacactcacacgaccccataccgtacacgcctaaactcaaaaccccacaccgtacacgcccgcactcacaaaaccccacgccatacactcacacaaccccataccgtacacgcctaaacttacgaccccacaccgtacacacccgcactcacaaaaccccacaccgtacacgccctcactcacgaaaccccacaccgtacaaaaccacactcacaccacacaccatacatacccgcactcacacgaccccacacgatacacgcccacaccccccacacgccaacacccataaccccacaccacgcgtacccacattcacataaccccacaccgcgcacacccacacacacattaccccacactacaaatattcacacataaccccacattacgcatatacgcactctcacgaccccacaccacacacgtctacactcactttaaccccatattatacaaatctaaacttacacaccccacaccacgcatctacactcacataaccccat

SEQ ID NO: 27029 - DNA, 789 bp, Artificial Sequence
  chemically treated genomic DNA (Homo sapiens) CpG-island No: 27029
cggtatttacgttttcgtggagattttttttgtagtttgtggtttcggtatttacgttttcgtggagagttttttgtagtacgtggtttcggtatttacgttttcgtggagattttttttgtagttcgtggtttcggtatttatgttttcgtggagagtttttttgtagtacgtggtttcggtatttacgttttcgtggagagtttttttgtagtttgtggtttcggtatttacgttttcgtggagagattttttgtagttcgtggtttcggtatttacgttttcgtggagattttttttgtagttcgtggtttcggtatttatgttttcgtggagagtttttttgtggtacgtggtttcggtatttacgttttcgtggagagtttttttgtagtttatggtttcggtatttacgttttcgtggagattttttttgtagttcgtggtttcggtatttacgtttttatggagattttttttgtagtttgtggtttcggtatttatgttttcgtggagagtttttttgtagtacgtggtttcggtatttacgttttcgtggagagtttttttgtagtttgtggtttcggtatttacgttttcgtggagagtttttttgtggtacgtggtttcggtatttacgtttttgtggagagtttttttgtggtacgtggtttcggtatttacgttttcgtggagattttttttgtagtttgtggtttcggtatttacgttttcgtggagagtttttttgtggtacgtggtttcggtatgttgtttgggtgtatgggg

SEQ ID NO: 27030 - DNA, 789 bp, Artificial Sequence
  chemically treated genomic DNA (Homo sapiens) CpG-island No: 27030
ccccatacacccaaacaacataccgaaaccacgtaccacaaaaaaactctccacgaaaacgtaaataccgaaaccacaaactacaaaaaaaatctccacgaaaacgtaaataccgaaaccacgtaccacaaaaaaactctccacaaaaacgtaaataccgaaaccacgtaccacaaaaaaactctccacgaaaacgtaaataccgaaaccacaaactacaaaaaaactctccacgaaaacgtaaataccgaaaccacgtactacaaaaaaactctccacgaaaacataaataccgaaaccacaaactacaaaaaaaatctccataaaaacgtaaataccgaaaccacgaactacaaaaaaaatctccacgaaaacgtaaataccgaaaccataaactacaaaaaaactctccacgaaaacgtaaataccgaaaccacgtaccacaaaaaaactctccacgaaaacataaataccgaaaccacgaactacaaaaaaaatctccacgaaaacgtaaataccgaaaccacgaactacaaaaaatctctccacgaaaacgtaaataccgaaaccacaaactacaaaaaaactctccacgaaaacgtaaataccgaaaccacgtactacaaaaaaactctccacgaaaacataaataccgaaaccacgaactacaaaaaaaatctccacgaaaacgtaaataccgaaaccacgtactacaaaaaactctccacgaaaacgtaaataccgaaaccacaaactacaaaaaaaatctccacgaaaacgtaaataccg

SEQ ID NO: 27031 - DNA, 789 bp, Artificial Sequence
  chemically treated genomic DNA (Homo sapiens) CpG-island No: 27031
ttttatgtatttaaataatatgtcggggttacgtgttataggaaaattttttacggaaacgtggatgtcggggttataggttataggaaaagtttttacggaaacgtggatgtcggggttacgtgttataggaaaattttttatagaaacgtggatgtcggggttacgtgttataggaaaattttttacggaaacgtggatgtcggggttataggttataggaaaattttttacggaaacgtggatgtcggagttacgtgttataggaaaattttttacggaaatatggatgtcggggttataggttataggaaaagtttttatggaaacgtggatgtcggggttacgggttataggaaaagtttttacggaaacgtggatgtcggggttatgggttataggaaaattttttacggaaacgtggatgtcggggttacgtgttataggaaaattttttacggaaatatggatgtcggggttacgggttataggaaaagtttttacggaaacgtggatgtcggggttacgggttataggaaatttttttacggaaacgtggatgtcggggttataggttataggaaaattttttacggaaacgtggatgtcggagttacgtgttataggaaaattttttacggaaatatggatgtcggggttacgggttataggaaaagtttttacggaaacgtggatgtcggagttacgtgttataggaaattttttacggaaacgtggatgtcggggttataggttataggaaaagtttttacggaaacgtggatgtcg

SEQ ID NO: 27032 - DNA, 789 bp, Artificial Sequence
  chemically treated genomic DNA (Homo sapiens) CpG-island No: 27032
cgacatccacgtttccgtaaaaacttttcctataacctataaccccgacatccacgtttccgtaaaaaatttcctataacacgtaactccgacatccacgtttccgtaaaaacttttcctataacccgtaaccccgacatccatatttccgtaaaaaattttcctataacacgtaactccgacatccacgtttccgtaaaaaattttcctataacctataaccccgacatccacgtttccgtaaaaaaatttcctataacccgtaaccccgacatccacgtttccgtaaaaacttttcctataacccgtaaccccgacatccatatttccgtaaaaaattttcctataacacgtaaccccgacatccacgtttccgtaaaaaattttcctataacccataaccccgacatccacgtttccgtaaaaacttttcctataacccgtaaccccgacatccacgtttccataaaaacttttcctataacctataaccccgacatccatatttccgtaaaaaattttcctataacacgtaactccgacatccacgtttccgtaaaaaattttcctataacctataaccccgacatccacgtttccgtaaaaaattttcctataacacgtaaccccgacatccacgtttctataaaaaattttcctataacacgtaaccccgacatccacgtttccgtaaaaacttttcctataacctataaccccgacatccacgtttccgtaaaaaattttcctataacacgtaaccccgacatattatttaaatacataaaa

SEQ ID NO: 27033 - DNA, 548 bp, Artificial Sequence
  chemically treated genomic DNA (Homo sapiens) CpG-island No: 27033
gcgttttcgtagtcggattttgagcgcggcgttttttttttttttttgttgttttattattattttcgtttttgttttcgtcgtcgttaatatcgtttttttttaggttttttataacgcgtagtttgtagttagttgtttcgcggcggaattttattttattttattttatttcgtttttgttttcgttcgtttttttagggggtttttttcgttttttttattatttagcgcgtcgaagttttttgtttagagttcggttttgttatttggattcgttttttgtgttttttgcgtttcgttatgttggtcgtttcgttcggttttttttgacgtggagcgaggagggggcggtggaaatttcgcgagaacgcgtttcgaggttcgttatgtaattcgtcggttggcgtttttggaatggggaggtcggtcgtttggcggggttagcggtttttagcggtgtttttttttttttttttttttcgtttttgttgtgcgggaattggagaatcgttaggacgtggaggaagtagagaagtggattagag

SEQ ID NO: 27034 - DNA, 548 bp, Artificial Sequence
  chemically treated genomic DNA (Homo sapiens) CpG-island No: 27034
ctctaatccacttctctacttcctccacgtcctaacgattctccaattcccgcacaacaaaaacgaaaaaaaaaaaaaaaaaaaaacaccgctaaaaaccgctaaccccgccaaacgaccgacctccccattccaaaaacgccaaccgacgaattacataacgaacctcgaaacgcgttctcgcgaaatttccaccgccccctcctcgctccacgtcaaaaaaaaccgaacgaaacgaccaacataacgaaacgcaaaaaacacaaaaaacgaatccaaataacaaaaccgaactctaaacaaaaaacttcgacgcgctaaataataaaaaaaacgaaaaaaaccccctaaaaaaacgaacgaaaacaaaaacgaaataaaataaaataaaataaaattccgccgcgaaacaactaactacaaactacgcgttataaaaaacctaaaaaaaaacgatattaacgacgacgaaaacaaaaacgaaaataataataaaacaacaaaaaaaaaaaaaaaacgccgcgctcaaaatccgactacgaaaacgc

SEQ ID NO: 27035 - DNA, 548 bp, Artificial Sequence
  chemically treated genomic DNA (Homo sapiens) CpG-island No: 27035
ttttgatttatttttttgttttttttacgttttaacgattttttagttttcgtatagtaggagcggagggaagaggggagagaaggtatcgttaaggatcgttggtttcgttaggcggtcgatttttttattttaggggcgttagtcggcggattatataacgggtttcggggcgcgttttcgcgaggtttttatcgtttttttttcgttttacgttagagggaatcgggcggagcggttaatatggcggaacgtaggagatataagaagcggatttaggtagtaaagtcgagttttgggtagggggtttcggcgcgttggatagtggaaggggcggggaaagttttttaaaagggcgagcgaaagtaagggcgaggtggggtggggtggggtggggtttcgtcgcgaggtagttggttgtaggttgcgcgttgtgaggggtttgagggggggcggtgttggcgacggcggagatagagacggaggtggtggtggagtagtaggggaaggaaggaggcgtcgcgtttagaattcggttgcggaggcgt

SEQ ID NO: 27036 - DNA, 548 bp, Artificial Sequence
  chemically treated genomic DNA (Homo sapiens) CpG-island No: 27036
acgcctccgcaaccgaattctaaacgcgacgcctccttccttcccctactactccaccaccacctccgtctctatctccgccgtcgccaacaccgccccccctcaaacccctcacaacgcgcaacctacaaccaactacctcgcgacgaaaccccaccccaccccaccccacctcgcccttactttcgctcgcccttttaaaaaactttccccgccccttccactatccaacgcgccgaaaccccctacccaaaactcgactttactacctaaatccgcttcttatatctcctacgttccgccatattaaccgctccgcccgattccctctaacgtaaaacgaaaaaaaaacgataaaaacctcgcgaaaacgcgccccgaaacccgttatataatccgccgactaacgcccctaaaataaaaaaatcgaccgcctaacgaaaccaacgatccttaacgataccttctctcccctcttccctccgctcctactatacgaaaactaaaaaatcgttaaaacgtaaaaaaaacaaaaaaataaatcaaaa

SEQ ID NO: 27037 - DNA, 625 bp, Artificial Sequence
  chemically treated genomic DNA (Homo sapiens) CpG-island No: 27037
aatcgcggagtaattagtcgggcgtttgcgggagtcgagcgtggtgaggtggggttttaggggtaggtgggaggtgttcgggttaatcgttcgaggttcggagattcgttcgtttagggcgtttgagggaatttcgttcgggtagcggttttttgttattcgggaggaattcgaggtttagagaggggttgggacgcgtcgttagggttcggggttcgtttgttttagttttttgttgtcgttagtacgttaagttttagtcggcgtcgaaggagagtttttcgattttcgtgtttagtagtcgtaattttaggttgggagggtgaggcgtcgcgttttgtcgttttttcgtttttcgttttttgtgttttggcggatttgtacgtaatttattcgaaagtttagttttattcgttattcgattttggagtttttattttttaggattttgttgaagtatcgttttttagtcgttttttttaggcgtagttgtattcgtttttcggtttttgtattcgttgtgtatcgagttattttttcggtttttcgttgatatcgtaagttcgttcgttagatgttatgttttgttttttttatttttagattttagggtttagtacgtgat

SEQ ID NO: 27038 - DNA, 625 bp, Artificial Sequence
  chemically treated genomic DNA (Homo sapiens) CpG-island No: 27038
atcacgtactaaaccctaaaatctaaaaataaaaaaaacaaaacataacatctaacgaacgaacttacgatatcaacgaaaaaccgaaaaaataactcgatacacaacgaatacaaaaaccgaaaaacgaatacaactacgcctaaaaaaaacgactaaaaaacgatacttcaacaaaatcctaaaaaataaaaactccaaaatcgaataacgaataaaactaaactttcgaataaattacgtacaaatccgccaaaacacaaaaaacgaaaaacgaaaaaacgacaaaacgcgacgcctcaccctcccaacctaaaattacgactactaaacacgaaaatcgaaaaactctccttcgacgccgactaaaacttaacgtactaacgacaacaaaaaactaaaacaaacgaaccccgaaccctaacgacgcgtcccaacccctctctaaacctcgaattcctcccgaataacaaaaaaccgctacccgaacgaaattccctcaaacgccctaaacgaacgaatctccgaacctcgaacgattaacccgaacacctcccacctacccctaaaaccccacctcaccacgctcgactcccgcaaacgcccgactaattactccgcgatt

SEQ ID NO: 27039 - DNA, 625 bp, Artificial Sequence
  chemically treated genomic DNA (Homo sapiens) CpG-island No: 27039
attacgtgttaggttttgggatttagagatgaaaaaggtaaggtataatatttaacgaacgagtttacggtgttaacgaggggtcgggaaagtaattcggtgtatagcgagtgtaaaaatcgagaagcgaatgtagttgcgtttggagaaggcggttgagaagcgatattttagtagggttttgaagaatgggagttttagagtcgggtggcgggtgggattgggttttcggatagattacgtgtaaattcgttaggatatagggagcgaggggcgggggggcggtagagcgcggcgttttatttttttagtttgggattgcggttattggatacgagggtcgggaagttttttttcggcgtcgattggagtttagcgtgttggcggtagtaagaagttgaggtaagcgggtttcgggttttaacgacgcgttttagtttttttttgggtttcgggtttttttcgggtaataagaggtcgttgttcgaacgggatttttttaggcgttttagacgggcgggttttcgggtttcggacggttaattcgagtattttttatttgtttttgaggttttattttattacgttcggttttcgtagacgttcggttagttgtttcgcgatt

SEQ ID NO: 27040 - DNA, 625 bp, Artificial Sequence
  chemically treated genomic DNA (Homo sapiens) CpG-island No: 27040
aatcgcgaaacaactaaccgaacgtctacgaaaaccgaacgtaataaaataaaacctcaaaaacaaataaaaaatactcgaattaaccgtccgaaacccgaaaacccgcccgtctaaaacgcctaaaaaaatcccgttcgaacaacgacctcttattacccgaaaaaaacccgaaacccaaaaaaaaactaaaacgcgtcgttaaaacccgaaacccgcttacctcaacttcttactaccgccaacacgctaaactccaatcgacgccgaaaaaaaacttcccgaccctcgtatccaataaccgcaatcccaaactaaaaaaataaaacgccgcgctctaccgcccccccgcccctcgctccctatatcctaacgaatttacacgtaatctatccgaaaacccaatcccacccgccacccgactctaaaactcccattcttcaaaaccctactaaaatatcgcttctcaaccgccttctccaaacgcaactacattcgcttctcgatttttacactcgctatacaccgaattactttcccgacccctcgttaacaccgtaaactcgttcgttaaatattataccttacctttttcatctctaaatcccaaaacctaacacgtaat

SEQ ID NO: 27041 - DNA, 1331 bp, Artificial Sequence
  chemically treated genomic DNA (Homo sapiens) CpG-island No: 27041
ttttttcggtttagggattgcggttttacgtcgttgattttagcggggattttttcggtcgtcgggaggggatttcggaattggtttcggagtgcgcgtgtggtcgcggcggggaggggcgaggcggggagttttcgtcgtttcgcgttaagagggcgggagggcgatatagcggttaggagcggttttcgaggtcggttagggatttagtttttttcgttattattaattcgcgttttttacgcgcgtcgtcgttagttggtttcgcgcgttttttaggtggaggttaggaggtagagaatcgcgggttcgggggttattcgttatttttaagtcgtttcgttagaagtttagggcgaggaaaaggagagagataaaagagcgttgcggggggagtttttatatttttcgcggtttcgtatacggttcggtttttattcgtagtggcggaagatttcgttggtgattttatagtagaaaattttttcgtcgggtcgtaggttcgcgggcggtttttgttttataaacggttttcggtgtagtagcggtatttttcgttcgttcgcgggttcgtttggattttcggtcgttcgcgtcggtttcgtttttttattaaaattggagggaaaggaaagtcggtaaggtggggagttttcggcggtagcgtgggtcggttcgcgcgttgggagaagttcggttgttttttgtgtgattgacgcgtcgcggtcgttatcggagtcgagttcgtttttgtcgttgttcgggtgtcgagcgagcggagtcgtcgtcgtttttgtttttcgagcgcgttttattttttttcgttttgtcgtcgttttataatggggtaggacgtttcgtcgcggggggtagtgcgggagcggcggcggtttttttttttagcgtcggtttttcgttcgtcgtcgtcgttaggtttataacgtgttcggcgcgtagttggtcggtcggttagtttaacgtcgttagagcgttcgtcgcgggcggatttcggagttgtttcgttttgttttcggttcgtttttattttttcgtcggcgtcggtcggttttcgagcgatttttatttgcgattacgtcgattgttatttgtttattttttttattataaaggtaacgaggggagatttcgtttttttaggggatcgttttttttcggtttcgtcgcgtttttggttgtcgtttttttcgttgttattgttcgatttcgcgcggggaattgcgttttatcgttattttttcgtttttcggagtttttgggaagtttttgatttattttcggttttgaaggaggaagagttgttgggaggagtt

SEQ ID NO: 27042 - DNA, 1331 bp, Artificial Sequence
  chemically treated genomic DNA (Homo sapiens) CpG-island No: 27042
aactcctcccaacaactcttcctccttcaaaaccgaaaataaatcaaaaacttcccaaaaactccgaaaaacgaaaaaataacgataaaacgcaattccccgcgcgaaatcgaacaataacaacgaaaaaaacgacaaccaaaaacgcgacgaaaccgaaaaaaaacgatcccctaaaaaaacgaaatctcccctcgttacctttataataaaaaaaataaacaaataacaatcgacgtaatcgcaaataaaaatcgctcgaaaaccgaccgacgccgacgaaaaaataaaaacgaaccgaaaacaaaacgaaacaactccgaaatccgcccgcgacgaacgctctaacgacgttaaactaaccgaccgaccaactacgcgccgaacacgttataaacctaacgacgacgacgaacgaaaaaccgacgctaaaaaaaaaaaccgccgccgctcccgcactaccccccgcgacgaaacgtcctaccccattataaaacgacgacaaaacgaaaaaaaataaaacgcgctcgaaaaacaaaaacgacgacgactccgctcgctcgacacccgaacaacgacaaaaacgaactcgactccgataacgaccgcgacgcgtcaatcacacaaaaaacaaccgaacttctcccaacgcgcgaaccgacccacgctaccgccgaaaactccccaccttaccgactttcctttccctccaattttaataaaaaaacgaaaccgacgcgaacgaccgaaaatccaaacgaacccgcgaacgaacgaaaaataccgctactacaccgaaaaccgtttataaaacaaaaaccgcccgcgaacctacgacccgacgaaaaaattttctactataaaatcaccaacgaaatcttccgccactacgaataaaaaccgaaccgtatacgaaaccgcgaaaaatataaaaactccccccgcaacgctcttttatctctctccttttcctcgccctaaacttctaacgaaacgacttaaaaataacgaataacccccgaacccgcgattctctacctcctaacctccacctaaaaaacgcgcgaaaccaactaacgacgacgcgcgtaaaaaacgcgaattaataataacgaaaaaaactaaatccctaaccgacctcgaaaaccgctcctaaccgctatatcgccctcccgccctcttaacgcgaaacgacgaaaactccccgcctcgcccctccccgccgcgaccacacgcgcactccgaaaccaattccgaaatcccctcccgacgaccgaaaaaatccccgctaaaatcaacgacgtaaaaccgcaatccctaaaccgaaaaaa

SEQ ID NO: 27043 - DNA, 1331 bp, Artificial Sequence
  chemically treated genomic DNA (Homo sapiens) CpG-island No: 27043
agttttttttaatagtttttttttttttagagtcgaaagtagattagaaattttttaggagtttcgagaggcggggaagtggcggtgggacgtaatttttcgcgcggagtcgggtagtggtagcgggagaagcggtagttaggggcgcggcggggtcggagagaggcggttttttgggaggacggggttttttttcgttgtttttgtagtggagaaggtggataagtggtagtcggcgtgatcgtaggtgagggtcgttcgggagtcggtcggcgtcggcggggaagtggaggcgagtcgggaataaagcggagtagtttcggggttcgttcgcggcgagcgttttggcggcgttgggttggtcggtcggttagttgcgcgtcgagtacgttgtgagtttggcggcggcggcgggcgaggagtcggcgttgggggagggggtcgtcgtcgttttcgtattgtttttcgcggcggggcgttttgttttattgtgaggcggcggtaggacgagaggaggtagggcgcgttcggggggtaggggcggcggcggtttcgttcgttcgatattcgggtagcggtaggaacgaattcggtttcggtagcggtcgcggcgcgttagttatataaaaggtagtcgagttttttttagcgcgcggatcggtttacgttgtcgtcgagggttttttattttatcggtttttttttttttttaattttgatagggaagcggggtcggcgcgggcggtcgagggtttaggcgagttcgcgggcggacgggagatgtcgttgttatatcgaaagtcgtttgtgagatagaagtcgttcgcggatttgcggttcgacgaggaagttttttattgtaaagttattaacgagatttttcgttattacgagtaagagtcgggtcgtgtgcggggtcgcggggggtgtggggatttttttcgtagcgtttttttgttttttttttttttttcgttttgggtttttggcggggcgatttgaaagtgacgggtggttttcgggttcgcggttttttgttttttggtttttatttggagaacgcgcggggttaattggcggcggcgcgcgtggggaacgcgggttggtagtggcggaggaggttgggtttttggtcggtttcggggatcgtttttagtcgttgtgtcgttttttcgtttttttggcgcggggcggcggaaatttttcgtttcgttttttttcgtcgcggttatacgcgtatttcggggttagtttcgggattttttttcggcggtcgaggggattttcgttagggttagcgacgtggggtcgtagtttttgggtcggggaag

SEQ ID NO: 27044 - DNA, 1331 bp, Artificial Sequence
  chemically treated genomic DNA (Homo sapiens) CpG-island No: 27044
cttccccgacccaaaaactacgaccccacgtcgctaaccctaacgaaaatcccctcgaccgccgaaaaaaaatcccgaaactaaccccgaaatacgcgtataaccgcgacgaaaaaaaacgaaacgaaaaatttccgccgccccgcgccaaaaaaacgaaaaaacgacacaacgactaaaaacgatccccgaaaccgaccaaaaacccaacctcctccgccactaccaacccgcgttccccacgcgcgccgccgccaattaaccccgcgcgttctccaaataaaaaccaaaaaacaaaaaaccgcgaacccgaaaaccacccgtcactttcaaatcgccccgccaaaaacccaaaacgaaaaaaaaaaaaaaaacaaaaaaacgctacgaaaaaaatccccacaccccccgcgaccccgcacacgacccgactcttactcgtaataacgaaaaatctcgttaataactttacaataaaaaacttcctcgtcgaaccgcaaatccgcgaacgacttctatctcacaaacgactttcgatataacaacgacatctcccgtccgcccgcgaactcgcctaaaccctcgaccgcccgcgccgaccccgcttccctatcaaaattaaaaaaaaaaaaaaaccgataaaataaaaaaccctcgacgacaacgtaaaccgatccgcgcgctaaaaaaaactcgactaccttttatataactaacgcgccgcgaccgctaccgaaaccgaattcgttcctaccgctacccgaatatcgaacgaacgaaaccgccgccgcccctaccccccgaacgcgccctacctcctctcgtcctaccgccgcctcacaataaaacaaaacgccccgccgcgaaaaacaatacgaaaacgacgacgaccccctcccccaacgccgactcctcgcccgccgccgccgccaaactcacaacgtactcgacgcgcaactaaccgaccgaccaacccaacgccgccaaaacgctcgccgcgaacgaaccccgaaactactccgctttattcccgactcgcctccacttccccgccgacgccgaccgactcccgaacgaccctcacctacgatcacgccgactaccacttatccaccttctccactacaaaaacaacgaaaaaaaaccccgtcctcccaaaaaaccgcctctctccgaccccgccgcgcccctaactaccgcttctcccgctaccactacccgactccgcgcgaaaaattacgtcccaccgccacttccccgcctctcgaaactcctaaaaaatttctaatctactttcgactctaaaaaaaaaaaaactattaaaaaaaact

SEQ ID NO: 27045 - DNA, 770 bp, Artificial Sequence
  chemically treated genomic DNA (Homo sapiens) CpG-island No: 27045
ttagcgaacgttgcggttaggggagggcgggaggagggagagcggacgtagggggcggggaggggcgtagggttgcgcgttcgtcggcgttttttttcggtttggtcggcggttggaggagagtggatttttttattttaaggttttgttttcggcgcgttttcgtcgtttttcggtttcgacgcggggttcggggatgttcgttagtatgtttagtatcgataatattttagtcgttcggtcgcgttgtaaggattcggtgttgtcggtggcgtatagcgcggcggttttcgtcgttttttcggttttgtacggggattcgttttacggcgttagcggcggcgttttttcggattatggcgttttttattcgcgtttcgtggttttcggcggcgcgggtttttcggtcgcggttagcggttttcgtttcggttataataattatttttacgggtagttgtacgtgtaggcggcgttcgtgggttcggtttgttgcggggtcgtgtcgtcgttgggcgtttagtagtgtttttgcgtttcgacgtttttaggtagggtcgcgttcgtttcggtttttgtcgtttattgcggtttttagtttatggagtcggttggttaatttattttttttaaattttgttttttttgtaattttttttttcgtttttgtcgatcgggcgtaggagtttgtaaattttttgttgtaaatttttggttagagttcgcgaaaattggaatttagtgtttgttcggggaaattgggttttgtt

SEQ ID NO: 27046 - DNA, 770 bp, Artificial Sequence
  chemically treated genomic DNA (Homo sapiens) CpG-island No: 27046
aacaaaacccaatttccccgaacaaacactaaattccaattttcgcgaactctaaccaaaaatttacaacaaaaaatttacaaactcctacgcccgatcgacaaaaacgaaaaaaaaaattacaaaaaaaacaaaatttaaaaaaaataaattaaccaaccgactccataaactaaaaaccgcaataaacgacaaaaaccgaaacgaacgcgaccctacctaaaaacgtcgaaacgcaaaaacactactaaacgcccaacgacgacacgaccccgcaacaaaccgaacccacgaacgccgcctacacgtacaactacccgtaaaaataattattataaccgaaacgaaaaccgctaaccgcgaccgaaaaacccgcgccgccgaaaaccacgaaacgcgaataaaaaacgccataatccgaaaaaacgccgccgctaacgccgtaaaacgaatccccgtacaaaaccgaaaaaacgacgaaaaccgccgcgctatacgccaccgacaacaccgaatccttacaacgcgaccgaacgactaaaatattatcgatactaaacatactaacgaacatccccgaaccccgcgtcgaaaccgaaaaacgacgaaaacgcgccgaaaacaaaaccttaaaataaaaaaatccactctcctccaaccgccgaccaaaccgaaaaaaaacgccgacgaacgcgcaaccctacgcccctccccgccccctacgtccgctctccctcctcccgccctcccctaaccgcaacgttcgctaa

SEQ ID NO: 27047 - DNA, 770 bp, Artificial Sequence
  chemically treated genomic DNA (Homo sapiens) CpG-island No: 27047
aataaaatttagttttttcgggtaggtattgaattttagttttcgcgaattttggttaaaagtttgtagtaagaagtttgtaaatttttgcgttcgatcggtaaaagcggaggggggagttgtaagaggagtaaagtttgaggaaggtgaattaattaatcggttttatgggttaaggatcgtagtgggcggtagaggtcggagcgagcgcgattttatttgggggcgtcgggacgtaggagtattgttgggcgtttagcggcggtacggtttcgtagtaggtcgggtttacgggcgtcgtttgtacgtgtagttgttcgtagaagtagttgttgtagtcgaggcgggagtcgttgatcgcggtcgggaggttcgcgtcgtcgggggttacggggcgcgggtagaaggcgttatagttcgaggaggcgtcgtcgttggcgtcgtagagcgagttttcgtgtagggtcgggaagacgacgggagtcgtcgcgttgtgcgttatcggtaatatcgagtttttgtagcgcggtcgggcggttaggatgttgtcgatgttgaatatgttggcgggtattttcgagtttcgcgtcgggatcggggggcggcgggaacgcgtcgaggatagagttttaaagtgggggggtttatttttttttagtcgtcgattaaatcgaaagagagcgtcggcgagcgcgtagttttgcgttttttttcgttttttgcgttcgtttttttttttttcgtttttttttagtcgtagcgttcgttga

SEQ ID NO: 27048 - DNA, 770 bp, Artificial Sequence
  chemically treated genomic DNA (Homo sapiens) CpG-island No: 27048
tcaacgaacgctacgactaaaaaaaaacgaaaaaaaaaaaaacgaacgcaaaaaacgaaaaaaaacgcaaaactacgcgctcgccgacgctctctttcgatttaatcgacgactaaaaaaaaataaacccccccactttaaaactctatcctcgacgcgttcccgccgccccccgatcccgacgcgaaactcgaaaatacccgccaacatattcaacatcgacaacatcctaaccgcccgaccgcgctacaaaaactcgatattaccgataacgcacaacgcgacgactcccgtcgtcttcccgaccctacacgaaaactcgctctacgacgccaacgacgacgcctcctcgaactataacgccttctacccgcgccccgtaacccccgacgacgcgaacctcccgaccgcgatcaacgactcccgcctcgactacaacaactacttctacgaacaactacacgtacaaacgacgcccgtaaacccgacctactacgaaaccgtaccgccgctaaacgcccaacaatactcctacgtcccgacgcccccaaataaaatcgcgctcgctccgacctctaccgcccactacgatccttaacccataaaaccgattaattaattcaccttcctcaaactttactcctcttacaactcccccctccgcttttaccgatcgaacgcaaaaatttacaaacttcttactacaaacttttaaccaaaattcgcgaaaactaaaattcaatacctacccgaaaaaactaaattttatt

SEQ ID NO: 27049 - DNA, 588 bp, Artificial Sequence
  chemically treated genomic DNA (Homo sapiens) CpG-island No: 27049
tgaaaacgcggaagcgggagcgagcggtttttttttttttgttggtttgcgcggggtgtttcgtcgttatattaagtttttcgggtgtttcgggattgggggaagcgcgtttttgatttgaattgttttgtttttcgttgcgtaataggtttggtttaagaatcgtcgcgttaaatggaggcggtagaagcggtttttattagaggagtcggagaacgcggagaagtggaataagacgtcgtcgtcgaaggcgttatcggagaagagggaagaggaaggtaaaagcgatttggattcggatagttgacggtcgcgggatatttgttcgtattatttatttaattcgaaggatttgtatagatagacgatgttatttttttgtatacgcgttgttttgcgggagggggtcgagaaagaggaacgaggagttgtaaatagtgtatagagtcgggagggtcggcgtttggggttagggcgcgtatagtttagtagttcgaggtcgttcgcgattagtttttatcgtagtatttatagttaaattaagggtgatagtataataaagtgatggcgatgtagacgggttatatt

SEQ ID NO: 27050 - DNA, 588 bp, Artificial Sequence
  chemically treated genomic DNA (Homo sapiens) CpG-island No: 27050
aatataacccgtctacatcgccatcactttattatactatcacccttaatttaactataaatactacgataaaaactaatcgcgaacgacctcgaactactaaactatacgcgccctaaccccaaacgccgaccctcccgactctatacactatttacaactcctcgttcctctttctcgaccccctcccgcaaaacaacgcgtatacaaaaaaataacatcgtctatctatacaaatccttcgaattaaataaataatacgaacaaatatcccgcgaccgtcaactatccgaatccaaatcgcttttaccttcctcttccctcttctccgataacgccttcgacgacgacgtcttattccacttctccgcgttctccgactcctctaataaaaaccgcttctaccgcctccatttaacgcgacgattcttaaaccaaacctattacgcaacgaaaaacaaaacaattcaaatcaaaaacgcgcttcccccaatcccgaaacacccgaaaaacttaatataacgacgaaacaccccgcgcaaaccaacaaaaaaaaaaaaaccgctcgctcccgcttccgcgttttca

SEQ ID NO: 27051 - DNA, 588 bp, Artificial Sequence
  chemically treated genomic DNA (Homo sapiens) CpG-island No: 27051
aatgtggttcgtttatatcgttattattttattgtattgttatttttaatttaattataaatattacggtgggggttagtcgcgggcggtttcgggttgttgggttgtgcgcgttttgattttagacgtcgattttttcggttttgtatattatttatagtttttcgtttttttttttcgattttttttcgtaaggtagcgcgtgtgtaagaaagtagtatcgtttgtttgtgtaagtttttcgagttaggtaagtaatacgggtaagtgtttcgcggtcgttagttgttcgagtttaaatcgtttttattttttttttttttttttttcggtgacgttttcgacgacgacgttttgttttattttttcgcgtttttcgatttttttgatgaggatcgtttttgtcgtttttatttggcgcggcggtttttaaattagatttgttgcgtaacggaggataaaatagtttagattaaaggcgcgttttttttagtttcggggtattcggggagtttggtgtggcggcgggatatttcgcgtaggttaataaaaggaggggagtcgttcgttttcgttttcgcgttttta

SEQ ID NO: 27052 - DNA, 588 bp, Artificial Sequence
  chemically treated genomic DNA (Homo sapiens) CpG-island No: 27052
taaaaacgcgaaaacgaaaacgaacgactcccctccttttattaacctacgcgaaatatcccgccgccacaccaaactccccgaataccccgaaactaaaaaaaacgcgcctttaatctaaactattttatcctccgttacgcaacaaatctaatttaaaaaccgccgcgccaaataaaaacgacaaaaacgatcctcatcaaaaaaatcgaaaaacgcgaaaaaataaaacaaaacgtcgtcgtcgaaaacgtcaccgaaaaaaaaaaaaaaaaaaaataaaaacgatttaaactcgaacaactaacgaccgcgaaacacttacccgtattacttacctaactcgaaaaacttacacaaacaaacgatactactttcttacacacgcgctaccttacgaaaaaaaatcgaaaaaaaaaaacgaaaaactataaataatatacaaaaccgaaaaaatcgacgtctaaaatcaaaacgcgcacaacccaacaacccgaaaccgcccgcgactaacccccaccgtaatatttataattaaattaaaaataacaatacaataaaataataacgatataaacgaaccacatt

SEQ ID NO: 27053 - DNA, 524 bp, Artificial Sequence
  chemically treated genomic DNA (Homo sapiens) CpG-island No: 27053
tcgcggtggttcgttcgttttcgtagaggggtcgtcgggaagagggtttattttcgtagttcggtcgtttttcgtcgaatttcggtttcggcgttagaagttgcggtttagcgtagagtttaaacgaaagcgcgatttagggaagtgttgtttcgttttattttttttcgggtttcgtatttttttcgcgtttcggggtgcggtcgtattttttcggcgatttttcgggattttggtttgtttcgacgttggttcggggattcgatttcgtttagagcggaattgattttttttatttgtaggtttaacggggcgggaaaattgaaaattcgtagggattcggggttcgacggaacggtcgttgggttttgggatttcggggtggttttttttagtttcgtatttcgggttcgaaacgcgttaggatcggaaataaatattcggaattttataggatttcgtttttataattttgagaaattggattttcgcgatttttcgaatattgacgttagatgtttacg

SEQ ID NO: 27054 - DNA, 524 bp, Artificial Sequence
  chemically treated genomic DNA (Homo sapiens) CpG-island No: 27054
cgtaaacatctaacgtcaatattcgaaaaatcgcgaaaatccaatttctcaaaattataaaaacgaaatcctataaaattccgaatatttatttccgatcctaacgcgtttcgaacccgaaatacgaaactaaaaaaaaccaccccgaaatcccaaaacccaacgaccgttccgtcgaaccccgaatccctacgaattttcaattttcccgccccgttaaacctacaaataaaaaaaatcaattccgctctaaacgaaatcgaatccccgaaccaacgtcgaaacaaaccaaaatcccgaaaaatcgccgaaaaaatacgaccgcaccccgaaacgcgaaaaaaatacgaaacccgaaaaaaaataaaacgaaacaacacttccctaaatcgcgctttcgtttaaactctacgctaaaccgcaacttctaacgccgaaaccgaaattcgacgaaaaacgaccgaactacgaaaataaaccctcttcccgacgacccctctacgaaaacgaacgaaccaccgcga

SEQ ID NO: 27055 - DNA, 524 bp, Artificial Sequence
  chemically treated genomic DNA (Homo sapiens) CpG-island No: 27055
cgtaggtatttaacgttagtattcgggaagtcgcgggggtttagttttttagagttataggggcggagttttataaggtttcgagtgtttattttcggttttagcgcgtttcggattcgagatacggagttaaaggagattatttcggagttttaagatttaacgatcgtttcgtcgggtttcggatttttacgaatttttagttttttcgtttcgttaagtttataggtagaagggattagtttcgttttagacgagatcggattttcgagttaacgtcgaaataagttaagatttcggggaatcgtcgagaaggtacgatcgtatttcgaaacgcgagaaggatacgagattcggaaggagatagggcggaataatatttttttggatcgcgttttcgtttaaattttacgttaaatcgtaatttttaacgtcggagtcggagttcggcggaaggcgatcggattacggaggtaaatttttttttcggcgatttttttacgagagcgagcgagttatcgcga

SEQ ID NO: 27056 - DNA, 524 bp, Artificial Sequence
  chemically treated genomic DNA (Homo sapiens) CpG-island No: 27056
tcgcgataactcgctcgctctcgtaaaaaaatcgccgaaaaaaaaatttacctccgtaatccgatcgccttccgccgaactccgactccgacgttaaaaattacgatttaacgtaaaatttaaacgaaaacgcgatccaaaaaaatattattccgccctatctccttccgaatctcgtatccttctcgcgtttcgaaatacgatcgtaccttctcgacgattccccgaaatcttaacttatttcgacgttaactcgaaaatccgatctcgtctaaaacgaaactaatcccttctacctataaacttaacgaaacgaaaaaactaaaaattcgtaaaaatccgaaacccgacgaaacgatcgttaaatcttaaaactccgaaataatctcctttaactccgtatctcgaatccgaaacgcgctaaaaccgaaaataaacactcgaaaccttataaaactccgcccctataactctaaaaaactaaacccccgcgacttcccgaatactaacgttaaatacctacg

SEQ ID NO: 27057 - DNA, 524 bp, Artificial Sequence
  chemically treated genomic DNA (Homo sapiens) CpG-island No: 27057
gcggtggcggcggtagtaataattattataaatttcggcgatcgtcggaagatggggtttacggcggttttatcgaagttcggaaagttttggtttcggttttcggcgttttcgttgttgtttagtcggggttggtttcgtcgagtcgtttttacggttttttttttttttagttggttttttcgagttatcgcgagtgattttattttcgtgatttcgcgttcgttttcgttttttatttttcgcggggtttttcgtatttatttttattttcggtagggttttttagttcggtcgttcgtcgtcggtttcgtttcgttttttttttcggtcgcgcggcgaggttaacggcggaaatcggataggtttgacggtatttggggtcgggtagtttcgcgaggaggtagtggcggttgtagttacgcgtatataaaagtttagggtcggggtttgaatcggggaaggtagattcggagaagagttaacgtttttttattcgttattttaacgggttttgtttattg

SEQ ID NO: 27058 - DNA, 524 bp, Artificial Sequence
  chemically treated genomic DNA (Homo sapiens) CpG-island No: 27058
caataaacaaaacccgttaaaataacgaataaaaaaacgttaactcttctccgaatctaccttccccgattcaaaccccgaccctaaacttttatatacgcgtaactacaaccgccactacctcctcgcgaaactacccgaccccaaataccgtcaaacctatccgatttccgccgttaacctcgccgcgcgaccgaaaaaaaaaacgaaacgaaaccgacgacgaacgaccgaactaaaaaaccctaccgaaaataaaaataaatacgaaaaaccccgcgaaaaataaaaaacgaaaacgaacgcgaaatcacgaaaataaaatcactcgcgataactcgaaaaaaccaactaaaaaaaaaaaaaaccgtaaaaacgactcgacgaaaccaaccccgactaaacaacaacgaaaacgccgaaaaccgaaaccaaaactttccgaacttcgataaaaccgccgtaaaccccatcttccgacgatcgccgaaatttataataattattactaccgccgccaccgc

SEQ ID NO: 27059 - DNA, 524 bp, Artificial Sequence
  chemically treated genomic DNA (Homo sapiens) CpG-island No: 27059
tagtgggtaggattcgttagagtggcgagtaaggaagcgttggttttttttcgggtttgtttttttcggtttaggtttcggttttgggtttttgtgtgcgcgtagttgtagtcgttattgttttttcgcggggttgttcgattttagatgtcgttaggtttgttcggttttcgtcgttaatttcgtcgcgcggtcgggaggaggagcggggcggggtcggcggcgggcggtcgggttggagggttttgtcgggggtgggggtgggtgcggggagtttcgcggggggtggggggcgggggcgggcgcggagttacgggggtggggttattcgcggtggttcggggaggttagttgggaggggagggggtcgtgggggcggttcggcggaattagtttcggttgggtagtagcggggacgtcgggggtcggggttagggtttttcgggtttcggtgaggtcgtcgtgggttttatttttcggcggtcgtcggagtttgtggtgattgttgttgtcgtcgttatcgt

SEQ ID NO: 27060 - DNA, 524 bp, Artificial Sequence
  chemically treated genomic DNA (Homo sapiens) CpG-island No: 27060
acgataacgacgacaacaacaatcaccacaaactccgacgaccgccgaaaaataaaacccacgacgacctcaccgaaacccgaaaaaccctaaccccgacccccgacgtccccgctactacccaaccgaaactaattccgccgaaccgcccccacgaccccctcccctcccaactaacctccccgaaccaccgcgaataaccccacccccgtaactccgcgcccgcccccgccccccaccccccgcgaaactccccgcacccacccccacccccgacaaaaccctccaacccgaccgcccgccgccgaccccgccccgctcctcctcccgaccgcgcgacgaaattaacgacgaaaaccgaacaaacctaacgacatctaaaatcgaacaaccccgcgaaaaaacaataacgactacaactacgcgcacacaaaaacccaaaaccgaaacctaaaccgaaaaaaacaaacccgaaaaaaaaccaacgcttccttactcgccactctaacgaatcctacccacta

SEQ ID NO: 27061 - DNA, 522 bp, Artificial Sequence
  chemically treated genomic DNA (Homo sapiens) CpG-island No: 27061
ttcggttattttaatagttgcgtgaattcgtttatttatttttgttttagtcgcgagtttaagcgcgttttttttcgttttttgcgttgttagtgtcgtcgtcgtcggcgtcgtcgttttttttggcgtgtttacggttattattggcgggtttttattagcggtttgcgttaggattgcgtttcgagttcgggcgacgcgtttttcggagcgtcgttggtttttatcgcgtttttcgatttcgatttcgaatttttaggtacgttcgagatgtaggtttcggtcgttagtcgtcgaaagttatttagcgtttttcgcgagtggaggttgttggggtcgttacggagatttacgatttagttgcgcgttaaagtttttagtttgtcgtataagattcgcgtcgggggcgcgtagcgcgtagaggtagcgtgcgtttagcgtttagaggtggaggttgtgtttttaggcgttttatacgaggtgggggagggcgagatttgttaggtttacgaattggtagat

SEQ ID NO: 27062 - DNA, 522 bp, Artificial Sequence
  chemically treated genomic DNA (Homo sapiens) CpG-island No: 27062
atctaccaattcgtaaacctaacaaatctcgccctcccccacctcgtataaaacgcctaaaaacacaacctccacctctaaacgctaaacgcacgctacctctacgcgctacgcgcccccgacgcgaatcttatacgacaaactaaaaactttaacgcgcaactaaatcgtaaatctccgtaacgaccccaacaacctccactcgcgaaaaacgctaaataactttcgacgactaacgaccgaaacctacatctcgaacgtacctaaaaattcgaaatcgaaatcgaaaaacgcgataaaaaccaacgacgctccgaaaaacgcgtcgcccgaactcgaaacgcaatcctaacgcaaaccgctaataaaaacccgccaataataaccgtaaacacgccaaaaaaaacgacgacgccgacgacgacgacactaacaacgcaaaaaacgaaaaaaaacgcgcttaaactcgcgactaaaacaaaaataaataaacgaattcacgcaactattaaaataaccgaa

SEQ ID NO: 27063 - DNA, 522 bp, Artificial Sequence
  chemically treated genomic DNA (Homo sapiens) CpG-island No: 27063
gtttgttaattcgtaggtttggtaggtttcgtttttttttatttcgtgtgggacgtttagggatatagtttttatttttgagcgttgggcgtacgttgtttttgcgcgttgcgcgttttcggcgcggattttgtgcgataggttggagattttggcgcgtagttgggtcgtgggttttcgtaacggttttagtagtttttattcgcggaaggcgttgggtggttttcgacggttggcgatcggagtttgtatttcgggcgtgtttgggggttcggggtcggggtcggggagcgcggtgagggttagcggcgtttcggggggcgcgtcgttcgaattcggggcgtagttttggcgtaggtcgttggtggaggttcgttagtggtggtcgtagatacgttagagagggcggcggcgtcggcgacgacggtattggtagcgtaggagacggaggaaggcgcgtttgaattcgcggttggaataggggtagatgagcgggtttacgtagttgttgaagtagtcgag

SEQ ID NO: 27064 - DNA, 522 bp, Artificial Sequence
  chemically treated genomic DNA (Homo sapiens) CpG-island No: 27064
ctcgactacttcaacaactacgtaaacccgctcatctacccctattccaaccgcgaattcaaacgcgccttcctccgtctcctacgctaccaataccgtcgtcgccgacgccgccgccctctctaacgtatctacgaccaccactaacgaacctccaccaacgacctacgccaaaactacgccccgaattcgaacgacgcgccccccgaaacgccgctaaccctcaccgcgctccccgaccccgaccccgaacccccaaacacgcccgaaatacaaactccgatcgccaaccgtcgaaaaccacccaacgccttccgcgaataaaaactactaaaaccgttacgaaaacccacgacccaactacgcgccaaaatctccaacctatcgcacaaaatccgcgccgaaaacgcgcaacgcgcaaaaacaacgtacgcccaacgctcaaaaataaaaactatatccctaaacgtcccacacgaaataaaaaaaaacgaaacctaccaaacctacgaattaacaaac

SEQ ID NO: 27065 - DNA, 570 bp, Artificial Sequence
  chemically treated genomic DNA (Homo sapiens) CpG-island No: 27065
ggcggcggtgaggtttagggggtttatttagaacgaggtagagatattagcgaaaagcgtcgtatggcgaagttaatttaggtttgataaaatatttattttattttatcgttttttcggttaaggttgacgttacgggttagagggcggagtcgttatattttttcgcgagattagttacgcgattttttagaaggtcgtaggtaatattttaatagtagttaggaagtcggatcggagcggaagggtgggcggggtttgttcgtatatttagcggtattcgaggttacgttttagatcggaagtgacggagacgtgttagcgcgtcgaaggtagttttatggtttttttcgcgtttttgagtcgggaaatggtcgttgtgtggttgtaacggagataaattttcggaatcgcgattcggcgtgttaggtaggtttcgtaatgtatttaagttattttaggggtagtgaagatcgaggataggttatatttttgatttttttgtgggtggtgtcgggttggcggcgaaaggagaattaaggagacgttgcgtcgttatttatgcgtttt

SEQ ID NO: 27066 - DNA, 570 bp, Artificial Sequence
  chemically treated genomic DNA (Homo sapiens) CpG-island No: 27066
aaaacgcataaataacgacgcaacgtctccttaattctcctttcgccgccaacccgacaccacccacaaaaaaatcaaaaatataacctatcctcgatcttcactacccctaaaataacttaaatacattacgaaacctacctaacacgccgaatcgcgattccgaaaatttatctccgttacaaccacacaacgaccatttcccgactcaaaaacgcgaaaaaaaccataaaactaccttcgacgcgctaacacgtctccgtcacttccgatctaaaacgtaacctcgaataccgctaaatatacgaacaaaccccgcccacccttccgctccgatccgacttcctaactactattaaaatattacctacgaccttctaaaaaatcgcgtaactaatctcgcgaaaaaatataacgactccgccctctaacccgtaacgtcaaccttaaccgaaaaaacgataaaataaaataaatattttatcaaacctaaattaacttcgccatacgacgcttttcgctaatatctctacctcgttctaaataaaccccctaaacctcaccgccgcc

SEQ ID NO: 27067 - DNA, 570 bp, Artificial Sequence
  chemically treated genomic DNA (Homo sapiens) CpG-island No: 27067
aaaacgtataaataacggcgtaacgtttttttggtttttttttcgtcgttaattcgatattatttataaaagagttaaaaatatggtttgttttcggtttttattgtttttggagtaatttgaatatattgcgaggtttatttgatacgtcgaatcgcggtttcgggaatttattttcgttgtaattatatagcggttatttttcgatttaagaacgcgaggaaaattatagagttattttcgacgcgttagtacgttttcgttattttcgatttggggcgtggtttcgggtgtcgttaaatatgcgggtaagtttcgtttattttttcgtttcggttcggttttttggttgttattaagatgttgtttgcggttttttgggaagtcgcgtggttggtttcgcgggaagatgtgacggtttcgttttttggttcgtagcgttagttttggtcggagaggcggtagagtagggtgggtgttttgttaggtttgagttagtttcgttatacggcgtttttcgttggtgtttttgtttcgttttgagtagattttttagattttatcgtcgtt

SEQ ID NO: 27068 - DNA, 570 bp, Artificial Sequence
  chemically treated genomic DNA (Homo sapiens) CpG-island No: 27068
aacgacgataaaatctaaaaaatctactcaaaacgaaacaaaaacaccaacgaaaaacgccgtataacgaaactaactcaaacctaacaaaacacccaccctactctaccgcctctccgaccaaaactaacgctacgaaccaaaaaacgaaaccgtcacatcttcccgcgaaaccaaccacgcgacttcccaaaaaaccgcaaacaacatcttaataacaaccaaaaaaccgaaccgaaacgaaaaaataaacgaaacttacccgcatatttaacgacacccgaaaccacgccccaaatcgaaaataacgaaaacgtactaacgcgtcgaaaataactctataattttcctcgcgttcttaaatcgaaaaataaccgctatataattacaacgaaaataaattcccgaaaccgcgattcgacgtatcaaataaacctcgcaatatattcaaattactccaaaaacaataaaaaccgaaaacaaaccatatttttaactcttttataaataatatcgaattaacgacgaaaaaaaaaccaaaaaaacgttacgccgttatttatacgtttt

SEQ ID NO: 27069 - DNA, 700 bp, Artificial Sequence
  chemically treated genomic DNA (Homo sapiens) CpG-island No: 27069
ttatcgtataagggtgattttcggtattttattttgaggttttcgtttaggtttacgtattagagtttcggtaggagattcgcggttcgtttcgattagttcgttcgcggggcgtaggggtttgtaggtgtgtttcgcgcgtttcgtcgttcggttagtcgttcgttagattattagttttttcgtcgggtcgagaatttgatttgtttcgtttttatcgagtttttgtcgatcggtagtttttttttttaatttcgagtttcggggttcggtttatttcggttaggaagttttttttatttatacgtagcggagaagcgtttaagtaataacgtttgtatttaaatttagtttttagaatcgtagacgtggttttgcgtggttttcggttcgtcgttacgttttttggttaattacggtagaggattattcgttagtttcgttttcgtttcgtcgtaggtcgcgcgtagttggcgtttgaggaattgcggttgcggtttcgagcggggtttggggttgttattattgagtgattagaaagggtgaggttttcgcggtggttcgggggttggggtcgagggtcgcgggtttttagagtattgcggtcgcggaggtatagttttcgtttttaaattcgggtttttgggggcggtaggttttgcgtttttgggaagtcggggtttttagtggttttggttag

SEQ ID NO: 27070 - DNA, 700 bp, Artificial Sequence
  chemically treated genomic DNA (Homo sapiens) CpG-island No: 27070
ctaaccaaaaccactaaaaaccccgacttcccaaaaacgcaaaacctaccgcccccaaaaacccgaatttaaaaacgaaaactatacctccgcgaccgcaatactctaaaaacccgcgaccctcgaccccaacccccgaaccaccgcgaaaacctcaccctttctaatcactcaataataacaaccccaaaccccgctcgaaaccgcaaccgcaattcctcaaacgccaactacgcgcgacctacgacgaaacgaaaacgaaactaacgaataatcctctaccgtaattaaccaaaaaacgtaacgacgaaccgaaaaccacgcaaaaccacgtctacgattctaaaaactaaatttaaatacaaacgttattacttaaacgcttctccgctacgtataaataaaaaaaacttcctaaccgaaataaaccgaaccccgaaactcgaaattaaaaaaaaaaactaccgatcgacaaaaactcgataaaaacgaaacaaatcaaattctcgacccgacgaaaaaactaataatctaacgaacgactaaccgaacgacgaaacgcgcgaaacacacctacaaacccctacgccccgcgaacgaactaatcgaaacgaaccgcgaatctcctaccgaaactctaatacgtaaacctaaacgaaaacctcaaaataaaataccgaaaatcacccttatacgataa

SEQ ID NO: 27071 - DNA, 700 bp, Artificial Sequence
  chemically treated genomic DNA (Homo sapiens) CpG-island No: 27071
ttagttaagattattaggaatttcggttttttaggaacgtagggtttgtcgtttttagaggttcggatttggaggcggaggttgtgttttcgcggtcgtagtgttttgagggttcgcgattttcggttttaattttcgggttatcgcgggggttttattttttttggttatttaatggtaatagttttagatttcgttcggaatcgtagtcgtagttttttaggcgttagttgcgcgcgatttgcggcgaggcgggggcggggttggcggatagttttttgtcgtgattggttagggggcgtggcgacgagtcggaagttacgtagggttacgtttgcggttttgaggattgggtttgggtgtagacgttgttgtttgggcgttttttcgttgcgtgtaggtgaagggggttttttgatcgaggtaagtcgggtttcgaggttcggagttgagaagggagattatcggtcggtaagggttcggtgggagcgggataggttagattttcggttcgacggaggggttagtggtttggcgggcgattgatcgagcggcggagcgcgcgggatatatttataggtttttgcgtttcgcgggcgggttggtcgggacgggtcgcgggttttttgtcggggttttggtacgtggatttaggcggggattttagggtggagtgtcgggaattatttttgtgcggtga

SEQ ID NO: 27072 - DNA, 700 bp, Artificial Sequence
  chemically treated genomic DNA (Homo sapiens) CpG-island No: 27072
tcaccgcacaaaaataattcccgacactccaccctaaaatccccgcctaaatccacgtaccaaaaccccgacaaaaaacccgcgacccgtcccgaccaacccgcccgcgaaacgcaaaaacctataaatatatcccgcgcgctccgccgctcgatcaatcgcccgccaaaccactaacccctccgtcgaaccgaaaatctaacctatcccgctcccaccgaacccttaccgaccgataatctcccttctcaactccgaacctcgaaacccgacttacctcgatcaaaaaacccccttcacctacacgcaacgaaaaaacgcccaaacaacaacgtctacacccaaacccaatcctcaaaaccgcaaacgtaaccctacgtaacttccgactcgtcgccacgccccctaaccaatcacgacaaaaaactatccgccaaccccgcccccgcctcgccgcaaatcgcgcgcaactaacgcctaaaaaactacgactacgattccgaacgaaatctaaaactattaccattaaataaccaaaaaaaataaaacccccgcgataacccgaaaattaaaaccgaaaatcgcgaaccctcaaaacactacgaccgcgaaaacacaacctccgcctccaaatccgaacctctaaaaacgacaaaccctacgttcctaaaaaaccgaaattcctaataatcttaactaa

SEQ ID NO: 27073 - DNA, 500 bp, Artificial Sequence
  chemically treated genomic DNA (Homo sapiens) CpG-island No: 27073
tcgattatgattttttttgaatgaaatagattcggagttcggagattgggttatcggggacgaaagggtttttcggaggttttttcggacgcggaggtttgggcggtgggtgggaggtttgggtattttttagtcgcggtgttaacgttgtcgtttttttttcggggttttgttcgtagggttattttttcgtgagtaatatgaacgtcggtttggggatgaacggtatgaatacgtatatgagtatgtcggcggtcgttatgggtagcggttcgggtaatatgagcgcgggttttatgaatatgtcgtcgtacgtgggcgttggtatgagttcgtttttggcggggatgtttttcggcgcgggcgttatggcgggtatgggcggttcggtcggggcggtcggcgtggcgggtatggggtcgtatttgagttttagtttgagttcgttcggggggtaggcggtcggggttatgggcggtttggttttttacgttaatatg

SEQ ID NO: 27074 - DNA, 500 bp, Artificial Sequence
  chemically treated genomic DNA (Homo sapiens) CpG-island No: 27074
catattaacgtaaaaaaccaaaccgcccataaccccgaccgcctaccccccgaacgaactcaaactaaaactcaaatacgaccccatacccgccacgccgaccgccccgaccgaaccgcccatacccgccataacgcccgcgccgaaaaacatccccgccaaaaacgaactcataccaacgcccacgtacgacgacatattcataaaacccgcgctcatattacccgaaccgctacccataacgaccgccgacatactcatatacgtattcataccgttcatccccaaaccgacgttcatattactcacgaaaaaataaccctacgaacaaaaccccgaaaaaaaaacgacaacgttaacaccgcgactaaaaaatacccaaacctcccacccaccgcccaaacctccgcgtccgaaaaaacctccgaaaaaccctttcgtccccgataacccaatctccgaactccgaatctatttcattcaaaaaaaatcataatcga

SEQ ID NO: 27075 - DNA, 500 bp, Artificial Sequence
  chemically treated genomic DNA (Homo sapiens) CpG-island No: 27075
tatgttggcgtagggggttaggtcgtttatggtttcggtcgtttgtttttcgagcgggtttaggttgggatttaagtgcggttttatgttcgttacgtcggtcgtttcggtcgagtcgtttatgttcgttatggcgttcgcgtcgggggatattttcgttagggacgggtttatgttagcgtttacgtacgacgatatgtttatggagttcgcgtttatgttgttcgagtcgttgtttatggcggtcgtcgatatgtttatgtacgtgtttatgtcgtttatttttaggtcggcgtttatgttgtttacggaggagtagttttgcggatagagtttcgggagggaggcgatagcgttagtatcgcggttggagggtgtttagattttttatttatcgtttaggttttcgcgttcggggaggttttcggggagttttttcgttttcgatggtttagttttcggatttcgagtttgttttatttagggagagttatgatcga

SEQ ID NO: 27076 - DNA, 500 bp, Artificial Sequence
  chemically treated genomic DNA (Homo sapiens) CpG-island No: 27076
tcgatcataactctccctaaataaaacaaactcgaaatccgaaaactaaaccatcgaaaacgaaaaaactccccgaaaacctccccgaacgcgaaaacctaaacgataaataaaaaatctaaacaccctccaaccgcgatactaacgctatcgcctccctcccgaaactctatccgcaaaactactcctccgtaaacaacataaacgccgacctaaaaataaacgacataaacacgtacataaacatatcgacgaccgccataaacaacgactcgaacaacataaacgcgaactccataaacatatcgtcgtacgtaaacgctaacataaacccgtccctaacgaaaatatcccccgacgcgaacgccataacgaacataaacgactcgaccgaaacgaccgacgtaacgaacataaaaccgcacttaaatcccaacctaaacccgctcgaaaaacaaacgaccgaaaccataaacgacctaaccccctacgccaacata

SEQ ID NO: 27077 - DNA, 566 bp, Artificial Sequence
  chemically treated genomic DNA (Homo sapiens) CpG-island No: 27077
ttttagtttttgggcgaattttatatttgttttaatttttcgtcgagggcgagtaggagcgagagtgtgtcgagtgagtgtgcgtttgtgtgtttcggcgagggtgcgcgttcggcgtcgggagcgcggttagtcgagttcggaggtatcgggaggtcgagagtcgtcgggattttagttttgcgtttattgtttcgttcggagttggatttcggggtcggggtcggggtcgtgcgtcggggataggtagggtcgggtcgcggttcgcgcgtttcgtttaggtgagtcggggttggttcggatcgttcggttttagttttagcgttgtttgcggaggtgggttcgggcgggcgggagggaggtttcggcgtcggtcgttcgtagagggatgatttgtttgatttcgttggttggcgggcgggcgaggatttttcgtcgcgtttttgattcgcggatacggtatatcgagtataggcggtttcgggtaggggagcgcgtttgggtcggttattcgtaggggtatggttttgttgatttttagggtttagatttaagggatcggtaga

SEQ ID NO: 27078 - DNA, 566 bp, Artificial Sequence
  chemically treated genomic DNA (Homo sapiens) CpG-island No: 27078
tctaccgatcccttaaatctaaaccctaaaaatcaacaaaaccatacccctacgaataaccgacccaaacgcgctcccctacccgaaaccgcctatactcgatataccgtatccgcgaatcaaaaacgcgacgaaaaatcctcgcccgcccgccaaccaacgaaatcaaacaaatcatccctctacgaacgaccgacgccgaaacctccctcccgcccgcccgaacccacctccgcaaacaacgctaaaactaaaaccgaacgatccgaaccaaccccgactcacctaaacgaaacgcgcgaaccgcgacccgaccctacctatccccgacgcacgaccccgaccccgaccccgaaatccaactccgaacgaaacaataaacgcaaaactaaaatcccgacgactctcgacctcccgatacctccgaactcgactaaccgcgctcccgacgccgaacgcgcaccctcgccgaaacacacaaacgcacactcactcgacacactctcgctcctactcgccctcgacgaaaaattaaaacaaatataaaattcgcccaaaaactaaaa

SEQ ID NO: 27079 - DNA, 566 bp, Artificial Sequence
  chemically treated genomic DNA (Homo sapiens) CpG-island No: 27079
tttatcggttttttgggtttaaattttaagggttaataaggttatgtttttgcggatggtcggtttaggcgcgtttttttattcggggtcgtttgtgttcggtgtgtcgtgttcgcgggttaggggcgcggcgggaagttttcgttcgttcgttagttagcggggttaaataggttatttttttgcggacggtcggcgtcggagtttttttttcgttcgttcggatttattttcgtaagtagcgttggggttggagtcgggcggttcggattagtttcggtttatttgggcgggacgcgcgggtcgcgattcggttttgtttgttttcggcgtacggtttcggtttcggtttcgaagtttagtttcggacggggtagtgaacgtagagttggggtttcggcggttttcgatttttcgatgttttcggattcggttggtcgcgttttcggcgtcgagcgcgtattttcgtcgggatatatagacgtatatttattcgatatattttcgtttttgttcgttttcggcggagagttgaaatagatgtgggattcgtttaggagttggaa

SEQ ID NO: 27080 - DNA, 566 bp, Artificial Sequence
  chemically treated genomic DNA (Homo sapiens) CpG-island No: 27080
ttccaactcctaaacgaatcccacatctatttcaactctccgccgaaaacgaacaaaaacgaaaatatatcgaataaatatacgtctatatatcccgacgaaaatacgcgctcgacgccgaaaacgcgaccaaccgaatccgaaaacatcgaaaaatcgaaaaccgccgaaaccccaactctacgttcactaccccgtccgaaactaaacttcgaaaccgaaaccgaaaccgtacgccgaaaacaaacaaaaccgaatcgcgacccgcgcgtcccgcccaaataaaccgaaactaatccgaaccgcccgactccaaccccaacgctacttacgaaaataaatccgaacgaacgaaaaaaaaactccgacgccgaccgtccgcaaaaaaataacctatttaaccccgctaactaacgaacgaacgaaaacttcccgccgcgcccctaacccgcgaacacgacacaccgaacacaaacgaccccgaataaaaaaacgcgcctaaaccgaccatccgcaaaaacataaccttattaacccttaaaatttaaacccaaaaaaccgataaa

SEQ ID NO: 27081 - DNA, 983 bp, Artificial Sequence
  chemically treated genomic DNA (Homo sapiens) CpG-island No: 27081
tgttttttcgttaagtaataataattcgaggagcgaggcggggaggttcgtgaaacgttatagcgtattgtttaatgggaatcggcgttggtagacgcgcgcgttttgtgtttaattagcgaaggcggttcgaatggtttttttattttgttggttgtgggcggacggtttgaggaggcggcggtggagtagggggcggtttggttgcgcggtattagcggtgttcgtcgaagggggaggaggcgaggagcgagtcgtgcggttagagcgggaaagagattcgtttttgcgttcgagttttggagtcgtcgtatttcgatttttggggtcgcggtaggtatgcgaggggacgggcgttcgttgttttttgggtttttttcgtagcgattcgcgggatcggaaaaaaaggagaagatggaggaggagggtggtagtagcggcggcgtcgggggtgattagcgcggacggcggcgacggaggagagtagttttttattgttaagtacgagttgcggattggtgagcgatttcgttttttgtcggtcgggttcggcgcgggggcgcgtttgagggtacgcgggtgttcgcgcggggttgggggcgcggggtcgtagtcgtgggcgcggaggggcgggtttggggcggggcgtcgcggtcggggcgcgtgtttcgggggtttcgggaggtgggggcgcgttttgggggaggcggtcgaaagttttttttagttcgggaatgagcggcgggtattaggtatcggggttagcgtacgcgtcgatcgttgttcgtggtacgtattttcgaggatgtcgttgtttttttttttcgtataggtgatatacgtgtgtttgcgttttgttagggcgaaaggtgcgtttgttttcgcgtggggcgagcggcgttttgttttggagagtgtttttttttttcgtttttttggttttcgcgatggggggtttcggtggggttttgtggagttatttt

SEQ ID NO: 27082 - DNA, 983 bp, Artificial Sequence
  chemically treated genomic DNA (Homo sapiens) CpG-island No: 27082
aaaataactccacaaaaccccaccgaaaccccccatcgcgaaaaccaaaaaaacgaaaaaaaaaaacactctccaaaacaaaacgccgctcgccccacgcgaaaacaaacgcacctttcgccctaacaaaacgcaaacacacgtatatcacctatacgaaaaaaaaaaacaacgacatcctcgaaaatacgtaccacgaacaacgatcgacgcgtacgctaaccccgatacctaatacccgccgctcattcccgaactaaaaaaaactttcgaccgcctcccccaaaacgcgcccccacctcccgaaacccccgaaacacgcgccccgaccgcgacgccccgccccaaacccgcccctccgcgcccacgactacgaccccgcgcccccaaccccgcgcgaacacccgcgtaccctcaaacgcgcccccgcgccgaacccgaccgacaaaaaacgaaatcgctcaccaatccgcaactcgtacttaacaataaaaaactactctcctccgtcgccgccgtccgcgctaatcacccccgacgccgccgctactaccaccctcctcctccatcttctcctttttttccgatcccgcgaatcgctacgaaaaaaacccaaaaaacaacgaacgcccgtcccctcgcatacctaccgcgaccccaaaaatcgaaatacgacgactccaaaactcgaacgcaaaaacgaatctctttcccgctctaaccgcacgactcgctcctcgcctcctcccccttcgacgaacaccgctaataccgcgcaaccaaaccgccccctactccaccgccgcctcctcaaaccgtccgcccacaaccaacaaaataaaaaaaccattcgaaccgccttcgctaattaaacacaaaacgcgcgcgtctaccaacgccgattcccattaaacaatacgctataacgtttcacgaacctccccgcctcgctcctcgaattattattacttaacgaaaaaaca

SEQ ID NO: 27083 - DNA, 983 bp, Artificial Sequence
  chemically treated genomic DNA (Homo sapiens) CpG-island No: 27083
gggatggttttatagagttttatcgggattttttatcgcggggattagaggggcggaggagggagatattttttaaaataaagcgtcgttcgttttacgcggaggtaggcgtatttttcgttttgataggacgtagatatacgtgtgttatttgtgcgggaagggggagtagcgatattttcggaggtgcgtgttacgggtagcggtcggcgcgtgcgttggtttcgatgtttggtgttcgtcgtttattttcgggttggggaaaattttcggtcgttttttttaaggcgcgtttttatttttcgggattttcggggtacgcgtttcgatcgcgacgtttcgttttaggttcgttttttcgcgtttacggttgcggtttcgcgtttttagtttcgcgcgggtattcgcgtgtttttaggcgcgttttcgcgtcgggttcggtcggtagagggcggggtcgtttattagttcgtagttcgtgtttgatagtgaggagttgttttttttcgtcgtcgtcgttcgcgttggttattttcggcgtcgtcgttgttgttattttttttttttattttttttttttttttcgatttcgcgggtcgttacgaggggaatttaggagatagcggacgttcgttttttcgtatgtttgtcgcggttttaggagtcggggtgcggcggttttagaattcggacgtaaagacgagtttttttttcgttttggtcgtacggttcgtttttcgtttttttttttttcggcgggtatcgttagtatcgcgtaattaaatcgttttttgttttatcgtcgtttttttaggtcgttcgtttatagttagtaaggtaagggagttattcgagtcgttttcgttgattggatatagggcgcgcgcgtttgttaacgtcggtttttattgggtagtacgttgtgacgttttacgagttttttcgtttcgtttttcgaattgttgttgtttggcggggaggta

SEQ ID NO: 27084 - DNA, 983 bp, Artificial Sequence
  chemically treated genomic DNA (Homo sapiens) CpG-island No: 27084
tacctccccgccaaacaacaacaattcgaaaaacgaaacgaaaaaactcgtaaaacgtcacaacgtactacccaataaaaaccgacgttaacaaacgcgcgcgccctatatccaatcaacgaaaacgactcgaataactcccttaccttactaactataaacgaacgacctaaaaaaacgacgataaaacaaaaaacgatttaattacgcgatactaacgatacccgccgaaaaaaaaaaaaacgaaaaacgaaccgtacgaccaaaacgaaaaaaaaactcgtctttacgtccgaattctaaaaccgccgcaccccgactcctaaaaccgcgacaaacatacgaaaaaacgaacgtccgctatctcctaaattcccctcgtaacgacccgcgaaatcgaaaaaaaaaaaaaaaataaaaaaaaaaaataacaacaacgacgacgccgaaaataaccaacgcgaacgacgacgacgaaaaaaaacaactcctcactatcaaacacgaactacgaactaataaacgaccccgccctctaccgaccgaacccgacgcgaaaacgcgcctaaaaacacgcgaatacccgcgcgaaactaaaaacgcgaaaccgcaaccgtaaacgcgaaaaaacgaacctaaaacgaaacgtcgcgatcgaaacgcgtaccccgaaaatcccgaaaaataaaaacgcgccttaaaaaaaacgaccgaaaattttccccaacccgaaaataaacgacgaacaccaaacatcgaaaccaacgcacgcgccgaccgctacccgtaacacgcacctccgaaaatatcgctactcccccttcccgcacaaataacacacgtatatctacgtcctatcaaaacgaaaaatacgcctacctccgcgtaaaacgaacgacgctttattttaaaaaatatctccctcctccgcccctctaatccccgcgataaaaaatcccgataaaactctataaaaccatccc

SEQ ID NO: 27085 - DNA, 757 bp, Artificial Sequence
  chemically treated genomic DNA (Homo sapiens) CpG-island No: 27085
aaggttttcgtacgcgttgtggggtggggtatatttggttgggggcggacgggggattaggagaacggcgaggagcgggcgtagaagggtggcggggtcgtcgggtcgttgcgcggtagttgcgttcggttttttggcgcggcgttcgggaaggggcggggtcgaggcgggtaaggtggcgggttttcgtttttggtttcgttttcgtagttcgttcgcgagtttcgtttcgttttttcgtcgggttcgtttcgttttttcgtcgggtcgtgtttttgttttcgtcgtttggtagttttacgttcggttttagcggttaagagtcggagaaagttttgttggtgggcggtcgcggggttgagggcgttcggtatttcggggtcgtttcggttcgggcggcgagagtgttcggcggtttatgtattcgtcgtcgttcgtcgtcgcgatggattttagttagaatagtttgttcggttatatggaggatttgtaggagtttattattatcgagaggtcggttcgtcggagttttaaggtgcgtttcggggagaggatttgtttttacggcgttcggtcgtttgtttcgcgcggtttcgcgttgatttttgttttacgttattatttttttttttttcgggtcgtcgggatttttttagtcgggtcggtttttttttttttattttttttgtcgtgtcgttttaagttagttttttttcggatttttttttagagcggatcgggttttttttagtttgga

SEQ ID NO: 27086 - DNA, 757 bp, Artificial Sequence
  chemically treated genomic DNA (Homo sapiens) CpG-island No: 27086
tccaaactaaaaaaaacccgatccgctctaaaaaaaaatccgaaaaaaaactaacttaaaacgacacgacaaaaaaaataaaaaaaaaaaaaccgacccgactaaaaaaatcccgacgacccgaaaaaaaaaaaaataataacgtaaaacaaaaatcaacgcgaaaccgcgcgaaacaaacgaccgaacgccgtaaaaacaaatcctctccccgaaacgcaccttaaaactccgacgaaccgacctctcgataataataaactcctacaaatcctccatataaccgaacaaactattctaactaaaatccatcgcgacgacgaacgacgacgaatacataaaccgccgaacactctcgccgcccgaaccgaaacgaccccgaaataccgaacgccctcaaccccgcgaccgcccaccaacaaaactttctccgactcttaaccgctaaaaccgaacgtaaaactaccaaacgacgaaaacaaaaacacgacccgacgaaaaaacgaaacgaacccgacgaaaaaacgaaacgaaactcgcgaacgaactacgaaaacgaaaccaaaaacgaaaacccgccaccttacccgcctcgaccccgccccttcccgaacgccgcgccaaaaaaccgaacgcaactaccgcgcaacgacccgacgaccccgccacccttctacgcccgctcctcgccgttctcctaatcccccgtccgcccccaaccaaatataccccaccccacaacgcgtacgaaaacctt

SEQ ID NO: 27087 - DNA, 757 bp, Artificial Sequence
  chemically treated genomic DNA (Homo sapiens) CpG-island No: 27087
tttagattagagaggattcggttcgttttgaggaagggttcgagagggaattggtttagggcgatacggtaagaggggtggaggaggaggggtcggttcgattgagagggtttcggcggttcggaggaggggagggtggtggcgtggggtagagattagcgcgggatcgcgcggggtaggcggtcggacgtcgtgagggtaggtttttttttcggggcgtattttgaggtttcggcggatcggtttttcgatgatggtgagtttttgtaggttttttatgtaatcgaataggttgttttgattgaaatttatcgcggcggcgggcggcggcggatgtatggatcgtcgggtattttcgtcgttcgggtcggagcggtttcgggatgtcggacgtttttagtttcgcggtcgtttattagtaggatttttttcggtttttggtcgttggagtcgagcgtgaggttgttaggcggcgggagtaagagtacggttcggcgagggggcggggcgggttcggcgaggaggcggggcgaggttcgcgggcgggttgcgggggcggggttaggggcgggggttcgttattttgttcgtttcggtttcgttttttttcgggcgtcgcgttaagaggtcggacgtaattgtcgcgtaacgattcggcggtttcgttatttttttgcgttcgtttttcgtcgtttttttaatttttcgttcgtttttaattaagtgtgttttattttatagcgcgtgcgagagtttt

SEQ ID NO: 27088 - DNA, 757 bp, Artificial Sequence
  chemically treated genomic DNA (Homo sapiens) CpG-island No: 27088
aaaactctcgcacgcgctataaaataaaacacacttaattaaaaacgaacgaaaaattaaaaaaacgacgaaaaacgaacgcaaaaaaataacgaaaccgccgaatcgttacgcgacaattacgtccgacctcttaacgcgacgcccgaaaaaaaacgaaaccgaaacgaacaaaataacgaacccccgcccctaaccccgcccccgcaacccgcccgcgaacctcgccccgcctcctcgccgaacccgccccgccccctcgccgaaccgtactcttactcccgccgcctaacaacctcacgctcgactccaacgaccaaaaaccgaaaaaaatcctactaataaacgaccgcgaaactaaaaacgtccgacatcccgaaaccgctccgacccgaacgacgaaaatacccgacgatccatacatccgccgccgcccgccgccgcgataaatttcaatcaaaacaacctattcgattacataaaaaacctacaaaaactcaccatcatcgaaaaaccgatccgccgaaacctcaaaatacgccccgaaaaaaaaacctaccctcacgacgtccgaccgcctaccccgcgcgatcccgcgctaatctctaccccacgccaccaccctcccctcctccgaaccgccgaaaccctctcaatcgaaccgacccctcctcctccacccctcttaccgtatcgccctaaaccaattccctctcgaacccttcctcaaaacgaaccgaatcctctctaatctaaa

SEQ ID NO: 27089 - DNA, 604 bp, Artificial Sequence
  chemically treated genomic DNA (Homo sapiens) CpG-island No: 27089
atggtcgagttttcggaagaattggtaggattcgttcgtcgtgttagttacggggagatgttttttttagttattacggtcgagatgagagttttcgtgttgttgttggacgaggcgtcgatttcgaatttcgtaagtttatttgaggcgttcgatttgatgttgatgtttagcgtcgttttgatgaagtcgtggtaggtttgtacgatgttcgttatttgtaggaagttggcggttgatattatttcgatgacgtttttgttggtgagcgttaggtgcgttgagtatatgaagtcgatgatggttttgaagttttgggtcgtgacgatgtttaggtgcgtgatcgtggtttgtttcgacgttttttgtatttggtagtagagcgttttgaagtagcggttgttgtttagtaggacgtttttgtgcgttttgaagattttgttttttacgattacgtagacgtcgtataggacgtcgtgttgtttttgttcgttgagttttcgtagtaggtgtcggtagtgggacgtgatttttatatttttttttcggttgtttatttggaagttttggtgtcgttttttttatagattttgtggaggtaaga

SEQ ID NO: 27090 - DNA, 604 bp, Artificial Sequence
  chemically treated genomic DNA (Homo sapiens) CpG-island No: 27090
tcttacctccacaaaatctataaaaaaaacgacaccaaaacttccaaataaacaaccgaaaaaaaaatataaaaatcacgtcccactaccgacacctactacgaaaactcaacgaacaaaaacaacacgacgtcctatacgacgtctacgtaatcgtaaaaaacaaaatcttcaaaacgcacaaaaacgtcctactaaacaacaaccgctacttcaaaacgctctactaccaaatacaaaaaacgtcgaaacaaaccacgatcacgcacctaaacatcgtcacgacccaaaacttcaaaaccatcatcgacttcatatactcaacgcacctaacgctcaccaacaaaaacgtcatcgaaataatatcaaccgccaacttcctacaaataacgaacatcgtacaaacctaccacgacttcatcaaaacgacgctaaacatcaacatcaaatcgaacgcctcaaataaacttacgaaattcgaaatcgacgcctcgtccaacaacaacacgaaaactctcatctcgaccgtaataactaaaaaaaacatctccccgtaactaacacgacgaacgaatcctaccaattcttccgaaaactcgaccat

SEQ ID NO: 27091 - DNA, 604 bp, Artificial Sequence
  chemically treated genomic DNA (Homo sapiens) CpG-island No: 27091
ttttatttttatagagtttgtagaagaggcgatattagggtttttaaatgaataatcgaaaggaagatatggaaattacgttttattatcggtatttgttgcgggagtttaacgagtagaggtagtacggcgttttgtgcgacgtttgcgtggtcgtggagggtaaggtttttaaggcgtataagaacgttttgttgggtagtagtcgttattttaagacgttttattgttaggtgtagaagacgtcggagtaggttacggttacgtatttggatatcgttacggtttagggttttaaggttattatcgattttatgtatttagcgtatttggcgtttattagtaggaacgttatcgaggtgatgttagtcgttagttttttgtagatgacggatatcgtgtaagtttgttacgattttattaaggcggcgttggatattagtattaagtcggacgttttagatgagtttgcggagttcgagatcggcgtttcgtttagtagtagtacggaagtttttatttcggtcgtgatggttgggaggagtattttttcgtggttggtacggcgaacgagttttgttaattttttcggagattcggttat

SEQ ID NO: 27092 - DNA, 604 bp, Artificial Sequence
  chemically treated genomic DNA (Homo sapiens) CpG-island No: 27092
ataaccgaatctccgaaaaaattaacaaaactcgttcgccgtaccaaccacgaaaaaatactcctcccaaccatcacgaccgaaataaaaacttccgtactactactaaacgaaacgccgatctcgaactccgcaaactcatctaaaacgtccgacttaatactaatatccaacgccgccttaataaaatcgtaacaaacttacacgatatccgtcatctacaaaaaactaacgactaacatcacctcgataacgttcctactaataaacgccaaatacgctaaatacataaaatcgataataaccttaaaaccctaaaccgtaacgatatccaaatacgtaaccgtaacctactccgacgtcttctacacctaacaataaaacgtcttaaaataacgactactacccaacaaaacgttcttatacgccttaaaaaccttaccctccacgaccacgcaaacgtcgcacaaaacgccgtactacctctactcgttaaactcccgcaacaaataccgataataaaacgtaatttccatatcttcctttcgattattcatttaaaaaccctaatatcgcctcttctacaaactctataaaaataaaa

SEQ ID NO: 27093 - DNA, 1243 bp, Artificial Sequence
  chemically treated genomic DNA (Homo sapiens) CpG-island No: 27093
cgggtacgttttttttttttcggggagatatcggtttagaggtatagtttttagcgtagaggtcgtagttcgggtattttcgtttaggtttcgcgtttttttttcgagtcgtcgtgggttcgtcgttagtcgggtttcgcgttatttcggagtttttttttcgcggggcgtttcgtcgttttatttttcgtcgagtttattcgtcgcgttcgtcgttttttaggtcggtcgcgttttttcgttcggcgttttttttgtttggttagggtcgcgttttcgtaaatcgcggttatttggttttcggtcgggtatttttttcgcgcggttttttagtcgtagttatagagagttcgtcggttttatcggttagagcggttcggcgttttttttcgttttagtagtcgatcggtattttttttcgagcgtcgtcgttttcggaagtgtttggcgcgcgggggtagtcgggtaagcggagcgcggaggtcgttgggacgcggtttagtttattttttgaggtcggttcgcgtttcgttaggcgtcgcgcggggttagcgcggggttagcggaggttagcgggggttagtagtagcggtttcgagggcgcggcggacgtaggtaggtcgtaggttgtgcggtgaggcgcgaggttcgaggggcggtttaggattcgaggtgggacgcgggtgtgataggagttagttttggttgtttgtcggggagttttagatttggcggcggcggtttggggcggacgtagtcgggggtcgcgatttaggtttttttttcgtagtcgttttttgttagtcgcgcgtcgtttttaggtgtattttaggagtagtcgcgtcgttgtttattcgttttgtagttcgttttttttagggtcgttttcgttttaagaaatggggtgatggggcgtttttattcggcgtttgtaggggtttttggggagcgcgtcggtggttcgttgttttcgggtggggcgcggggttggcgttcgagggtgtcgtggtttaggcggggttgtagcgagtgtgtttttcgtttcgcgcgcgtgaagcgtgggagcgaagtttcgggggagggcgggagcgcggttgagtttattgtgaatattcggttgggtagtttcgcgagtaggggaggggtcggaatcgatgtgtatgcggagaggtcgtagttattgttgtgagtaggatatagtggcggttgatttgggagaagttatagagggacggggtgggag

SEQ ID NO: 27094 - DNA, 1243 bp, Artificial Sequence
  chemically treated genomic DNA (Homo sapiens) CpG-island No: 27094
ctcccaccccgtccctctataacttctcccaaatcaaccgccactatatcctactcacaacaataactacgacctctccgcatacacatcgattccgacccctcccctactcgcgaaactacccaaccgaatattcacaataaactcaaccgcgctcccgccctcccccgaaacttcgctcccacgcttcacgcgcgcgaaacgaaaaacacactcgctacaaccccgcctaaaccacgacaccctcgaacgccaaccccgcgccccacccgaaaacaacgaaccaccgacgcgctccccaaaaacccctacaaacgccgaataaaaacgccccatcaccccatttcttaaaacgaaaacgaccctaaaaaaaacgaactacaaaacgaataaacaacgacgcgactactcctaaaatacacctaaaaacgacgcgcgactaacaaaaaacgactacgaaaaaaaaacctaaatcgcgacccccgactacgtccgccccaaaccgccgccgccaaatctaaaactccccgacaaacaaccaaaactaactcctatcacacccgcgtcccacctcgaatcctaaaccgcccctcgaacctcgcgcctcaccgcacaacctacgacctacctacgtccgccgcgccctcgaaaccgctactactaacccccgctaacctccgctaaccccgcgctaaccccgcgcgacgcctaacgaaacgcgaaccgacctcaaaaaataaactaaaccgcgtcccaacgacctccgcgctccgcttacccgactacccccgcgcgccaaacacttccgaaaacgacgacgctcgaaaaaaaataccgatcgactactaaaacgaaaaaaaacgccgaaccgctctaaccgataaaaccgacgaactctctataactacgactaaaaaaccgcgcgaaaaaaatacccgaccgaaaaccaaataaccgcgatttacgaaaacgcgaccctaaccaaacaaaaaaaacgccgaacgaaaaaacgcgaccgacctaaaaaacgacgaacgcgacgaataaactcgacgaaaaataaaacgacgaaacgccccgcgaaaaaaaaactccgaaataacgcgaaacccgactaacgacgaacccacgacgactcgaaaaaaaaacgcgaaacctaaacgaaaatacccgaactacgacctctacgctaaaaactatacctctaaaccgatatctccccgaaaaaaaaaaaacgtacccg

SEQ ID NO: 27095 - DNA, 1243 bp, Artificial Sequence
  chemically treated genomic DNA (Homo sapiens) CpG-island No: 27095
tttttatttcgtttttttgtaattttttttaggttagtcgttattgtgttttgtttatagtaatgattgcgattttttcgtatatatatcggtttcggttttttttttgttcgcgggattatttagtcgggtgtttatagtgagtttagtcgcgttttcgttttttttcgaggtttcgtttttacgttttacgcgcgcggaacggggaatatattcgttgtagtttcgtttgggttacggtattttcgagcgttagtttcgcgttttattcgggagtagcgagttatcggcgcgttttttaggagtttttgtaggcgtcgggtagggacgttttattattttattttttaaaacggggacggttttggggggagcggattatagggcgggtgagtagcggcgcggttgtttttggagtgtatttggaggcggcgcgcggttggtagggaacgattgcgaaggaagaatttgggtcgcggttttcggttacgttcgttttaagtcgtcgtcgttaggtttgaggtttttcgataagtagttaaagttggtttttgttatattcgcgttttatttcgagttttgggtcgtttttcgggtttcgcgttttatcgtatagtttgcggtttatttgcgttcgtcgcgttttcggagtcgttgttgttgattttcgttgattttcgttgatttcgcgttaatttcgcgcggcgtttgacgggacgcgggtcggttttagggaatgagttgaatcgcgttttagcggttttcgcgtttcgtttgttcggttgttttcgcgcgttaagtattttcggaagcggcggcgttcggaaggaaatgtcgatcggttgttggggcgaaagggggcgtcgggtcgttttagtcggtgaggtcggcgggttttttgtggttgcggttgggaaatcgcgcggaggaggtgttcggtcggggattaggtggtcgcggtttgcggggacgcggttttggttagatagaagagacgtcgggcgggggggcgcggtcggtttggaaggcggcgggcgcggcgggtgggttcggcggagggtgaggcggcggggcgtttcgcggggaaggggtttcggagtgacgcgggattcggttagcggcgagtttacggcggttcggaagggaagcgcggagtttgagcgggggtattcgggttgcgatttttgcgttgggagttgtgtttttgagtcggtgttttttcgagggaaaggggacgtgttcg

SEQ ID NO: 27096 - DNA, 1243 bp, Artificial Sequence
  chemically treated genomic DNA (Homo sapiens) CpG-island No: 27096
cgaacacgtcccctttccctcgaaaaaacaccgactcaaaaacacaactcccaacgcaaaaatcgcaacccgaatacccccgctcaaactccgcgcttcccttccgaaccgccgtaaactcgccgctaaccgaatcccgcgtcactccgaaaccccttccccgcgaaacgccccgccgcctcaccctccgccgaacccacccgccgcgcccgccgccttccaaaccgaccgcgcccccccgcccgacgtctcttctatctaaccaaaaccgcgtccccgcaaaccgcgaccacctaatccccgaccgaacacctcctccgcgcgatttcccaaccgcaaccacaaaaaacccgccgacctcaccgactaaaacgacccgacgccccctttcgccccaacaaccgatcgacatttccttccgaacgccgccgcttccgaaaatacttaacgcgcgaaaacaaccgaacaaacgaaacgcgaaaaccgctaaaacgcgattcaactcattccctaaaaccgacccgcgtcccgtcaaacgccgcgcgaaattaacgcgaaatcaacgaaaatcaacgaaaatcaacaacaacgactccgaaaacgcgacgaacgcaaataaaccgcaaactatacgataaaacgcgaaacccgaaaaacgacccaaaactcgaaataaaacgcgaatataacaaaaaccaactttaactacttatcgaaaaacctcaaacctaacgacgacgacttaaaacgaacgtaaccgaaaaccgcgacccaaattcttccttcgcaatcgttccctaccaaccgcgcgccgcctccaaatacactccaaaaacaaccgcgccgctactcacccgccctataatccgctccccccaaaaccgtccccgttttaaaaaataaaataataaaacgtccctacccgacgcctacaaaaactcctaaaaaacgcgccgataactcgctactcccgaataaaacgcgaaactaacgctcgaaaataccgtaacccaaacgaaactacaacgaatatattccccgttccgcgcgcgtaaaacgtaaaaacgaaacctcgaaaaaaaacgaaaacgcgactaaactcactataaacacccgactaaataatcccgcgaacaaaaaaaaaaccgaaaccgatatatatacgaaaaaatcgcaatcattactataaacaaaacacaataacgactaacctaaaaaaaattacaaaaaaacgaaataaaaa

SEQ ID NO: 27097 - DNA, 643 bp, Artificial Sequence
  chemically treated genomic DNA (Homo sapiens) CpG-island No: 27097
atacgtatttttgggtaagatcgcgatttagatttttagatatttcgagagacgtcgaagatttagatagagttacgtagttacgtatattttatagacgtttttttttttatttagagttcgagatatagcgtcgcgaatattttagatatacgttcggagttttagatatttcgtagattagatagtgttttatacgtttttttattttcgtttaaagttgataaagagtcggtttaaatgttttatcgcgattgtttttagggaaataaaatggaaattttacggattcgttcgttttaattttttcgcgtcgtgcgtcggcgttgagtttcgggttcgagttcgggcgggcggggcgcggatagcgggggtcgtgttaggttcgtagcgtcgcgggataaagtcgggtcggtcgttagttgtcgcgagtcgggagggcgcgttcggggcgcggcgggcgttgttcgggcgtagggcgttcggttcgagggggcgcgtagggttcggattttcgttcgtagttgtgtttcgatatagggttcgagttcgatggagttttcggggaggggggcgtggggttatttattgatttttatgttttggaataaagagcgtttgtagttgtacgtgtaggagatat

SEQ ID NO: 27098 - DNA, 643 bp, Artificial Sequence
  chemically treated genomic DNA (Homo sapiens) CpG-island No: 27098
atatctcctacacgtacaactacaaacgctctttattccaaaacataaaaatcaataaataaccccacgcccccctccccgaaaactccatcgaactcgaaccctatatcgaaacacaactacgaacgaaaatccgaaccctacgcgccccctcgaaccgaacgccctacgcccgaacaacgcccgccgcgccccgaacgcgccctcccgactcgcgacaactaacgaccgacccgactttatcccgcgacgctacgaacctaacacgacccccgctatccgcgccccgcccgcccgaactcgaacccgaaactcaacgccgacgcacgacgcgaaaaaattaaaacgaacgaatccgtaaaatttccattttatttccctaaaaacaatcgcgataaaacatttaaaccgactctttatcaactttaaacgaaaataaaaaaacgtataaaacactatctaatctacgaaatatctaaaactccgaacgtatatctaaaatattcgcgacgctatatctcgaactctaaataaaaaaaaaaacgtctataaaatatacgtaactacgtaactctatctaaatcttcgacgtctctcgaaatatctaaaaatctaaatcgcgatcttacccaaaaatacgtat

SEQ ID NO: 27099 - DNA, 643 bp, Artificial Sequence
  chemically treated genomic DNA (Homo sapiens) CpG-island No: 27099
atgttttttgtacgtgtaattgtaaacgttttttgttttagagtatggagattagtgagtgattttacgttttttttttcggagattttatcgggttcggattttatgtcggggtatagttgcgagcgggggttcgggttttgcgcgttttttcggatcgaacgttttgcgttcgggtagcgttcgtcgcgtttcgggcgcgttttttcggttcgcggtagttggcggtcggttcggttttgtttcgcggcgttgcgagtttggtacggttttcgttgttcgcgtttcgttcgttcggattcggattcggggtttagcgtcggcgtacggcgcgggagggttggggcgggcggattcgtgaagtttttattttatttttttgagggtagtcgcgatggagtatttaggtcggttttttattaattttgggcgggggtggaggggcgtgtgagatattgtttggtttgcgaggtgtttggggtttcgggcgtgtgtttggagtgttcgcggcgttgtgtttcgggttttgagtgaaaaaaagagcgtttgtggagtgtgcgtggttgcgtggttttgtttgggttttcggcgtttttcggggtgtttgggggtttgagtcgcggttttgtttaagagtgcgtgt

SEQ ID NO: 27100 - DNA, 643 bp, Artificial Sequence
  chemically treated genomic DNA (Homo sapiens) CpG-island No: 27100
acacgcactcttaaacaaaaccgcgactcaaacccccaaacaccccgaaaaacgccgaaaacccaaacaaaaccacgcaaccacgcacactccacaaacgctctttttttcactcaaaacccgaaacacaacgccgcgaacactccaaacacacgcccgaaaccccaaacacctcgcaaaccaaacaatatctcacacgcccctccacccccgcccaaaattaataaaaaaccgacctaaatactccatcgcgactaccctcaaaaaaataaaataaaaacttcacgaatccgcccgccccaaccctcccgcgccgtacgccgacgctaaaccccgaatccgaatccgaacgaacgaaacgcgaacaacgaaaaccgtaccaaactcgcaacgccgcgaaacaaaaccgaaccgaccgccaactaccgcgaaccgaaaaaacgcgcccgaaacgcgacgaacgctacccgaacgcaaaacgttcgatccgaaaaaacgcgcaaaacccgaacccccgctcgcaactataccccgacataaaatccgaacccgataaaatctccgaaaaaaaaaacgtaaaatcactcactaatctccatactctaaaacaaaaaacgtttacaattacacgtacaaaaaacat

SEQ ID NO: 27101 - DNA, 661 bp, Artificial Sequence
  chemically treated genomic DNA (Homo sapiens) CpG-island No: 27101
tggttgcggttttttttcgcgttcgatttatttgggatcggtcgcgatatttcgtttgttagtagggtttagggtcgggaaagttttttttcggtttttcggaggggggaatttttatgacgttttcgtgcgttacgtttcgcgtttttttttattggttgaaagtttaattttggattggcgtagttaattcggagcgattcgggcgcgtttttgagaggggataggtttatttagggcggggagcggggtgataggatattaggcgcgagttcggtcggttaggggatcgtcgagaaggtattcgttgatttagcgttatttcgggtcgggagttttcgttgtttttcggttttggttgcgtttaacgtttggttttttttgaagcgggggatttttagggggaagtcgacggttttagttttcggggtttttattttgagcggcgcgttgtcgggaagttagcggaagaggaaggaagttatttttgcggtcggtttcgggcgttttttggcggtttttttgggttcgcgagtagattttattcggtttcggtttttttttcgtttcgttttattagttttaaggtttcgggagagatagttcggatttcgaatttttttagaagtgataggtttttagcgggttagggtttaggagt

SEQ ID NO: 27102 - DNA, 661 bp, Artificial Sequence
  chemically treated genomic DNA (Homo sapiens) CpG-island No: 27102
actcctaaaccctaacccgctaaaaacctatcacttctaaaaaaattcgaaatccgaactatctctcccgaaaccttaaaactaataaaacgaaacgaaaaaaaaaccgaaaccgaataaaatctactcgcgaacccaaaaaaaccgccaaaaaacgcccgaaaccgaccgcaaaaataacttccttcctcttccgctaacttcccgacaacgcgccgctcaaaataaaaaccccgaaaactaaaaccgtcgacttccccctaaaaatcccccgcttcaaaaaaaaccaaacgttaaacgcaaccaaaaccgaaaaacaacgaaaactcccgacccgaaataacgctaaatcaacgaataccttctcgacgatcccctaaccgaccgaactcgcgcctaatatcctatcaccccgctccccgccctaaataaacctatcccctctcaaaaacgcgcccgaatcgctccgaattaactacgccaatccaaaattaaactttcaaccaataaaaaaaaacgcgaaacgtaacgcacgaaaacgtcataaaaattcccccctccgaaaaaccgaaaaaaaactttcccgaccctaaaccctactaacaaacgaaatatcgcgaccgatcccaaataaatcgaacgcgaaaaaaaaccgcaacca

SEQ ID NO: 27103 - DNA, 661 bp, Artificial Sequence
  chemically treated genomic DNA (Homo sapiens) CpG-island No: 27103
gtttttgagttttggttcgttgggaatttgttatttttaaaaaagttcgaggttcggattgtttttttcggagttttgaggttgatgagacggagcgagagaggggtcggggtcgaatggagtttattcgcgggtttagggaggtcgttagagggcgttcgggatcgatcgtaagaataattttttttttttttcgttaatttttcggtagcgcgtcgtttagggtgggggtttcgagggttggggtcgtcggtttttttttggggatttttcgttttagagaaagttaagcgttaggcgtagttaaagtcgagaggtagcggaagttttcggttcggggtggcgttgggttagcgggtattttttcggcggttttttggtcggtcgaattcgcgtttggtgttttgttatttcgtttttcgttttgagtgagtttgtttttttttaggggcgcgttcgagtcgtttcgggttggttgcgttagtttagagttaaatttttagttaatgaaaaagggcgcgaggcgtgacgtacggaaacgttatgggaattttttttttcggggggtcgagaaggggttttttcggttttgagttttgttggtaggcgaggtgtcgcgatcggttttaggtgggtcgggcgcggagagaagtcgtaatta

SEQ ID NO: 27104 - DNA, 661 bp, Artificial Sequence
  chemically treated genomic DNA (Homo sapiens) CpG-island No: 27104
taattacgacttctctccgcgcccgacccacctaaaaccgatcgcgacacctcgcctaccaacaaaactcaaaaccgaaaaaaccccttctcgaccccccgaaaaaaaaaattcccataacgtttccgtacgtcacgcctcgcgccctttttcattaactaaaaatttaactctaaactaacgcaaccaacccgaaacgactcgaacgcgcccctaaaaaaaaacaaactcactcaaaacgaaaaacgaaataacaaaacaccaaacgcgaattcgaccgaccaaaaaaccgccgaaaaaatacccgctaacccaacgccaccccgaaccgaaaacttccgctacctctcgactttaactacgcctaacgcttaactttctctaaaacgaaaaatccccaaaaaaaaaccgacgaccccaaccctcgaaacccccaccctaaacgacgcgctaccgaaaaattaacgaaaaaaaaaaaaaattattcttacgatcgatcccgaacgccctctaacgacctccctaaacccgcgaataaactccattcgaccccgacccctctctcgctccgtctcatcaacctcaaaactccgaaaaaaacaatccgaacctcgaacttttttaaaaataacaaattcccaacgaaccaaaactcaaaaac

SEQ ID NO: 27105 - DNA, 537 bp, Artificial Sequence
  chemically treated genomic DNA (Homo sapiens) CpG-island No: 27105
tcggcgttttaattttttttagttcgcgtttgttcgttttttcgcggtttagagtatattagtatttgacgatagcggtaatttggagcgggttcggttggttagggtaaaggcggcggtatttttcgtagatggcgtgtagtttcgggggaaagagcgaagcgaaggtcgggggggtagtcgggttaggggtcgggggcgcggtagggtcgggggcgtcgttaggtcgtagtttcgttatcggggtgcgtagggtaggtattgggggaattggagagggtaaacgacggggagagtattgacgggttagcgggcggattcggtgggtgagatttttcgaggcgatgggggttgtagtgaggtttagtttcgcgtttgcgtacggcgtattgttcgtttaggttgtcgtcgtcgtcgagtttgttagagggtgtttcggggcggcggggcgttaaggggggcgggcgtcggcgtattttatttaagtatttattggttaatgtttgtgttagttataggtagggaaggtgggatttg

SEQ ID NO: 27106 - DNA, 537 bp, Artificial Sequence
  chemically treated genomic DNA (Homo sapiens) CpG-island No: 27106
caaatcccaccttccctacctataactaacacaaacattaaccaataaatacttaaataaaatacgccgacgcccgccccccttaacgccccgccgccccgaaacaccctctaacaaactcgacgacgacgacaacctaaacgaacaatacgccgtacgcaaacgcgaaactaaacctcactacaacccccatcgcctcgaaaaatctcacccaccgaatccgcccgctaacccgtcaatactctccccgtcgtttaccctctccaattcccccaatacctaccctacgcaccccgataacgaaactacgacctaacgacgcccccgaccctaccgcgcccccgacccctaacccgactacccccccgaccttcgcttcgctctttcccccgaaactacacgccatctacgaaaaataccgccgcctttaccctaaccaaccgaacccgctccaaattaccgctatcgtcaaatactaatatactctaaaccgcgaaaaaacgaacaaacgcgaactaaaaaaaattaaaacgccga

SEQ ID NO: 27107 - DNA, 537 bp, Artificial Sequence
  chemically treated genomic DNA (Homo sapiens) CpG-island No: 27107
taagttttattttttttgtttgtgattggtatagatattagttaatgggtgtttggatagggtgcgtcggcgttcgttttttttagcgtttcgtcgtttcgaggtattttttggtagattcggcggcggcgatagtttgggcggatagtgcgtcgtgcgtaggcgcggagttagattttattgtagtttttatcgtttcggggagttttatttatcgagttcgttcgttggttcgttagtgtttttttcgtcgtttgttttttttagtttttttagtgtttgttttacgtatttcgatggcgaagttgcggtttagcggcgttttcggttttatcgcgttttcggtttttggttcgattgttttttcggttttcgtttcgttttttttttcgggattgtacgttatttacggagagtgtcgtcgtttttattttgattagtcgaattcgttttaggttatcgttatcgttaagtattggtatgttttgggtcgcggggagacggataggcgcgggttggaaagggttaaagcgtcga

SEQ ID NO: 27108 - DNA, 537 bp, Artificial Sequence
  chemically treated genomic DNA (Homo sapiens) CpG-island No: 27108
tcgacgctttaaccctttccaacccgcgcctatccgtctccccgcgacccaaaacataccaatacttaacgataacgataacctaaaacgaattcgactaatcaaaataaaaacgacgacactctccgtaaataacgtacaatcccgaaaaaaaaaacgaaacgaaaaccgaaaaaacaatcgaaccaaaaaccgaaaacgcgataaaaccgaaaacgccgctaaaccgcaacttcgccatcgaaatacgtaaaacaaacactaaaaaaactaaaaaaaacaaacgacgaaaaaaacactaacgaaccaacgaacgaactcgataaataaaactccccgaaacgataaaaactacaataaaatctaactccgcgcctacgcacgacgcactatccgcccaaactatcgccgccgccgaatctaccaaaaaatacctcgaaacgacgaaacgctaaaaaaaacgaacgccgacgcaccctatccaaacacccattaactaatatctataccaatcacaaacaaaaaaaataaaactta

SEQ ID NO: 27109 - DNA, 633 bp, Artificial Sequence
  chemically treated genomic DNA (Homo sapiens) CpG-island No: 27109
tcgaagcgacgtagttcggttaggtgaagttgtattagcgatcggaaggttcggttaacgcgttgtagtcggagtagttggcgtagcgggattcggtttaggacgtgtgggagtagtacgtttttttagggtaggtttaggaatttgcgagtaaaggggcgttggtattggcgtttcggggttattattatttgcgagttcgttttcgttatgtttttgcgttttagtttttaagagcggtttttagatttagtttcggttcggttttttttttttaggttttttttttttttcggttttttcggtgttcggtatttgacggtttcgggtttttgttttttttcggacggttttatcggtggttttatcggttgtttattgcgcgtgcgtagtaagattttttcgttttggttttggagtggtcgtattaaattcgtttttttggtttgtagagatagatttatttaatcgagtgtcgttttatcgaggattcgatttgaaagtttttcgggtggatttcgaaacggaggcggaatagatcggtggtgtaatattaggtttcgttttttcggttatagggtttgaggtttgaagttggagaatgcggtgggtattatagattggtttttgtcg

SEQ ID NO: 27110 - DNA, 633 bp, Artificial Sequence
  chemically treated genomic DNA (Homo sapiens) CpG-island No: 27110
cgacaaaaaccaatctataatacccaccgcattctccaacttcaaacctcaaaccctataaccgaaaaaacgaaacctaatattacaccaccgatctattccgcctccgtttcgaaatccacccgaaaaactttcaaatcgaatcctcgataaaacgacactcgattaaataaatctatctctacaaaccaaaaaaacgaatttaatacgaccactccaaaaccaaaacgaaaaaatcttactacgcacgcgcaataaacaaccgataaaaccaccgataaaaccgtccgaaaaaaaacaaaaacccgaaaccgtcaaataccgaacaccgaaaaaaccgaaaaaaaaaaaaaacctaaaaaaaaaaaaccgaaccgaaactaaatctaaaaaccgctcttaaaaactaaaacgcaaaaacataacgaaaacgaactcgcaaataataataaccccgaaacgccaataccaacgcccctttactcgcaaattcctaaacctaccctaaaaaaacgtactactcccacacgtcctaaaccgaatcccgctacgccaactactccgactacaacgcgttaaccgaaccttccgatcgctaatacaacttcacctaaccgaactacgtcgcttcga

SEQ ID NO: 27111 - DNA, 633 bp, Artificial Sequence
  chemically treated genomic DNA (Homo sapiens) CpG-island No: 27111
cgatagaagttagtttatgatgtttatcgtattttttagttttaggttttaagttttgtagtcgagaaggcgaggtttaatgttatattatcggtttgtttcgttttcgtttcggggtttattcgaaaagtttttagatcggattttcggtgagacggtattcgattaaataggtttgtttttataggttaaggaggcgggtttggtgcggttattttaaggttaaagcgagaaaattttattgcgtacgcgtaatagatagtcgatggagttatcgatggagtcgttcggaggggagtaagagttcggagtcgttaggtatcgagtatcggaggggtcgagagggaagaggaatttgagggaggggagtcgagtcggggttgggtttgggggtcgtttttgggagttggggcgtaggaatataacggaggcggattcgtaggtaatagtggtttcgggacgttagtgttaacgtttttttattcgtaggtttttggatttgttttgggaagacgtgttgtttttatacgttttgaatcgggtttcgttgcgttagttgtttcggttgtagcgcgttagtcgggtttttcggtcgttggtgtagttttatttggtcgggttgcgtcgtttcga

SEQ ID NO: 27112 - DNA, 633 bp, Artificial Sequence
  chemically treated genomic DNA (Homo sapiens) CpG-island No: 27112
tcgaaacgacgcaacccgaccaaataaaactacaccaacgaccgaaaaacccgactaacgcgctacaaccgaaacaactaacgcaacgaaacccgattcaaaacgtataaaaacaacacgtcttcccaaaacaaatccaaaaacctacgaataaaaaaacgttaacactaacgtcccgaaaccactattacctacgaatccgcctccgttatattcctacgccccaactcccaaaaacgacccccaaacccaaccccgactcgactcccctccctcaaattcctcttccctctcgacccctccgatactcgatacctaacgactccgaactcttactcccctccgaacgactccatcgataactccatcgactatctattacgcgtacgcaataaaattttctcgctttaaccttaaaataaccgcaccaaacccgcctccttaacctataaaaacaaacctatttaatcgaataccgtctcaccgaaaatccgatctaaaaacttttcgaataaaccccgaaacgaaaacgaaacaaaccgataatataacattaaacctcgccttctcgactacaaaacttaaaacctaaaactaaaaaatacgataaacatcataaactaacttctatcg

SEQ ID NO: 27113 - DNA, 693 bp, Artificial Sequence
  chemically treated genomic DNA (Homo sapiens) CpG-island No: 27113
tcgggcggcgtaggacgttcgtcgcgcgaggggcgggggttaagcgtatcgaggggcggtgttcgagggcgcgggaggcgggagaggttgtcgcgtcgtgtgttttggtagtcgtagtttcgtttcgtcgcgttcggttcggttttgtttcgtagcgtttcgttagttagttttttgtatttttcgcggtcgaggcgttttttggtgtttttcgcgtagttatggtttagtatttttttttggtcgtttgcgacgtggtcggattcgatttggattatattttgtgtcgttataatttgttcgagagcgtttcggtgagtggcgcgggtttcggggcgtattgcgcgtaatttttatggcggttggggtttgagttttttttaggtttgggtaacggcggacgttgttcggggtttgcggcggtcgagttttgtcgtagagcgcggtttttagcggcgagaaggggcggaagtgtgtagttttcgtttcgcgtcggtgtcgtggggatcggtatatttattttagttattagttaatgttgagagggatagggaagaacgaaggaggggtaaattgcgtaagatcgggttggggaatcggtgatttttagggtcgaggaggggcggggttagggggattagggttgtttttgaagattttacgtcgtggaattttttttgtatgtttttttgg

SEQ ID NO: 27114 - DNA, 693 bp, Artificial Sequence
  chemically treated genomic DNA (Homo sapiens) CpG-island No: 27114
ccaaaaaaacatacaaaaaaaattccacgacgtaaaatcttcaaaaacaaccctaatccccctaaccccgcccctcctcgaccctaaaaatcaccgattccccaacccgatcttacgcaatttacccctccttcgttcttccctatccctctcaacattaactaataactaaaataaatataccgatccccacgacaccgacgcgaaacgaaaactacacacttccgccccttctcgccgctaaaaaccgcgctctacgacaaaactcgaccgccgcaaaccccgaacaacgtccgccgttacccaaacctaaaaaaaactcaaaccccaaccgccataaaaattacgcgcaatacgccccgaaacccgcgccactcaccgaaacgctctcgaacaaattataacgacacaaaatataatccaaatcgaatccgaccacgtcgcaaacgaccaaaaaaaaatactaaaccataactacgcgaaaaacaccaaaaaacgcctcgaccgcgaaaaatacaaaaaactaactaacgaaacgctacgaaacaaaaccgaaccgaacgcgacgaaacgaaactacgactaccaaaacacacgacgcgacaacctctcccgcctcccgcgccctcgaacaccgcccctcgatacgcttaacccccgcccctcgcgcgacgaacgtcctacgccgcccga

SEQ ID NO: 27115 - DNA, 693 bp, Artificial Sequence
  chemically treated genomic DNA (Homo sapiens) CpG-island No: 27115
ttagaaagatatgtagagaaagttttacgacgtgagatttttaaggatagttttagtttttttgatttcgttttttttcggttttagaaattatcgattttttagttcggttttgcgtagtttgtttttttttcgtttttttttattttttttaatattagttaatggttgaggtaaatgtgtcggtttttacggtatcggcgcggagcggaggttgtatattttcgttttttttcgtcgttggaggtcgcgttttgcggtaagattcggtcgtcgtaggtttcgggtagcgttcgtcgttgtttaaatttggaggaaatttaagttttagtcgttatggaggttgcgcgtagtgcgtttcggagttcgcgttatttatcggggcgttttcgggtaggttgtagcgatatagagtgtggtttaggtcgaattcgattacgtcgtaggcggttagggagaagtgttgagttatggttgcgcggggagtattagggagcgtttcggtcgcgaagggtgtaaggagttggttggcgggacgttgcgggataggatcgggtcggacgcggcggggcggggttgcggttgttagggtatacggcgcggtagtttttttcgtttttcgcgttttcgagtatcgtttttcgatacgtttagttttcgtttttcgcgcggcgggcgttttgcgtcgttcgg

SEQ ID NO: 27116 - DNA, 693 bp, Artificial Sequence
  chemically treated genomic DNA (Homo sapiens) CpG-island No: 27116
ccgaacgacgcaaaacgcccgccgcgcgaaaaacgaaaactaaacgtatcgaaaaacgatactcgaaaacgcgaaaaacgaaaaaaactaccgcgccgtataccctaacaaccgcaaccccgccccgccgcgtccgacccgatcctatcccgcaacgtcccgccaaccaactccttacacccttcgcgaccgaaacgctccctaatactccccgcgcaaccataactcaacacttctccctaaccgcctacgacgtaatcgaattcgacctaaaccacactctatatcgctacaacctacccgaaaacgccccgataaataacgcgaactccgaaacgcactacgcgcaacctccataacgactaaaacttaaatttcctccaaatttaaacaacgacgaacgctacccgaaacctacgacgaccgaatcttaccgcaaaacgcgacctccaacgacgaaaaaaaacgaaaatatacaacctccgctccgcgccgataccgtaaaaaccgacacatttacctcaaccattaactaatattaaaaaaaataaaaaaaaacgaaaaaaaaacaaactacgcaaaaccgaactaaaaaatcgataatttctaaaaccgaaaaaaaacgaaatcaaaaaaactaaaactatccttaaaaatctcacgtcgtaaaactttctctacatatctttctaa

SEQ ID NO: 27117 - DNA, 647 bp, Artificial Sequence
  chemically treated genomic DNA (Homo sapiens) CpG-island No: 27117
ttcgttatttttttttagaaggtaaagggaagttttggcggaagaggttttcggaacggatcggaaggggtcggttttgtgggcgggtttaatcggttgggagtttcgtggagggttgaggttgagttttggaggttgcgttggttggggcggatagttttatttgcgggtttcgattttcgtagattttggtttgacggcgttcgtgatgttcgtcgtaggcgaaacgggcgtgttaaaggtcggttgttaaggttggggggaatttaggtaattacgggcgtttttataaaagtatttggaagttttttaattattcggagtcggatgtcggttgttgagtcgagttgtttgatcgtgcgtgtgtacggggtggtttggagggttgtttgatcgtgtgtttcgtgtgttgaatttttcgttagttttttttgatcgaagtattcgtgtcggaatgtgtggtaggtttgagttacggtttaggtttttagagtattttggaaatatcgtttcgggggtttggacgtaacgaagcggaaaaatgcggttttcgcggatagttggtttagtttgttcgaaagaggcgaagttgtgtcgttggatagtgaatcggtacgtgattgggtatttaatattcgggattatat

SEQ ID NO: 27118 - DNA, 647 bp, Artificial Sequence
  chemically treated genomic DNA (Homo sapiens) CpG-island No: 27118
atataatcccgaatattaaatacccaatcacgtaccgattcactatccaacgacacaacttcgcctctttcgaacaaactaaaccaactatccgcgaaaaccgcatttttccgcttcgttacgtccaaacccccgaaacgatatttccaaaatactctaaaaacctaaaccgtaactcaaacctaccacacattccgacacgaatacttcgatcaaaaaaaactaacgaaaaattcaacacacgaaacacacgatcaaacaaccctccaaaccaccccgtacacacgcacgatcaaacaactcgactcaacaaccgacatccgactccgaataattaaaaaacttccaaatacttttataaaaacgcccgtaattacctaaattccccccaaccttaacaaccgacctttaacacgcccgtttcgcctacgacgaacatcacgaacgccgtcaaaccaaaatctacgaaaatcgaaacccgcaaataaaactatccgccccaaccaacgcaacctccaaaactcaacctcaaccctccacgaaactcccaaccgattaaacccgcccacaaaaccgaccccttccgatccgttccgaaaacctcttccgccaaaacttccctttaccttctaaaaaaaaataacgaa

SEQ ID NO: 27119 - DNA, 647 bp, Artificial Sequence
  chemically treated genomic DNA (Homo sapiens) CpG-island No: 27119
gtgtggtttcggatgttaagtgtttaattacgtgtcggtttattgtttaacggtatagtttcgtttttttcggataggttggattaattgttcgcggagatcgtattttttcgtttcgttacgtttaggttttcgaaacgatgtttttagaatgttttgaaggtttggatcgtggtttagatttgttatatatttcgatacgagtgtttcgattaggggaggttgacggagggtttaatatacggaatatacggttaaatagttttttaggttatttcgtgtatacgtacggttaggtagttcggtttagtaatcggtattcggtttcgagtagttgaggggtttttaagtatttttgtgggaacgttcgtagttatttgagttttttttagttttagtaatcggtttttaatacgttcgtttcgtttgcggcggatattacgaacgtcgttaagttagaatttgcgaaaatcggaattcgtagataaggttgttcgttttaattaacgtaatttttaggatttaattttagttttttacgaggtttttagtcgattggattcgtttataagatcggtttttttcggttcgtttcggaagtttttttcgttagagtttttttttgttttttaggaggaaatgacgga

SEQ ID NO: 27120 - DNA, 647 bp, Artificial Sequence
  chemically treated genomic DNA (Homo sapiens) CpG-island No: 27120
tccgtcatttcctcctaaaaaacaaaaaaaaactctaacgaaaaaaacttccgaaacgaaccgaaaaaaaccgatcttataaacgaatccaatcgactaaaaacctcgtaaaaaactaaaattaaatcctaaaaattacgttaattaaaacgaacaaccttatctacgaattccgattttcgcaaattctaacttaacgacgttcgtaatatccgccgcaaacgaaacgaacgtattaaaaaccgattactaaaactaaaaaaaactcaaataactacgaacgttcccacaaaaatacttaaaaacccctcaactactcgaaaccgaataccgattactaaaccgaactacctaaccgtacgtatacacgaaataacctaaaaaactatttaaccgtatattccgtatattaaaccctccgtcaacctcccctaatcgaaacactcgtatcgaaatatataacaaatctaaaccacgatccaaaccttcaaaacattctaaaaacatcgtttcgaaaacctaaacgtaacgaaacgaaaaaatacgatctccgcgaacaattaatccaacctatccgaaaaaaacgaaactataccgttaaacaataaaccgacacgtaattaaacacttaacatccgaaaccacac

SEQ ID NO: 27121 - DNA, 682 bp, Artificial Sequence
  chemically treated genomic DNA (Homo sapiens) CpG-island No: 27121
ggtttcggttagtgttgcggtttcggttttggtcggtaggggtcgcgtttcgcggcgttcggggtttcgtcgcgttcgtcgtcgtcgttcgttttttcgttttttttttagtcggggttttcgttacgtcgcggagtcgggagtcggagttcgagttcgcggcggcggcgggaggcggcgagggggcgtcgcggcggcggcggtggggtttgcggggcgggcggtcgggttcggttaggtcgcgatggcgattaagaaggtaggttcgcggttggagacggagatcgagcgtgtcgtttcgagtgttagtgggagcggatttttgagttcgttaagtagttgtcggttaagtttatcgttaacggtacgtatcgggcgcgtcggtttgggttgcggggggcgtcgcggttttcgcggggacgggttttcgaggcgcggtcgggcgcggggggcgggtaggggcgcggtcgggtcgcgagggagttgcggtttaggggatgtgcgcgggatcggggtttgggggtgttcgggtgtttcggagttacgcggtgtgggttgatgggggggcgttaggggttgtttcggcgtttggggtttaagcgtgtagggcgggtttttgcggagtttggggtgttcgggggttttagcgagttcgttgttttattgggattataggaggtta

SEQ ID NO: 27122 - DNA, 682 bp, Artificial Sequence
  chemically treated genomic DNA (Homo sapiens) CpG-island No: 27122
taacctcctataatcccaataaaacaacgaactcgctaaaacccccgaacaccccaaactccgcaaaaacccgccctacacgcttaaaccccaaacgccgaaacaacccctaacgcccccccatcaacccacaccgcgtaactccgaaacacccgaacacccccaaaccccgatcccgcgcacatcccctaaaccgcaactccctcgcgacccgaccgcgcccctacccgccccccgcgcccgaccgcgcctcgaaaacccgtccccgcgaaaaccgcgacgccccccgcaacccaaaccgacgcgcccgatacgtaccgttaacgataaacttaaccgacaactacttaacgaactcaaaaatccgctcccactaacactcgaaacgacacgctcgatctccgtctccaaccgcgaacctaccttcttaatcgccatcgcgacctaaccgaacccgaccgcccgccccgcaaaccccaccgccgccgccgcgacgccccctcgccgcctcccgccgccgccgcgaactcgaactccgactcccgactccgcgacgtaacgaaaaccccgactaaaaaaaaaacgaaaaaacgaacgacgacgacgaacgcgacgaaaccccgaacgccgcgaaacgcgacccctaccgaccaaaaccgaaaccgcaacactaaccgaaacc

SEQ ID NO: 27123 - DNA, 682 bp, Artificial Sequence
  chemically treated genomic DNA (Homo sapiens) CpG-island No: 27123
tgattttttgtggttttagtggagtagcggattcgttgagattttcggatattttagatttcgtagaagttcgttttgtacgtttgaattttaggcgtcgggatagtttttggcgtttttttattaatttatatcgcgtgatttcggggtattcgggtatttttaggtttcggtttcgcgtatattttttgggtcgtagttttttcgcggttcggtcgcgtttttgttcgtttttcgcgttcggtcgcgtttcgggggttcgttttcgcggaggtcgcggcgtttttcgtagtttaggtcggcgcgttcggtgcgtatcgttggcgatgagtttggtcgatagttgtttgacgagtttagggattcgtttttattggtattcggagcggtacgttcgattttcgtttttagtcgcgagtttgtttttttggtcgttatcgcggtttggtcgggttcggtcgttcgtttcgtaggttttatcgtcgtcgtcgcggcgttttttcgtcgtttttcgtcgtcgtcgcgggttcgggtttcggttttcggtttcgcggcgtaacgggagtttcggttggggaaagggcggggaggcgggcggcggcggcgggcgcggcggggtttcgggcgtcgcgaggcgcggtttttgtcggttagggtcggagtcgtagtattgatcggggtt

SEQ ID NO: 27124 - DNA, 682 bp, Artificial Sequence
  chemically treated genomic DNA (Homo sapiens) CpG-island No: 27124
aaccccgatcaatactacgactccgaccctaaccgacaaaaaccgcgcctcgcgacgcccgaaaccccgccgcgcccgccgccgccgcccgcctccccgccctttccccaaccgaaactcccgttacgccgcgaaaccgaaaaccgaaacccgaacccgcgacgacgacgaaaaacgacgaaaaaacgccgcgacgacgacgataaaacctacgaaacgaacgaccgaacccgaccaaaccgcgataacgaccaaaaaaacaaactcgcgactaaaaacgaaaatcgaacgtaccgctccgaataccaataaaaacgaatccctaaactcgtcaaacaactatcgaccaaactcatcgccaacgatacgcaccgaacgcgccgacctaaactacgaaaaacgccgcgacctccgcgaaaacgaacccccgaaacgcgaccgaacgcgaaaaacgaacaaaaacgcgaccgaaccgcgaaaaaactacgacccaaaaaatatacgcgaaaccgaaacctaaaaatacccgaataccccgaaatcacgcgatataaattaataaaaaaacgccaaaaactatcccgacgcctaaaattcaaacgtacaaaacgaacttctacgaaatctaaaatatccgaaaatctcaacgaatccgctactccactaaaaccacaaaaaatca

SEQ ID NO: 27125 - DNA, 939 bp, Artificial Sequence
  chemically treated genomic DNA (Homo sapiens) CpG-island No: 27125
ggtcgtaatttcgtattcgggtaaatacgcgttttcgtttcgggagcggttttttagcgttttgggagcgacgggtttcgtttttcggcgttcggagtttaaagtcggtcgggttgtcgtcgcgattttttcgggtcgtttttttcgtttcgagcgttatatttcgcgtttttgttttagggacggcggcgcgttttagttcgtttttcggagcgtatagagatcggttagttcggcgtcgtcgcgttttagttttagacggacgattggttttttttcgttcggcgttttagcgtttttcgcggcggtttggttttagtttcggcgtttttacgtttaagaatagtttttttttttttcggacgtttcgcgttatatcggatatagtttcggttttatagttttagagatattaagggatatttatttcggaggtttttttcgtcgttgttgttgtcgttgggatcgttgtcgtcgttttcgtcgtcgtcgttattagtatcgtcgttcgtatcggcgttagtattttcggttattttttttttatcgtcgtcgtcgtcgttttttttttttttgttagtggtttaggtttcgggattgttttaggtttttttcgtcgttattttgatttttagacggagtaggaggggttcggttcggcgtggttttggggcgtttgcgcggcgttgcggagtcggtcggagttttcgtttttttttgtcgtcgtttcgtttagggttacgtggttcgacgtcgtcgcgcgagttgggtcgcgtgggggggcggtgcgttcgttggatttatgggagcggagtgcgcgcgtattatttttgttcgtcggttgggagtcgggcgtcgggtcgttgggagtttgttttttgtggtagtattttgtttagtttagcgaattgtgatatattattaaatgtattagaatat

SEQ ID NO: 27126 - DNA, 939 bp, Artificial Sequence
  chemically treated genomic DNA (Homo sapiens) CpG-island No: 27126
atattctaatacatttaataatatatcacaattcgctaaactaaacaaaatactaccacaaaaaacaaactcccaacgacccgacgcccgactcccaaccgacgaacaaaaataatacgcgcgcactccgctcccataaatccaacgaacgcaccgcccccccacgcgacccaactcgcgcgacgacgtcgaaccacgtaaccctaaacgaaacgacgacaaaaaaaaacgaaaactccgaccgactccgcaacgccgcgcaaacgccccaaaaccacgccgaaccgaacccctcctactccgtctaaaaatcaaaataacgacgaaaaaaacctaaaacaatcccgaaacctaaaccactaacaaaaaaaaaaaaaacgacgacgacgacgataaaaaaaaaataaccgaaaatactaacgccgatacgaacgacgatactaataacgacgacgacgaaaacgacgacaacgatcccaacgacaacaacaacgacgaaaaaaacctccgaaataaatatcccttaatatctctaaaactataaaaccgaaactatatccgatataacgcgaaacgtccgaaaaaaaaaaaaactattcttaaacgtaaaaacgccgaaactaaaaccaaaccgccgcgaaaaacgctaaaacgccgaacgaaaaaaaaccaatcgtccgtctaaaactaaaacgcgacgacgccgaactaaccgatctctatacgctccgaaaaacgaactaaaacgcgccgccgtccctaaaacaaaaacgcgaaatataacgctcgaaacgaaaaaaacgacccgaaaaaatcgcgacgacaacccgaccgactttaaactccgaacgccgaaaaacgaaacccgtcgctcccaaaacgctaaaaaaccgctcccgaaacgaaaacgcgtatttacccgaatacgaaattacgacc

SEQ ID NO: 27127 - DNA, 939 bp, Artificial Sequence
  chemically treated genomic DNA (Homo sapiens) CpG-island No: 27127
atattttgatatatttaataatgtgttataattcgttggattaagtaggatgttgttataagaggtaaatttttagcgattcgacgttcggtttttagtcgacgagtaaaaataatgcgcgcgtatttcgtttttatggatttagcgaacgtatcgtttttttacgcggtttaattcgcgcggcgacgtcgggttacgtgattttgagcgggacgacggtaggggagggcgggggtttcggtcggtttcgtagcgtcgcgtaggcgttttagggttacgtcgaatcgagttttttttgtttcgtttaggagttaaaatggcggcgaggggaatttggagtagtttcggagtttgagttattgataggagaggagagggcggcggcggcggcggtgggaggaggatggtcgggggtgttggcgtcggtgcggacggcggtgttggtggcggcggcggcggaggcgacggtagcggttttagcggtagtagtagcggcgggaggagttttcggggtgagtgttttttggtgtttttgaggttgtggagtcgaggttgtgttcggtgtggcgcggggcgttcgggagaggaaggggttgtttttaggcgtgggggcgtcggggttggggttaagtcgtcgcgggaggcgttggggcgtcgggcggggaggggttagtcgttcgtttggggttgaggcgcggcggcgtcggattggtcggtttttgtgcgtttcgaggggcgggttggagcgcgtcgtcgtttttggggtaggggcgcgaggtgtggcgttcggggcggggagagcggttcgagggagtcgcgacggtagttcggtcggttttgggtttcgggcgtcgaggggcgggattcgtcgtttttaggacgttgagaaatcgttttcgagacgggggcgcgtgtttattcgggtgcggggttgcgatt

SEQ ID NO: 27128 - DNA, 939 bp, Artificial Sequence
  chemically treated genomic DNA (Homo sapiens) CpG-island No: 27128
aatcgcaaccccgcacccgaataaacacgcgcccccgtctcgaaaacgatttctcaacgtcctaaaaacgacgaatcccgcccctcgacgcccgaaacccaaaaccgaccgaactaccgtcgcgactccctcgaaccgctctccccgccccgaacgccacacctcgcgcccctaccccaaaaacgacgacgcgctccaacccgcccctcgaaacgcacaaaaaccgaccaatccgacgccgccgcgcctcaaccccaaacgaacgactaacccctccccgcccgacgccccaacgcctcccgcgacgacttaaccccaaccccgacgcccccacgcctaaaaacaaccccttcctctcccgaacgccccgcgccacaccgaacacaacctcgactccacaacctcaaaaacaccaaaaaacactcaccccgaaaactcctcccgccgctactactaccgctaaaaccgctaccgtcgcctccgccgccgccgccaccaacaccgccgtccgcaccgacgccaacacccccgaccatcctcctcccaccgccgccgccgccgccctctcctctcctatcaataactcaaactccgaaactactccaaattcccctcgccgccattttaactcctaaacgaaacaaaaaaaactcgattcgacgtaaccctaaaacgcctacgcgacgctacgaaaccgaccgaaacccccgccctcccctaccgtcgtcccgctcaaaatcacgtaacccgacgtcgccgcgcgaattaaaccgcgtaaaaaaacgatacgttcgctaaatccataaaaacgaaatacgcgcgcattatttttactcgtcgactaaaaaccgaacgtcgaatcgctaaaaatttacctcttataacaacatcctacttaatccaacgaattataacacattattaaatatatcaaaatat

SEQ ID NO: 27129 - DNA, 575 bp, Artificial Sequence
  chemically treated genomic DNA (Homo sapiens) CpG-island No: 27129
ttgacgcgatatgttttttttgcgtgggcgttgttttgttcgtcgttattatcgtcgtttggttttgttcggtttgtagttcgtttttcgtttcgtttattcggggttttcgcgttagtttttgtttgtcgcggtgagttgaggtttagttattatggtgggcgggaagcgcgtggttttggcggggcgtttcgacgggtggggagaagggaggatacggcgtgtaggtttcgcgtgggaggtttttgtggtttggtcgtcgttgggggaggtttttgtggtttggtcgtttttgggggaggtttttgggagagggtcgcggtgaggatgtcgtcgtcgggtataggggcggaaagttcgggattttgaggaacgcgcggggattgggtttttttcgttgttattttttatcggtatttggttcgggggcggggttgtggtttcgcggaggaatgatttattattttcggacgttttcggtattgcgaagatttagcgttttcgataaaatggtggaaattttgggttatatcgaagttttagagtgcgaaggttggaatcggagattttttaga

SEQ ID NO: 27130 - DNA, 575 bp, Artificial Sequence
  chemically treated genomic DNA (Homo sapiens) CpG-island No: 27130
tctaaaaaatctccgattccaaccttcgcactctaaaacttcgatataacccaaaatttccaccattttatcgaaaacgctaaatcttcgcaataccgaaaacgtccgaaaataataaatcattcctccgcgaaaccacaaccccgcccccgaaccaaataccgataaaaaataacaacgaaaaaaacccaatccccgcgcgttcctcaaaatcccgaactttccgcccctatacccgacgacgacatcctcaccgcgaccctctcccaaaaacctcccccaaaaacgaccaaaccacaaaaacctcccccaacgacgaccaaaccacaaaaacctcccacgcgaaacctacacgccgtatcctcccttctccccacccgtcgaaacgccccgccaaaaccacgcgcttcccgcccaccataataactaaacctcaactcaccgcgacaaacaaaaactaacgcgaaaaccccgaataaacgaaacgaaaaacgaactacaaaccgaacaaaaccaaacgacgataataacgacgaacaaaacaacgcccacgcaaaaaaaacatatcgcgtcaa

SEQ ID NO: 27131 - DNA, 575 bp, Artificial Sequence
  chemically treated genomic DNA (Homo sapiens) CpG-island No: 27131
tttaaggggttttcggttttaattttcgtattttggaatttcgatgtggtttaggatttttattattttatcgaaaacgttagattttcgtagtgtcgaggacgttcgaggatggtaaattattttttcgcgaaattatagtttcgttttcgagttaggtgtcggtaaagggtaataacgaaggaggtttaattttcgcgcgttttttagggtttcgggtttttcgtttttgtgttcgacgacggtatttttatcgcgatttttttttaggaattttttttaaaggcgattaagttataggaattttttttaacggcgattaagttataagagttttttacgcgaggtttgtacgtcgtgtttttttttttttttattcgtcggggcgtttcgttagggttacgcgtttttcgtttattatgatggttgggttttaatttatcgcggtagataggggttggcgcgggggtttcgagtgggcgaagcggggagcgggttgtaggtcgagtagggttaagcggcggtagtggcggcgggtaggatagcgtttacgtaggagaggtatatcgcgttag

SEQ ID NO: 27132 - DNA, 575 bp, Artificial Sequence
  chemically treated genomic DNA (Homo sapiens) CpG-island No: 27132
ctaacgcgatatacctctcctacgtaaacgctatcctacccgccgccactaccgccgcttaaccctactcgacctacaacccgctccccgcttcgcccactcgaaacccccgcgccaacccctatctaccgcgataaattaaaacccaaccatcataataaacgaaaaacgcgtaaccctaacgaaacgccccgacgaataaaaaaaaaaaaaaacacgacgtacaaacctcgcgtaaaaaactcttataacttaatcgccgttaaaaaaaattcctataacttaatcgcctttaaaaaaaattcctaaaaaaaaatcgcgataaaaataccgtcgtcgaacacaaaaacgaaaaacccgaaaccctaaaaaacgcgcgaaaattaaacctccttcgttattaccctttaccgacacctaactcgaaaacgaaactataatttcgcgaaaaaataatttaccatcctcgaacgtcctcgacactacgaaaatctaacgttttcgataaaataataaaaatcctaaaccacatcgaaattccaaaatacgaaaattaaaaccgaaaaccccttaaa

SEQ ID NO: 27133 - DNA, 673 bp, Artificial Sequence
  chemically treated genomic DNA (Homo sapiens) CpG-island No: 27133
gttttggtcgcggattttagcggataagcgatttttcgcgtttttatttttagtattttagagggttcggatatttcgtatttagtgggtattttttgtttatttcgcggttcgcggatcggatattgttttcgatttttttttttcgtaggtttttcgttttgtttttatttacgtagggcgtcggggtttttggttaatattgttttcgaggtggcggcgcgttcgcggggttcgtcgtttaggtttttagggagtcgcggtcgtattcggagtaaggcgttttttgtagagttcgtcgtcgggtgcgttttttttttatcgcgcggggatagatagtaggtagcgttaatgcgagcggagcggagcgggcgggtaggggcggggcgatcgtcggaggcgcggggcggcgcgggcgtcgggatttatttgtagtagtagtttgtttgtttgtcgcggggaagtttatcgtgtttcgttcgggcgttaatttttattgttagattatattagcgtcgaggcggggatcgtaagagagttagtcggaaggttcggggggcgggggaaggcgggggggattagggtaatgaatttcgcgttttttgagacgttaaatagtgaggttcggttttaaattatagatagtcgtattatatatttttttttttttttt

SEQ ID NO: 27134 - DNA, 673 bp, Artificial Sequence
  chemically treated genomic DNA (Homo sapiens) CpG-island No: 27134
aaaaaaaaaaaaaaaatatataatacgactatctataatttaaaaccgaacctcactatttaacgtctcaaaaaacgcgaaattcattaccctaatcccccccgccttcccccgccccccgaaccttccgactaactctcttacgatccccgcctcgacgctaatataatctaacaataaaaattaacgcccgaacgaaacacgataaacttccccgcgacaaacaaacaaactactactacaaataaatcccgacgcccgcgccgccccgcgcctccgacgatcgccccgcccctacccgcccgctccgctccgctcgcattaacgctacctactatctatccccgcgcgataaaaaaaaaacgcacccgacgacgaactctacaaaaaacgccttactccgaatacgaccgcgactccctaaaaacctaaacgacgaaccccgcgaacgcgccgccacctcgaaaacaatattaaccaaaaaccccgacgccctacgtaaataaaaacaaaacgaaaaacctacgaaaaaaaaaaatcgaaaacaatatccgatccgcgaaccgcgaaataaacaaaaaatacccactaaatacgaaatatccgaaccctctaaaatactaaaaataaaaacgcgaaaaatcgcttatccgctaaaatccgcgaccaaaac

SEQ ID NO: 27135 - DNA, 673 bp, Artificial Sequence
  chemically treated genomic DNA (Homo sapiens) CpG-island No: 27135
gggggaggagaggagatgtgtaatgcgattgtttataatttgaaatcggattttattatttagcgttttagaaaacgcggggtttattgttttggtttttttcgttttttttcgtttttcgaatttttcggttggtttttttgcggttttcgtttcggcgttgatgtggtttggtagtggagattggcgttcgggcggagtacgatgggttttttcgcggtaggtaggtaggttgttgttgtaggtgggtttcggcgttcgcgtcgtttcgcgttttcggcggtcgtttcgtttttgttcgttcgtttcgtttcgttcgtattggcgttgtttgttgtttgttttcgcgcggtggggagggggcgtattcggcggcgggttttgtagagggcgttttgtttcgggtgcgatcgcggttttttggaggtttgggcggcgggtttcgcgagcgcgtcgttatttcgggagtagtgttggttaaggatttcgacgttttacgtaagtaaaggtagggcggggagtttgcgggggaggagggtcgggggtaatgttcggttcgcggatcgcggagtgggtaagaggtgtttattggatacggggtattcgagttttttgaggtgttgggagtaagaacgcgggaggtcgtttgttcgttggaattcgcggttagggt

SEQ ID NO: 27136 - DNA, 673 bp, Artificial Sequence
  chemically treated genomic DNA (Homo sapiens) CpG-island No: 27136
accctaaccgcgaattccaacgaacaaacgacctcccgcgttcttactcccaacacctcaaaaaactcgaataccccgtatccaataaacacctcttacccactccgcgatccgcgaaccgaacattacccccgaccctcctcccccgcaaactccccgccctacctttacttacgtaaaacgtcgaaatccttaaccaacactactcccgaaataacgacgcgctcgcgaaacccgccgcccaaacctccaaaaaaccgcgatcgcacccgaaacaaaacgccctctacaaaacccgccgccgaatacgccccctccccaccgcgcgaaaacaaacaacaaacaacgccaatacgaacgaaacgaaacgaacgaacaaaaacgaaacgaccgccgaaaacgcgaaacgacgcgaacgccgaaacccacctacaacaacaacctacctacctaccgcgaaaaaacccatcgtactccgcccgaacgccaatctccactaccaaaccacatcaacgccgaaacgaaaaccgcaaaaaaaccaaccgaaaaattcgaaaaacgaaaaaaaacgaaaaaaaccaaaacaataaaccccgcgttttctaaaacgctaaataataaaatccgatttcaaattataaacaatcgcattacacatctcctctcctccccc

SEQ ID NO: 27137 - DNA, 521 bp, Artificial Sequence
  chemically treated genomic DNA (Homo sapiens) CpG-island No: 27137
ggcgtatgcgtagttcggaaggattcgagttttttaattaatcgagagttaataggtcggggattgcgggacggaagagggaggggaagatgaagaaaatcggtgatgaatggttggcggaaatgattggcggaaagaaagagttagtttatagtgcgtttttgtattcggcgggaaattcggtcgaagagggagttggaaaggatttcggaattcggtcgtaattttagttaattagggagtagagttgcggggcggggttggggcggggtagtttcgcgggagatagtttcgcgggttcgggaggcgagttttcggttttcgtttagtttttggggacgcggtggcggggtttgaatcgtttggtttttagggagttttgggcgggttttcgtacgggagcgtggtaggcgttggattcgatagtagatgtggaattggagagtttggcgcgtttttatattttgttatatatttacgttattagattggggtcgggttttttcgcgttttgttttgga

SEQ ID NO: 27138 - DNA, 521 bp, Artificial Sequence
  chemically treated genomic DNA (Homo sapiens) CpG-island No: 27138
tccaaaacaaaacgcgaaaaaacccgaccccaatctaataacgtaaatatataacaaaatataaaaacgcgccaaactctccaattccacatctactatcgaatccaacgcctaccacgctcccgtacgaaaacccgcccaaaactccctaaaaaccaaacgattcaaaccccgccaccgcgtccccaaaaactaaacgaaaaccgaaaactcgcctcccgaacccgcgaaactatctcccgcgaaactaccccgccccaaccccgccccgcaactctactccctaattaactaaaattacgaccgaattccgaaatcctttccaactccctcttcgaccgaatttcccgccgaatacaaaaacgcactataaactaactctttctttccgccaatcatttccgccaaccattcatcaccgattttcttcatcttcccctccctcttccgtcccgcaatccccgacctattaactctcgattaattaaaaaactcgaatccttccgaactacgcatacgcc

SEQ ID NO: 27139 - DNA, 521 bp, Artificial Sequence
  chemically treated genomic DNA (Homo sapiens) CpG-island No: 27139
tttagagtagaacgcggaggggttcgattttagtttggtggcgtaggtgtgtgataaagtatgagggcgcgttaagttttttagttttatatttgttgtcgagtttagcgtttgttacgttttcgtgcggggattcgtttaaaattttttggaagttaggcgatttagatttcgttatcgcgtttttagagattgggcggaaatcggagattcgtttttcgaattcgcgaaattatttttcgcgagattgtttcgttttaatttcgtttcgtaattttattttttgattggttggaattacggtcggatttcggagttttttttagtttttttttcggtcgggtttttcgtcgaatataaaggcgtattgtgaattggtttttttttttcgttaattattttcgttagttatttattatcgattttttttatttttttttttttttttcgtttcgtagttttcgatttgttagttttcggttagttaagggattcgggttttttcgaattgcgtatgcgtt

SEQ ID NO: 27140 - DNA, 521 bp, Artificial Sequence
  chemically treated genomic DNA (Homo sapiens) CpG-island No: 27140
aacgcatacgcaattcgaaaaaacccgaatcccttaactaaccgaaaactaacaaatcgaaaactacgaaacgaaaaaaaaaaaaaaaaataaaaaaaatcgataataaataactaacgaaaataattaacgaaaaaaaaaaaccaattcacaatacgcctttatattcgacgaaaaacccgaccgaaaaaaaaactaaaaaaaactccgaaatccgaccgtaattccaaccaatcaaaaaataaaattacgaaacgaaattaaaacgaaacaatctcgcgaaaaataatttcgcgaattcgaaaaacgaatctccgatttccgcccaatctctaaaaacgcgataacgaaatctaaatcgcctaacttccaaaaaattttaaacgaatccccgcacgaaaacgtaacaaacgctaaactcgacaacaaatataaaactaaaaaacttaacgcgccctcatactttatcacacacctacgccaccaaactaaaatcgaacccctccgcgttctactctaaa

SEQ ID NO: 27141 - DNA, 821 bp, Artificial Sequence
  chemically treated genomic DNA (Homo sapiens) CpG-island No: 27141
agtcgaattcggtgtttttgttcgtttggggtttcgttagcgcgtcgtaagtttttttagaaatttaaattttgtaggtcgtatttttaattcgtattttatttaggttttcgtttggcgtcgatttgttttagtttaattttcggtttcgtagattaggtatttttcgggacgcggggtagattttgcgttcgggttttttttcgtagtcgggttgttcggtttttgcgcgcgtataataggcggtacggcgtagttttcgggagcgcgggattcgggtgttagtttcggcgtttagttatagcgatatagatttgggtgtcggggttcgttagggagttttgtgattcggggattttcgcgatgtagagaattagggatcgcgtacggagtttaggcgcgtagtttgtagttaggattagtttttcgttttcgtcgttgaagtcgtttcgagttttacgtttttttcgttgtcgggttcggttgttttagggtttcgttcgttcgttttagagtgagcgattttcgatttacggagaagcgattttattatcggtgttcgatatttagagttaagggagcgagaagaaggcgaagaaagaggcggagagcggtgtattgttttcgttgggattcgcgatttttagaaattttttcgaaatttagtttcgtcgtcgtttcgtcggtagggggtatagcgggcgttcggggcgcggcggttgagcgatggggcgagcggaaagggtttagacgtttggtttttgtttatatttcggagaaagttttgagtattaggcgttgggttttttggttattttttt

SEQ ID NO: 27142 - DNA, 821 bp, Artificial Sequence
  chemically treated genomic DNA (Homo sapiens) CpG-island No: 27142
aaaaaaataaccaaaaaacccaacgcctaatactcaaaactttctccgaaatataaacaaaaaccaaacgtctaaaccctttccgctcgccccatcgctcaaccgccgcgccccgaacgcccgctataccccctaccgacgaaacgacgacgaaactaaatttcgaaaaaatttctaaaaatcgcgaatcccaacgaaaacaatacaccgctctccgcctctttcttcgccttcttctcgctcccttaactctaaatatcgaacaccgataataaaatcgcttctccgtaaatcgaaaatcgctcactctaaaacgaacgaacgaaaccctaaaacaaccgaacccgacaacgaaaaaaacgtaaaactcgaaacgacttcaacgacgaaaacgaaaaactaatcctaactacaaactacgcgcctaaactccgtacgcgatccctaattctctacatcgcgaaaatccccgaatcacaaaactccctaacgaaccccgacacccaaatctatatcgctataactaaacgccgaaactaacacccgaatcccgcgctcccgaaaactacgccgtaccgcctattatacgcgcgcaaaaaccgaacaacccgactacgaaaaaaaacccgaacgcaaaatctaccccgcgtcccgaaaaatacctaatctacgaaaccgaaaattaaactaaaacaaatcgacgccaaacgaaaacctaaataaaatacgaattaaaaatacgacctacaaaatttaaatttctaaaaaaacttacgacgcgctaacgaaaccccaaacgaacaaaaacaccgaattcgact

SEQ ID NO: 27143 - DNA, 821 bp, Artificial Sequence
  chemically treated genomic DNA (Homo sapiens) CpG-island No: 27143
agaggggtgattagagagtttaacgtttggtgtttaagatttttttcgaggtatgaataagaattaggcgtttgggtttttttcgttcgttttatcgtttagtcgtcgcgtttcggacgttcgttgtgttttttgtcggcggggcggcggcgggattgggtttcgggagggtttttggaagtcgcgagttttagcgaaggtagtgtatcgtttttcgttttttttttcgtttttttttcgtttttttagttttgggtgtcgggtatcggtggtaaggtcgttttttcgtgagtcggaggtcgtttattttgggacgggcggacgaggttttagggtagtcgagttcggtagcgggggaggcgtggagttcggggcggttttagcggcgggggcgggaggttggttttggttgtagattgcgcgtttgggtttcgtgcgcggtttttggttttttgtatcgcggaggttttcggattatagggttttttggcgggtttcggtatttaggtttgtgtcgttgtggttgggcgtcgggattagtattcgagtttcgcgttttcgggggttgcgtcgtgtcgtttgttgtgcgcgcgtagaggtcggatagttcggttgcgggaagggattcgagcgtagggtttgtttcgcgtttcggaaagtgtttagtttgcggagtcggaggttgagttggggtagatcggcgttagacgggggtttgggtgagatacgagttgggggtgcggtttgtagaatttgggtttttggaggagtttacggcgcgttggcggagttttaggcgaataggagtatcggattcggtt

SEQ ID NO: 27144 - DNA, 821 bp, Artificial Sequence
  chemically treated genomic DNA (Homo sapiens) CpG-island No: 27144
aaccgaatccgatactcctattcgcctaaaactccgccaacgcgccgtaaactcctccaaaaacccaaattctacaaaccgcacccccaactcgtatctcacccaaacccccgtctaacgccgatctaccccaactcaacctccgactccgcaaactaaacactttccgaaacgcgaaacaaaccctacgctcgaatcccttcccgcaaccgaactatccgacctctacgcgcgcacaacaaacgacacgacgcaacccccgaaaacgcgaaactcgaatactaatcccgacgcccaaccacaacgacacaaacctaaataccgaaacccgccaaaaaaccctataatccgaaaacctccgcgatacaaaaaaccaaaaaccgcgcacgaaacccaaacgcgcaatctacaaccaaaaccaacctcccgcccccgccgctaaaaccgccccgaactccacgcctcccccgctaccgaactcgactaccctaaaacctcgtccgcccgtcccaaaataaacgacctccgactcacgaaaaaacgaccttaccaccgatacccgacacccaaaactaaaaaaacgaaaaaaaaacgaaaaaaaaaacgaaaaacgatacactaccttcgctaaaactcgcgacttccaaaaaccctcccgaaacccaatcccgccgccgccccgccgacaaaaaacacaacgaacgtccgaaacgcgacgactaaacgataaaacgaacgaaaaaaacccaaacgcctaattcttattcatacctcgaaaaaaatcttaaacaccaaacgttaaactctctaatcacccctct

SEQ ID NO: 27145 - DNA, 674 bp, Artificial Sequence
  chemically treated genomic DNA (Homo sapiens) CpG-island No: 27145
tcgcgttcgtttcgttttttatttacgtttttcgattcgattcgttttttcgaattttcgttttttgagatttcgttttcgattcgttttaattggtcgcggcggtagtcgagtcgcgggagttgcgcgttgagttcgcggtagtacggggagcgttcgttcgtttcgttttggatttaattaagcgtttcgcggaggggtgcggttatttgggggtaggagaaagcggagtacgttatttttttagggatttaggaagcgaggcgagttttaggtggacgcggtggtgtggattacggcgattagggtttttttttttgttgtggagacggaggtgcgaggggacgtcggcggttttttattttttggtcgagtggtttttttcgttttcggttggattttttcggggcgttttttttagagtcgagtcgggttggtcgggggcggttgtttggtttgagtgtcgttttattaaagcggaacgtcggaggggaggttatttcgagagaaggcggttttcggcggaggtggtttcgtgaattttgtagttttttgttcgttcgttattcgagacgtcgcgtttcgtgggttttacgttggatggagggggcgtcgtcgaggatgtttagtttttttttttaattttatttttttagttttttaggtagatatag

SEQ ID NO: 27146 - DNA, 674 bp, Artificial Sequence
  chemically treated genomic DNA (Homo sapiens) CpG-island No: 27146
ctatatctacctaaaaaactaaaaaaataaaattaaaaaaaaaaactaaacatcctcgacgacgccccctccatccaacgtaaaacccacgaaacgcgacgtctcgaataacgaacgaacaaaaaactacaaaattcacgaaaccacctccgccgaaaaccgccttctctcgaaataacctcccctccgacgttccgctttaataaaacgacactcaaaccaaacaaccgcccccgaccaacccgactcgactctaaaaaaaacgccccgaaaaaatccaaccgaaaacgaaaaaaaccactcgaccaaaaaataaaaaaccgccgacgtcccctcgcacctccgtctccacaacaaaaaaaaaaaccctaatcgccgtaatccacaccaccgcgtccacctaaaactcgcctcgcttcctaaatccctaaaaaaataacgtactccgctttctcctacccccaaataaccgcacccctccgcgaaacgcttaattaaatccaaaacgaaacgaacgaacgctccccgtactaccgcgaactcaacgcgcaactcccgcgactcgactaccgccgcgaccaattaaaacgaatcgaaaacgaaatctcaaaaaacgaaaattcgaaaaaacgaatcgaatcgaaaaacgtaaataaaaaacgaaacgaacgcga

SEQ ID NO: 27147 - DNA, 674 bp, Artificial Sequence
  chemically treated genomic DNA (Homo sapiens) CpG-island No: 27147
ttgtgtttatttgaggaattggagaggtagaattagagggggaggttgggtattttcggcggcgttttttttatttagcgtgaaatttacgaggcgcggcgtttcgagtggcgggcgggtagggggttgtaggatttacgaagttattttcgtcggggatcgttttttttcggagtggtttttttttcggcgtttcgttttagtaagacgatatttaggttaaatagtcgttttcggttagttcgattcggttttggagggagcgtttcgagggagtttagtcggaggcggagaaggttattcggttagaaggtggggagtcgtcggcgttttttcgtattttcgtttttatagtagggggaaaggttttgatcgtcgtggtttatattatcgcgtttatttgaggttcgtttcgttttttgggtttttagaggggtggcgtatttcgtttttttttgtttttaagtggtcgtattttttcgcgggacgtttggttgggtttagggcggggcgggcgggcgtttttcgtattgtcgcgagtttagcgcgtagttttcgcggttcggttgtcgtcgcggttagttggggcgggtcgggggcggggttttagggggcggggattcgggggggcgggtcgggtcgggaggcgtgggtggggggcggggcggacgcgg

SEQ ID NO: 27148 - DNA, 674 bp, Artificial Sequence
  chemically treated genomic DNA (Homo sapiens) CpG-island No: 27148
ccgcgtccgccccgccccccacccacgcctcccgacccgacccgcccccccgaatccccgccccctaaaaccccgcccccgacccgccccaactaaccgcgacgacaaccgaaccgcgaaaactacgcgctaaactcgcgacaatacgaaaaacgcccgcccgccccgccctaaacccaaccaaacgtcccgcgaaaaaatacgaccacttaaaaacaaaaaaaaacgaaatacgccacccctctaaaaacccaaaaaacgaaacgaacctcaaataaacgcgataatataaaccacgacgatcaaaacctttccccctactataaaaacgaaaatacgaaaaaacgccgacgactccccaccttctaaccgaataaccttctccgcctccgactaaactccctcgaaacgctccctccaaaaccgaatcgaactaaccgaaaacgactatttaacctaaatatcgtcttactaaaacgaaacgccgaaaaaaaaaccactccgaaaaaaaacgatccccgacgaaaataacttcgtaaatcctacaaccccctacccgcccgccactcgaaacgccgcgcctcgtaaatttcacgctaaataaaaaaaacgccgccgaaaatacccaacctccccctctaattctacctctccaattcctcaaataaacacaa

SEQ ID NO: 27149 - DNA, 841 bp, Artificial Sequence
  chemically treated genomic DNA (Homo sapiens) CpG-island No: 27149
taggcgttcgtggcggggtcgatttcgggttgcgggaggtagaggggtcggaggggatagcgggtcgggtcggcgagcgggcgagtaaggagttaagtcgggcggtagggcgagcgtttgttagacgcgagtatgtgtagtttgtagcgtattcgtattatgggtgagtgtcgtcgtcgtcgtcgtcgtcgtcgtcgtcgggggttttttttttttcgggtagcggcggttgtagtttttcggatttcgcgtcgtcgcggcggacgtcgatatataatgcgggattaggcgcggcgcgggagtgttaggcggcgtgggggaggtacggttcgtaattcggcgcggggggagttagagcgtcgggtttgggggcggggagtaggcggtgtaggagagcgtttcgagtttcggcgcgggaggaggagcgggagttagttttggagacggcgtttttagtcgtatttgcgtttggtaggcggtcggttttgtttagtttttatttacggtttcggtttcgtatcggtaggtgttttttatgttcgtagagaggttttttcgtcgtttagagaggtggtcgcgaggggtcggtagtttcgatcgcggagggcgcgggcgatggggacggtgaggggaagattgggcgatcggatttggggttgtagtagatttcgttttttttttgttttcggtttcgaggttgttgtttcggttcgagatttagtcgtagattagataggtggtgcgttcggggtttggattttttgcgggggatgggcgtataggggggcgtgttggggaagggggtgcgcgttggtaattttttttgtttgaaataaagggg

SEQ ID NO: 27150 - DNA, 841 bp, Artificial Sequence
  chemically treated genomic DNA (Homo sapiens) CpG-island No: 27150
cccctttatttcaaacaaaaaaaattaccaacgcgcacccccttccccaacacgcccccctatacgcccatcccccgcaaaaaatccaaaccccgaacgcaccacctatctaatctacgactaaatctcgaaccgaaacaacaacctcgaaaccgaaaacaaaaaaaaaacgaaatctactacaaccccaaatccgatcgcccaatcttcccctcaccgtccccatcgcccgcgccctccgcgatcgaaactaccgacccctcgcgaccacctctctaaacgacgaaaaaacctctctacgaacataaaaaacacctaccgatacgaaaccgaaaccgtaaataaaaactaaacaaaaccgaccgcctaccaaacgcaaatacgactaaaaacgccgtctccaaaactaactcccgctcctcctcccgcgccgaaactcgaaacgctctcctacaccgcctactccccgcccccaaacccgacgctctaactccccccgcgccgaattacgaaccgtacctcccccacgccgcctaacactcccgcgccgcgcctaatcccgcattatatatcgacgtccgccgcgacgacgcgaaatccgaaaaactacaaccgccgctacccgaaaaaaaaaaaacccccgacgacgacgacgacgacgacgacgacgacactcacccataatacgaatacgctacaaactacacatactcgcgtctaacaaacgctcgccctaccgcccgacttaactccttactcgcccgctcgccgacccgacccgctatcccctccgacccctctacctcccgcaacccgaaatcgaccccgccacgaacgccta

SEQ ID NO: 27151 - DNA, 841 bp, Artificial Sequence
  chemically treated genomic DNA (Homo sapiens) CpG-island No: 27151
tttttttgttttaggtagggaaagttgttaacgcgtatttttttttttaatacgtttttttgtgcgtttatttttcgtagggaatttaagtttcgggcgtattatttatttaatttgcggttggatttcgaatcggggtagtagtttcgaaatcgaaagtaaagaggaagcgggatttgttatagttttaagttcggtcgtttagttttttttttatcgtttttatcgttcgcgtttttcgcggtcggagttgtcggtttttcgcggttatttttttgggcggcggaaaggtttttttgcgggtatagggggtatttatcggtgcggggtcggggtcgtgggtaggggttgggtagagtcggtcgtttgttaggcgtaggtgcggttaggagcgtcgtttttagggttggttttcgttttttttttcgcgtcgggattcggggcgtttttttgtatcgtttgtttttcgtttttaagttcggcgttttggtttttttcgcgtcgagttgcgggtcgtgttttttttacgtcgtttggtattttcgcgtcgcgtttagtttcgtattgtgtgtcggcgttcgtcgcggcggcgcggggttcggggggttgtagtcgtcgttgttcgggaggaaaggagttttcggcggcggcggcggcggcggcggcggcggtatttatttatagtacggatgcgttgtaaattgtatatgttcgcgtttgataggcgttcgttttgtcgttcggtttaattttttgttcgttcgttcgtcggttcggttcgttgtttttttcgatttttttgtttttcgtagttcggggtcggtttcgttacgggcgttta

SEQ ID NO: 27152 - DNA, 841 bp, Artificial Sequence
  chemically treated genomic DNA (Homo sapiens) CpG-island No: 27152
taaacgcccgtaacgaaaccgaccccgaactacgaaaaacaaaaaaatcgaaaaaaacaacgaaccgaaccgacgaacgaacgaacaaaaaattaaaccgaacgacaaaacgaacgcctatcaaacgcgaacatatacaatttacaacgcatccgtactataaataaataccgccgccgccgccgccgccgccgccgccgaaaactcctttcctcccgaacaacgacgactacaaccccccgaaccccgcgccgccgcgacgaacgccgacacacaatacgaaactaaacgcgacgcgaaaataccaaacgacgtaaaaaaaacacgacccgcaactcgacgcgaaaaaaaccaaaacgccgaacttaaaaacgaaaaacaaacgatacaaaaaaacgccccgaatcccgacgcgaaaaaaaaaacgaaaaccaaccctaaaaacgacgctcctaaccgcacctacgcctaacaaacgaccgactctacccaacccctacccacgaccccgaccccgcaccgataaataccccctatacccgcaaaaaaacctttccgccgcccaaaaaaataaccgcgaaaaaccgacaactccgaccgcgaaaaacgcgaacgataaaaacgataaaaaaaaaactaaacgaccgaacttaaaactataacaaatcccgcttcctctttactttcgatttcgaaactactaccccgattcgaaatccaaccgcaaattaaataaataatacgcccgaaacttaaattccctacgaaaaataaacgcacaaaaaaacgtattaaaaaaaaaaatacgcgttaacaactttccctacctaaaacaaaaaaa

SEQ ID NO: 27153 - DNA, 545 bp, Artificial Sequence
  chemically treated genomic DNA (Homo sapiens) CpG-island No: 27153
tcgcggcgcgagttttttggggcgttcggttttttaagttagattcgcgttttagcgtttttcgtcgttgggagttcgtttttaggtagggaggtatttgtttcggatcgttttttgggttcgaggggtcgtttttcgcgcgtagtttgacgtttttcgtcgcggcgtagttttagtttattatagcggcgggagcgcgggtcgtttatttttagcgagttcgcggtcgttttcgtcgcgtattgggtatacgggcgttttcgggtcgtcgtcgtagtcgattttgcgtcgttttcgtcggagtttcgggttgtcgtcggttttttttttttcggtagtaggggtcgtgggttgcggggcggggcgaggttggagcgggaggggtgttcgcgggttcgttgtataaagttcggtcgagttttgttgcgttttatttaacgtttcgtcgggcgttttttttttttcggtttttcgttcgttttttaaaggtagagcgttgggtttagttttttaggtagttcgcggagaggtataggaaatgattt

SEQ ID NO: 27154 - DNA, 545 bp, Artificial Sequence
  chemically treated genomic DNA (Homo sapiens) CpG-island No: 27154
aaatcatttcctatacctctccgcgaactacctaaaaaactaaacccaacgctctacctttaaaaaacgaacgaaaaaccgaaaaaaaaaaaacgcccgacgaaacgttaaataaaacgcaacaaaactcgaccgaactttatacaacgaacccgcgaacacccctcccgctccaacctcgccccgccccgcaacccacgacccctactaccgaaaaaaaaaaaaccgacgacaacccgaaactccgacgaaaacgacgcaaaatcgactacgacgacgacccgaaaacgcccgtatacccaatacgcgacgaaaacgaccgcgaactcgctaaaaataaacgacccgcgctcccgccgctataataaactaaaactacgccgcgacgaaaaacgtcaaactacgcgcgaaaaacgacccctcgaacccaaaaaacgatccgaaacaaatacctccctacctaaaaacgaactcccaacgacgaaaaacgctaaaacgcgaatctaacttaaaaaaccgaacgccccaaaaaactcgcgccgcga

SEQ ID NO: 27155 - DNA, 545 bp, Artificial Sequence
  chemically treated genomic DNA (Homo sapiens) CpG-island No: 27155
aggttattttttgtgttttttcgcgagttgtttggagagttgagtttagcgttttgtttttaaggagcgggcggggagtcgaggggaggagggcgttcggcggagcgttgaatggggcgtagtaaggttcggtcgggttttgtgtagcgagttcgcgggtatttttttcgttttagtttcgtttcgtttcgtagtttacgatttttgttgtcggggaggggagaatcggcggtagttcgggatttcggcgagagcgacgtaaggtcggttgcggcggcggttcgagggcgttcgtgtgtttagtgcgcggcggggacggtcgcgagttcgttggaggtgagcgattcgcgttttcgtcgttgtggtgggttggggttgcgtcgcggcggagggcgttaggttgcgcgcgggggacggtttttcgggtttagaggacgattcggagtaggtgtttttttatttggaagcgagtttttagcggcggggagcgttggagcgcgggtttggtttgggaagtcgggcgttttaggggattcgcgtcgcga

SEQ ID NO: 27156 - DNA, 545 bp, Artificial Sequence
  chemically treated genomic DNA (Homo sapiens) CpG-island No: 27156
tcgcgacgcgaatcccctaaaacgcccgacttcccaaaccaaacccgcgctccaacgctccccgccgctaaaaactcgcttccaaataaaaaaacacctactccgaatcgtcctctaaacccgaaaaaccgtcccccgcgcgcaacctaacgccctccgccgcgacgcaaccccaacccaccacaacgacgaaaacgcgaatcgctcacctccaacgaactcgcgaccgtccccgccgcgcactaaacacacgaacgccctcgaaccgccgccgcaaccgaccttacgtcgctctcgccgaaatcccgaactaccgccgattctcccctccccgacaacaaaaatcgtaaactacgaaacgaaacgaaactaaaacgaaaaaaatacccgcgaactcgctacacaaaacccgaccgaaccttactacgccccattcaacgctccgccgaacgccctcctcccctcgactccccgcccgctccttaaaaacaaaacgctaaactcaactctccaaacaactcgcgaaaaaacacaaaaaataacct

SEQ ID NO: 27157 - DNA, 634 bp, Artificial Sequence
  chemically treated genomic DNA (Homo sapiens) CpG-island No: 27157
gcgggttcgcggatcgttttttgcgtttagcggttttgggggaaatttttttgggcggtcgtacgtttttttagacgttaagttcggttcgggtcgtaggggttatttcgggcgtcggttgtgcgttcggattttagggttcgcgttttcgtttcggggtggggtaagggcggtgcggaaagcgttagtgtttaggaaggttttaggcgtcgtagttcggaggggtcgtatagcgttagtggttgttttgcgtttcgcgcgcgttagtagttttgtttgttttagttcggtgggtggagtgagttgcgtattcgttcgggagcgcgtttttatagttcggatcggatcgagtggagacgcgagtgggatttttattgttacgtttttttgtatttttttttatttatcgttcgattgatacgatcgttgttttattttcgggagagagtattattagcgtatagtttagaagttgggtacgtgtttagttcggagttgttgcgcgaggggtggacgaggagatcgggagacgaaggcgcggggaagggtatcggtatgagatgagggggaatgataggtgggttagtgagttttagttgcgttttttagtagggggatagatgtagagttcgcg

SEQ ID NO: 27158 - DNA, 634 bp, Artificial Sequence
  chemically treated genomic DNA (Homo sapiens) CpG-island No: 27158
cgcgaactctacatctatccccctactaaaaaacgcaactaaaactcactaacccacctatcattccccctcatctcataccgatacccttccccgcgccttcgtctcccgatctcctcgtccacccctcgcgcaacaactccgaactaaacacgtacccaacttctaaactatacgctaataatactctctcccgaaaataaaacaacgatcgtatcaatcgaacgataaataaaaaaaaatacaaaaaaacgtaacaataaaaatcccactcgcgtctccactcgatccgatccgaactataaaaacgcgctcccgaacgaatacgcaactcactccacccaccgaactaaaacaaacaaaactactaacgcgcgcgaaacgcaaaacaaccactaacgctatacgacccctccgaactacgacgcctaaaaccttcctaaacactaacgctttccgcaccgcccttaccccaccccgaaacgaaaacgcgaaccctaaaatccgaacgcacaaccgacgcccgaaataacccctacgacccgaaccgaacttaacgtctaaaaaaacgtacgaccgcccaaaaaaatttcccccaaaaccgctaaacgcaaaaaacgatccgcgaacccgc

SEQ ID NO: 27159 - DNA, 634 bp, Artificial Sequence
  chemically treated genomic DNA (Homo sapiens) CpG-island No: 27159
cgcgggttttgtatttgtttttttgttggggagcgtaattggaatttattaatttatttgttatttttttttattttatatcgatattttttttcgcgttttcgtttttcggttttttcgtttatttttcgcgtagtagtttcgggttgaatacgtatttaatttttgggttgtgcgttggtggtgttttttttcggagatgaggtagcgatcgtgttaatcgggcggtggatggagagaggtgtaaaagagcgtggtagtggaggttttattcgcgtttttattcggttcgattcgggttgtggggacgcgttttcgggcgagtgcgtagtttattttatttatcgagttgaagtaggtaggattgttggcgcgcgcgggacgtagagtagttattgacgttgtacggttttttcgggttgcggcgtttgaaatttttttgaatattggcgtttttcgtatcgtttttattttatttcggagcgggagcgcgagttttgaagttcgagcgtatagtcggcgttcggaatggtttttgcgattcgggtcgggtttggcgtttgggggagcgtgcggtcgtttaggggagttttttttaggatcgttgagcgtaggaggcgattcgcgagttcgt

SEQ ID NO: 27160 - DNA, 634 bp, Artificial Sequence
  chemically treated genomic DNA (Homo sapiens) CpG-island No: 27160
acgaactcgcgaatcgcctcctacgctcaacgatcctaaaaaaaactcccctaaacgaccgcacgctcccccaaacgccaaacccgacccgaatcgcaaaaaccattccgaacgccgactatacgctcgaacttcaaaactcgcgctcccgctccgaaataaaataaaaacgatacgaaaaacgccaatattcaaaaaaatttcaaacgccgcaacccgaaaaaaccgtacaacgtcaataactactctacgtcccgcgcgcgccaacaatcctacctacttcaactcgataaataaaataaactacgcactcgcccgaaaacgcgtccccacaacccgaatcgaaccgaataaaaacgcgaataaaacctccactaccacgctcttttacacctctctccatccaccgcccgattaacacgatcgctacctcatctccgaaaaaaaacaccaccaacgcacaacccaaaaattaaatacgtattcaacccgaaactactacgcgaaaaataaacgaaaaaaccgaaaaacgaaaacgcgaaaaaaaatatcgatataaaataaaaaaaaataacaaataaattaataaattccaattacgctccccaacaaaaaaacaaatacaaaacccgcg

SEQ ID NO: 27161 - DNA, 550 bp, Artificial Sequence
  chemically treated genomic DNA (Homo sapiens) CpG-island No: 27161
cgtttcgggagtcgcgttcgcgttagtagttcggattcgggattcgagcgggagacgtcgagatgtgagttttcgattggttattgttttttttggtattttttttttttattttatcggttcgattggatagcgatcgtttgtttcgattttcggggagaggagtaattattaggcgtatagtttagaagttgggttacgttgtttagttcggagttcgttgcgcgagggggtggacgaggagatcgggagacgaaggcgcggggaaggggtttcggtttgagttgagggggattgggagggtgggggtttgagggttcgcgggcgcgttttagtagggggagagatgtagagttcgcgtttaggcgtcggtcgtcgcggtagtagttttagtagtagttttagtattagtatcggcggatattatagtggggcgcgagcggattggtttcgcgatttgatttttatttttttcgtacgtatagtttgcgaggcggcggggacgtatataatattgttgtttttttatattttatcggtggttgaaaag

SEQ ID NO: 27162 - DNA, 550 bp, Artificial Sequence
  chemically treated genomic DNA (Homo sapiens) CpG-island No: 27162
cttttcaaccaccgataaaatataaaaaaacaacaatattatatacgtccccgccgcctcgcaaactatacgtacgaaaaaaataaaaatcaaatcgcgaaaccaatccgctcgcgccccactataatatccgccgatactaatactaaaactactactaaaactactaccgcgacgaccgacgcctaaacgcgaactctacatctctccccctactaaaacgcgcccgcgaaccctcaaacccccaccctcccaatccccctcaactcaaaccgaaaccccttccccgcgccttcgtctcccgatctcctcgtccaccccctcgcgcaacgaactccgaactaaacaacgtaacccaacttctaaactatacgcctaataattactcctctccccgaaaatcgaaacaaacgatcgctatccaatcgaaccgataaaataaaaaaaaaaaataccaaaaaaaacaataaccaatcgaaaactcacatctcgacgtctcccgctcgaatcccgaatccgaactactaacgcgaacgcgactcccgaaacg

SEQ ID NO: 27163 - DNA, 550 bp, Artificial Sequence
  chemically treated genomic DNA (Homo sapiens) CpG-island No: 27163
ttttttagttatcgatgaaatatggagagatagtagtattgtgtacgttttcgtcgtttcgtaagttgtgcgtgcgaaagggatgggaattaagtcgcgggattagttcgttcgcgttttattgtggtgttcgtcggtgttgatgttgaggttgttgttgaggttgttatcgcggcggtcggcgtttgggcgcgggttttgtatttttttttttgttggggcgcgttcgcgggtttttaagtttttatttttttaattttttttagtttagatcgagatttttttttcgcgttttcgtttttcggttttttcgtttattttttcgcgtagcgagtttcgggttgaatagcgtagtttaatttttgggttgtgcgtttggtggttgttttttttttcggagatcgaggtaagcgatcgttgtttaatcgggtcggtggaatgggagaagagggtgttagagagagtagtggttagtcggaggtttatatttcggcgtttttcgttcgggtttcgaattcgggttgttggcgcggacgcggttttcggggcg

SEQ ID NO: 27164 - DNA, 550 bp, Artificial Sequence
  chemically treated genomic DNA (Homo sapiens) CpG-island No: 27164
cgccccgaaaaccgcgtccgcgccaacaacccgaattcgaaacccgaacgaaaaacgccgaaatataaacctccgactaaccactactctctctaacaccctcttctcccattccaccgacccgattaaacaacgatcgcttacctcgatctccgaaaaaaaaaacaaccaccaaacgcacaacccaaaaattaaactacgctattcaacccgaaactcgctacgcgaaaaaataaacgaaaaaaccgaaaaacgaaaacgcgaaaaaaaaatctcgatctaaactaaaaaaaattaaaaaaataaaaacttaaaaacccgcgaacgcgccccaacaaaaaaaaaaatacaaaacccgcgcccaaacgccgaccgccgcgataacaacctcaacaacaacctcaacatcaacaccgacgaacaccacaataaaacgcgaacgaactaatcccgcgacttaattcccatccctttcgcacgcacaacttacgaaacgacgaaaacgtacacaatactactatctctccatatttcatcgataactaaaaaa

SEQ ID NO: 27165 - DNA, 745 bp, Artificial Sequence
  chemically treated genomic DNA (Homo sapiens) CpG-island No: 27165
aaggatcgcgtaagggttaatgatgaaagttggcgattaggtggggcgtttatattcgttttcggttacggtgggcgtcggaggtgagggggcgttattcgggtagtagtgtttcgggtggcgcgcgggagagttgttaggttgacggagaggtcggttcgagtgggggtcgtttcgtcgtcgtcgtcgtcgtcgtcgttgtgatgcggagtcggtgttgcgtcgggcggtggagttagagttcgggcgcgggagtaggagttgtaagattagtattagcggtttcggtatttgtattagttttcgggtttcgcgttgcgtttttcgtttcgtcgtattcggggtcgtcgtttcgcgttttttatggatgttaaggcggtttttaacggggtggttattatcgaggatcggattttgcggattatcggttattatggttattatttaggttattttagttagaaaagtaagacgtcgcgcggttgttttgcgcgaggcggggaagggaggtgggcgcgtaggggtgtcgcggggatgcggacgggcgggcgcgcggtacggatatttgtagttttgcggacgttgttaatatcgtttttttggcggcggggatttttcggggagaaaagtatgttcgttgttttcggtgttgaatcgtgagagggtaaggggttcggttgggtgcgtttaggagtttggaaatagtcgtagttttggggggaggtgcggaggggatttggtgagt

SEQ ID NO: 27166 - DNA, 745 bp, Artificial Sequence
  chemically treated genomic DNA (Homo sapiens) CpG-island No: 27166
actcaccaaatcccctccgcacctccccccaaaactacgactatttccaaactcctaaacgcacccaaccgaaccccttaccctctcacgattcaacaccgaaaacaacgaacatacttttctccccgaaaaatccccgccgccaaaaaaacgatattaacaacgtccgcaaaactacaaatatccgtaccgcgcgcccgcccgtccgcatccccgcgacacccctacgcgcccacctcccttccccgcctcgcgcaaaacaaccgcgcgacgtcttacttttctaactaaaataacctaaataataaccataataaccgataatccgcaaaatccgatcctcgataataaccaccccgttaaaaaccgccttaacatccataaaaaacgcgaaacgacgaccccgaatacgacgaaacgaaaaacgcaacgcgaaacccgaaaactaatacaaataccgaaaccgctaatactaatcttacaactcctactcccgcgcccgaactctaactccaccgcccgacgcaacaccgactccgcatcacaacgacgacgacgacgacgacgacgaaacgacccccactcgaaccgacctctccgtcaacctaacaactctcccgcgcgccacccgaaacactactacccgaataacgccccctcacctccgacgcccaccgtaaccgaaaacgaatataaacgccccacctaatcgccaactttcatcattaacccttacgcgatcctt

SEQ ID NO: 27167 - DNA, 745 bp, Artificial Sequence
  chemically treated genomic DNA (Homo sapiens) CpG-island No: 27167
gtttattaggtttttttcgtatttttttttaaggttacgattgtttttaaatttttgggcgtatttagtcgggttttttgtttttttacggtttagtatcgaggatagcggatatattttttttttcggggggttttcgtcgttaggaaggcggtgttgatagcgttcgtagggttgtaggtgttcgtatcgcgcgttcgttcgttcgtattttcgcggtatttttgcgcgtttatttttttttttcgtttcgcgtagggtagtcgcgcggcgttttatttttttggttggagtaatttggataatagttatagtagtcggtgattcgtaggattcggttttcgatagtggttatttcgttgggggtcgttttgatatttatagagagcgcggggcgacggtttcgagtgcggcggggcggagagcgtagcgcggggttcgggagttggtgtaggtgtcggagtcgttggtgttgattttgtagtttttgttttcgcgttcgggttttgattttatcgttcggcgtagtatcggtttcgtattatagcggcggcggcggcggcggcggcggagcggtttttattcgggtcggttttttcgttagtttggtagttttttcgcgcgttattcggagtattgttgttcgaatagcgtttttttattttcgacgtttatcgtggtcgggggcgggtgtgggcgttttatttggtcgttagtttttattattaatttttgcgcgattttt

SEQ ID NO: 27168 - DNA, 745 bp, Artificial Sequence
  chemically treated genomic DNA (Homo sapiens) CpG-island No: 27168
aaaaatcgcgcaaaaattaataataaaaactaacgaccaaataaaacgcccacacccgcccccgaccacgataaacgtcgaaaataaaaaaacgctattcgaacaacaatactccgaataacgcgcgaaaaaactaccaaactaacgaaaaaaccgacccgaataaaaaccgctccgccgccgccgccgccgccgccgctataatacgaaaccgatactacgccgaacgataaaatcaaaacccgaacgcgaaaacaaaaactacaaaatcaacaccaacgactccgacacctacaccaactcccgaaccccgcgctacgctctccgccccgccgcactcgaaaccgtcgccccgcgctctctataaatatcaaaacgacccccaacgaaataaccactatcgaaaaccgaatcctacgaatcaccgactactataactattatccaaattactccaaccaaaaaaataaaacgccgcgcgactaccctacgcgaaacgaaaaaaaaaaataaacgcgcaaaaataccgcgaaaatacgaacgaacgaacgcgcgatacgaacacctacaaccctacgaacgctatcaacaccgccttcctaacgacgaaaaccccccgaaaaaaaaaatatatccgctatcctcgatactaaaccgtaaaaaaacaaaaaacccgactaaatacgcccaaaaatttaaaaacaatcgtaaccttaaaaaaaaatacgaaaaaaacctaataaac

SEQ ID NO: 27169 - DNA, 789 bp, Artificial Sequence
  chemically treated genomic DNA (Homo sapiens) CpG-island No: 27169
cgtgcggatttgtgtttttcggggaggtttgcggtttaggttcgatttttgcgatttgttttaggtaggtttgtatgtgcgcggcggtcgcgtgttgtatagtgtgagggaacgtgtattaaacgttcgcgggatatttgtgttcgtttagttaagagtgtattcgtgtgcgcgagcggggtttttgggacgtcgtcgtggtcgggggcggttttgcgaggggagggggttatagggattggtcggcgtcggtttcgtgcgtacggaggcgggggcggggggcgggggtcgcgaggggggaggcggtatgaaaagggcggcgcgcgcggcggcggcggtagtttttcggtagcggcggtggagagcgtagcgcgtagttcggtgtagttttggtttttttttcgttgcgcgttcgcgttttttttcgcgttcgtaattagaagtttagtgcggcgttaggagtcggattcgcgttcgtatcgttttcgggatcgcgatttcggtcgtttagagatgatcgcgatcgaagtttttttgcgcgtttttttgtttttgttggttttcggttatagtatttatggtgagtttttcggcggttcggttcgcgttttttttggggaagtttgcgatttttcgtcggtcgttcggtgtttcgtacgtttcgtttcgtgagttttaatttcgttcgtttcgtttagttttaagtttcgcgttgtgtttgtttcgttttatttattacgttcgtatgttaaggttcgttttaggggttttagggcgtaggggatgtgt

SEQ ID NO: 27170 - DNA, 789 bp, Artificial Sequence
  chemically treated genomic DNA (Homo sapiens) CpG-island No: 27170
acacatcccctacgccctaaaacccctaaaacgaaccttaacatacgaacgtaataaataaaacgaaacaaacacaacgcgaaacttaaaactaaacgaaacgaacgaaattaaaactcacgaaacgaaacgtacgaaacaccgaacgaccgacgaaaaatcgcaaacttccccaaaaaaaacgcgaaccgaaccgccgaaaaactcaccataaatactataaccgaaaaccaacaaaaacaaaaaaacgcgcaaaaaaacttcgatcgcgatcatctctaaacgaccgaaatcgcgatcccgaaaacgatacgaacgcgaatccgactcctaacgccgcactaaacttctaattacgaacgcgaaaaaaaacgcgaacgcgcaacgaaaaaaaaaccaaaactacaccgaactacgcgctacgctctccaccgccgctaccgaaaaactaccgccgccgccgcgcgcgccgcccttttcataccgcctcccccctcgcgacccccgccccccgcccccgcctccgtacgcacgaaaccgacgccgaccaatccctataaccccctcccctcgcaaaaccgcccccgaccacgacgacgtcccaaaaaccccgctcgcgcacacgaatacactcttaactaaacgaacacaaatatcccgcgaacgtttaatacacgttccctcacactatacaacacgcgaccgccgcgcacatacaaacctacctaaaacaaatcgcaaaaatcgaacctaaaccgcaaacctccccgaaaaacacaaatccgcacg

SEQ ID NO: 27171 - DNA, 789 bp, Artificial Sequence
  chemically treated genomic DNA (Homo sapiens) CpG-island No: 27171
atatattttttgcgttttgggatttttgggacgggttttggtatgcgagcgtggtgggtagggcgagataggtatagcgcggggtttagggttaggcgggacgggcggagttggggtttacgagacggggcgtgcggggtatcgggcggtcggcggggagtcgtaggtttttttagagggggcgcgagtcgggtcgtcggggaatttattataggtgttgtggtcgaaagttagtaggagtaagaggacgcgtaggagggtttcggtcgcggttatttttgggcggtcggggtcgcggtttcgggagcggtgcgggcgcgggttcggtttttggcgtcgtattgggtttttggttgcggacgcgaaagggggcgcgggcgcgtagcgaggggaaagttagggttgtatcgggttgcgcgttgcgttttttatcgtcgttgtcggggagttgtcgtcgtcgtcgcgcgcgtcgttttttttatatcgttttttttttcgcggttttcgtttttcgttttcgttttcgtgcgtacggggtcggcgtcggttagtttttgtgatttttttttttcgtagggtcgttttcgattacggcggcgttttagaagtttcgttcgcgtatacgggtgtatttttggttagacgggtataggtatttcgcgagcgtttggtatacgtttttttatattgtatagtacgcggtcgtcgcgtatatataggtttgtttaggataagtcgtaggaatcgaatttgggtcgtagattttttcggagagtataaattcgtacg

SEQ ID NO: 27172 - DNA, 789 bp, Artificial Sequence
  chemically treated genomic DNA (Homo sapiens) CpG-island No: 27172
cgtacgaatttatactctccgaaaaaatctacgacccaaattcgattcctacgacttatcctaaacaaacctatatatacgcgacgaccgcgtactatacaatataaaaaaacgtataccaaacgctcgcgaaatacctatacccgtctaaccaaaaatacacccgtatacgcgaacgaaacttctaaaacgccgccgtaatcgaaaacgaccctacgaaaaaaaaaaatcacaaaaactaaccgacgccgaccccgtacgcacgaaaacgaaaacgaaaaacgaaaaccgcgaaaaaaaaaacgatataaaaaaaacgacgcgcgcgacgacgacgacaactccccgacaacgacgataaaaaacgcaacgcgcaacccgatacaaccctaactttcccctcgctacgcgcccgcgccccctttcgcgtccgcaaccaaaaacccaatacgacgccaaaaaccgaacccgcgcccgcaccgctcccgaaaccgcgaccccgaccgcccaaaaataaccgcgaccgaaaccctcctacgcgtcctcttactcctactaactttcgaccacaacacctataataaattccccgacgacccgactcgcgccccctctaaaaaaacctacgactccccgccgaccgcccgataccccgcacgccccgtctcgtaaaccccaactccgcccgtcccgcctaaccctaaaccccgcgctatacctatctcgccctacccaccacgctcgcataccaaaacccgtcccaaaaatcccaaaacgcaaaaaatatat

SEQ ID NO: 27173 - DNA, 723 bp, Artificial Sequence
  chemically treated genomic DNA (Homo sapiens) CpG-island No: 27173
tggacggttaggggtttttggagtttcgcgagagggtacgggttcgcgagaaggatttggatggttcgtgttttcgtcgttaggtttcgttcggtcgttttttagtcgttttcgtttcgttcgcgttttatttttcgaacgtagcggtcggtcgggtcggagtttgggttagagtcggagtttgggtcgcgggattagcgtcgggggttacgttttggcgttgtattttttttttggtcgtttttgtcgggaaggcgggcggcgcgtttagtagttttatattggttatcgttttgtcgatggtgaattagtcgttgatttgttcgatggtgagttttcgtagtatttttaaggtttaggcgtcggtattttttaattgtcgggttttcgcggcgggaataggcgacggcggaagcgtattttggaagtttcgttttcgttcgaggttttttaattagaacgcgtcgcgcgtttttgtgggcgggtttcggttcgggcgcgtgttgttcgcgttgtttggttttcgtgtcgtcggtttcgtttcgtcgcgttaggtttgtcgggagtcgtcgtttcgagcgagtttagggtgagtttttttaggattttaggggaagtttgagcgtcgcggttggttcgggagtttgttttacgggagtttcgtggtaatttttgtgtgtataagaaaatgtttttcggttattttttggtttttttatttag

SEQ ID NO: 27174 - DNA, 723 bp, Artificial Sequence
  chemically treated genomic DNA (Homo sapiens) CpG-island No: 27174
ctaaataaaaaaaccaaaaaataaccgaaaaacattttcttatacacacaaaaattaccacgaaactcccgtaaaacaaactcccgaaccaaccgcgacgctcaaacttcccctaaaatcctaaaaaaactcaccctaaactcgctcgaaacgacgactcccgacaaacctaacgcgacgaaacgaaaccgacgacacgaaaaccaaacaacgcgaacaacacgcgcccgaaccgaaacccgcccacaaaaacgcgcgacgcgttctaattaaaaaacctcgaacgaaaacgaaacttccaaaatacgcttccgccgtcgcctattcccgccgcgaaaacccgacaattaaaaaataccgacgcctaaaccttaaaaatactacgaaaactcaccatcgaacaaatcaacgactaattcaccatcgacaaaacgataaccaatataaaactactaaacgcgccgcccgccttcccgacaaaaacgaccaaaaaaaaaatacaacgccaaaacgtaacccccgacgctaatcccgcgacccaaactccgactctaacccaaactccgacccgaccgaccgctacgttcgaaaaataaaacgcgaacgaaacgaaaacgactaaaaaacgaccgaacgaaacctaacgacgaaaacacgaaccatccaaatccttctcgcgaacccgtaccctctcgcgaaactccaaaaacccctaaccgtcca

SEQ ID NO: 27175 - DNA, 723 bp, Artificial Sequence
  chemically treated genomic DNA (Homo sapiens) CpG-island No: 27175
ttaaatagagaggttagggagtgatcggagggtatttttttgtatatataggggttgttacggaattttcgtgaaatagattttcgggttagtcgcggcgtttaagttttttttgaggttttagaaaggtttattttgggttcgttcggggcggcggttttcggtaggtttagcgcggcggggcggggtcggcggtacgaggattaggtagcgcgggtagtacgcgttcgggtcggagttcgtttataagggcgcgcggcgcgttttgattggaaggtttcgagcgggggcggggtttttagggtgcgttttcgtcgtcgtttgttttcgtcgcggagattcggtagttgggggatgtcgacgtttgggttttgaggatgttgcggaagtttattatcgagtagattaacgattggtttattatcggtaagacggtgattaatgtggagttgttgggcgcgtcgttcgttttttcggtaggggcggttagggaggaggtgtagcgttaggacgtggttttcggcgttggtttcgcggtttaggtttcggttttggtttaagtttcggttcggtcggtcgttgcgttcgaaaggtaggacgcgggcggggcggaggcggttggagggcggtcgggcgaggtttggcgacgagggtacgggttatttagatttttttcgcgagttcgtgttttttcgcggggttttagggatttttgatcgttta

SEQ ID NO: 27176 - DNA, 723 bp, Artificial Sequence
  chemically treated genomic DNA (Homo sapiens) CpG-island No: 27176
taaacgatcaaaaatccctaaaaccccgcgaaaaaacacgaactcgcgaaaaaaatctaaataacccgtaccctcgtcgccaaacctcgcccgaccgccctccaaccgcctccgccccgcccgcgtcctacctttcgaacgcaacgaccgaccgaaccgaaacttaaaccaaaaccgaaacctaaaccgcgaaaccaacgccgaaaaccacgtcctaacgctacacctcctccctaaccgcccctaccgaaaaaacgaacgacgcgcccaacaactccacattaatcaccgtcttaccgataataaaccaatcgttaatctactcgataataaacttccgcaacatcctcaaaacccaaacgtcgacatcccccaactaccgaatctccgcgacgaaaacaaacgacgacgaaaacgcaccctaaaaaccccgcccccgctcgaaaccttccaatcaaaacgcgccgcgcgcccttataaacgaactccgacccgaacgcgtactacccgcgctacctaatcctcgtaccgccgaccccgccccgccgcgctaaacctaccgaaaaccgccgccccgaacgaacccaaaataaacctttctaaaacctcaaaaaaaacttaaacgccgcgactaacccgaaaatctatttcacgaaaattccgtaacaacccctatatatacaaaaaaataccctccgatcactccctaacctctctatttaa

SEQ ID NO: 27177 - DNA, 1476 bp, Artificial Sequence
  chemically treated genomic DNA (Homo sapiens) CpG-island No: 27177
gcggggttttaggcgggagatcgttcgggcgaaggttaaggttcgggagttggtgcggggggcgcggtttcgagagtcgcggaagacgtcggtgggggagaagtaggtgttagttaagggcgtcgggtcggggttggtttcgagcgcgcggtttcgggttatatgttcgtttcgggggtttttcgcgttttttttattggtttttgggtcgtagttttacggcgcgtcggtagtcgggggttaggtcgcggttagagtgcgggcgcgcgtcgtcgtcgtacggacgttttcggtttatagtcggttttcgggagttcgggttcgagtttcggttttgtcgtgattcgttgcgggattcgggtcggtttttttttgtcgggttttagtttttttatcgttcgcggttttttttagtcggggtttacgtaagggcgggggaggttatcggtgtttattgcgcgttcgtttttttttcgtcgtcgggagcgcggacgtcgacgtatttggtcgtcgttgagagcgagggtagcgggcggagcgcggaagtttcgttttttttttcgttttcgtttttatcgggttaattagagggggttacgggattcgtgcggggcgtcgcgttgggggcggggtttgcgggggttgaagagcgagtcgggcgggcgggtcgtacgtgtcgggttggggttgaggttgaggttgaggttgaggcggcggcggcggcggtcgggtgttcgggatagcgacgtagcgcgtcggcggtcgcgatagggttagcgagagtttcgtagttcgtcgtagttgtcgtttcgtcgcggtcgggtcggagagtacggcggcgggagcgcggttttaggaggcggtcggagcggtgggtatagttcggcgcggagtttttgttaggcggcggtcgagggcgtcgcggatttttttcgcgatgatgtcggtgggtgagggcgggcgggaggtggcggcggtttttttcgcgggtcgttggttaaattttttttttttcgcggtttttagttttcgcgggtcggtgcgaggtcgggcgggcggggaaggaagtggttgggcgggcgcgttcggtcgcggcgttttttaggcgggtaggtgggggcggcgtcgggttgttagcgcggggtcggggtcgtttgcgggttttttttgttcggttttcgcggtcgcggggagaagtagatgtatttggggtcggttattttttcggtttttttaggtgcgcggtcggacgttggggtataggtttggtgggtggcgtagttgtgattcgtttgaaacgaacgttttggggtcgttttgggagtcggcggggtgggtattcgcgttcggagtttttatattttgtaggcgtattttcgtagttttcgcggttgtattgaggaaaggtgtcgagtgtacggatttggagagttattttaggaatttttttttttcgtatttgtaatgttggttcgt

SEQ ID NO: 27178 - DNA, 1476 bp, Artificial Sequence
  chemically treated genomic DNA (Homo sapiens) CpG-island No: 27178
acgaaccaacattacaaatacgaaaaaaaaaaattcctaaaataactctccaaatccgtacactcgacacctttcctcaatacaaccgcgaaaactacgaaaatacgcctacaaaatataaaaactccgaacgcgaatacccaccccgccgactcccaaaacgaccccaaaacgttcgtttcaaacgaatcacaactacgccacccaccaaacctataccccaacgtccgaccgcgcacctaaaaaaaccgaaaaaataaccgaccccaaatacatctacttctccccgcgaccgcgaaaaccgaacaaaaaaaacccgcaaacgaccccgaccccgcgctaacaacccgacgccgcccccacctacccgcctaaaaaacgccgcgaccgaacgcgcccgcccaaccacttccttccccgcccgcccgacctcgcaccgacccgcgaaaactaaaaaccgcgaaaaaaaaaaaatttaaccaacgacccgcgaaaaaaaccgccgccacctcccgcccgccctcacccaccgacatcatcgcgaaaaaaatccgcgacgccctcgaccgccgcctaacaaaaactccgcgccgaactatacccaccgctccgaccgcctcctaaaaccgcgctcccgccgccgtactctccgacccgaccgcgacgaaacgacaactacgacgaactacgaaactctcgctaaccctatcgcgaccgccgacgcgctacgtcgctatcccgaacacccgaccgccgccgccgccgcctcaacctcaacctcaacctcaaccccaacccgacacgtacgacccgcccgcccgactcgctcttcaacccccgcaaaccccgcccccaacgcgacgccccgcacgaatcccgtaaccccctctaattaacccgataaaaacgaaaacgaaaaaaaaaacgaaacttccgcgctccgcccgctaccctcgctctcaacgacgaccaaatacgtcgacgtccgcgctcccgacgacgaaaaaaaaacgaacgcgcaataaacaccgataacctcccccgcccttacgtaaaccccgactaaaaaaaaccgcgaacgataaaaaaactaaaacccgacaaaaaaaaaccgacccgaatcccgcaacgaatcacgacaaaaccgaaactcgaacccgaactcccgaaaaccgactataaaccgaaaacgtccgtacgacgacgacgcgcgcccgcactctaaccgcgacctaacccccgactaccgacgcgccgtaaaactacgacccaaaaaccaataaaaaaaacgcgaaaaacccccgaaacgaacatataacccgaaaccgcgcgctcgaaaccaaccccgacccgacgcccttaactaacacctacttctcccccaccgacgtcttccgcgactctcgaaaccgcgccccccgcaccaactcccgaaccttaaccttcgcccgaacgatctcccgcctaaaaccccgc

SEQ ID NO: 27179 - DNA, 1476 bp, Artificial Sequence
  chemically treated genomic DNA (Homo sapiens) CpG-island No: 27179
acgaattaatattgtagatacgggaaaagggaatttttaagatggttttttaaattcgtgtattcggtatttttttttagtataatcgcgaaggttacgggaatgcgtttgtagagtgtgggaatttcgggcgcgggtgtttatttcgtcgatttttagggcgattttagaacgttcgttttaggcgggttatagttgcgttatttattagatttgtgttttagcgttcgatcgcgtatttgagaggatcgaggagatgatcggttttaaatgtatttgttttttttcgcggtcgcggaggtcgagtaggaagggttcgtaggcggtttcggtttcgcgttgatagttcggcgtcgtttttatttgttcgtttggggggcgtcgcggtcgggcgcgttcgtttagttattttttttttcgttcgttcggtttcgtatcggttcgcgggggttgggagtcgcgggaggaaggaggtttggttagcggttcgcggaggaagtcgtcgttatttttcgttcgtttttatttatcggtattatcgcggggagagttcgcgacgttttcggtcgtcgtttgatagggatttcgcgtcgagttgtgtttatcgtttcggtcgttttttaaggtcgcgttttcgtcgtcgtgtttttcggttcggtcgcggcgaggcggtagttgcggcgggttgcggggttttcgttggttttgtcgcggtcgtcggcgcgttgcgtcgttgtttcgggtattcggtcgtcgtcgtcgtcgttttaattttagttttagttttagttttagttcgatacgtgcggttcgttcgttcggttcgttttttagttttcgtaggtttcgtttttagcgcgacgtttcgtacgggtttcgtagttttttttgattggttcggtgggagcgggggcggggagaggggcggggttttcgcgtttcgttcgttattttcgtttttagcggcggttaggtgcgtcggcgttcgcgttttcggcggcgggggaggggcggacgcgtagtgggtatcggtggtttttttcgtttttgcgtgagtttcgattagggaagatcgcggacggtgggaggattgaggttcgatagggaagggtcggttcgggtttcgtagcggattacggtagggtcgggattcgaattcgggttttcgggggtcgattgtgggtcgggagcgttcgtgcggcgacggcgcgcgttcgtattttgatcgcggtttgattttcggttgtcggcgcgtcgtggggttgcggtttagaggttagtgggaggggcgcggggggttttcggagcgagtatgtgattcgaggtcgcgcgttcggaattagtttcggttcgacgtttttggttggtatttgttttttttttatcggcgtttttcgcggttttcggggtcgcgtttttcgtattagttttcgagttttggttttcgttcgagcgatttttcgtttagaatttcgt

SEQ ID NO: 27180 - DNA, 1476 bp, Artificial Sequence
  chemically treated genomic DNA (Homo sapiens) CpG-island No: 27180
acgaaattctaaacgaaaaatcgctcgaacgaaaaccaaaactcgaaaactaatacgaaaaacgcgaccccgaaaaccgcgaaaaacgccgataaaaaaaaaacaaataccaaccaaaaacgtcgaaccgaaactaattccgaacgcgcgacctcgaatcacatactcgctccgaaaaccccccgcgcccctcccactaacctctaaaccgcaaccccacgacgcgccgacaaccgaaaatcaaaccgcgatcaaaatacgaacgcgcgccgtcgccgcacgaacgctcccgacccacaatcgacccccgaaaacccgaattcgaatcccgaccctaccgtaatccgctacgaaacccgaaccgacccttccctatcgaacctcaatcctcccaccgtccgcgatcttccctaatcgaaactcacgcaaaaacgaaaaaaaccaccgatacccactacgcgtccgcccctcccccgccgccgaaaacgcgaacgccgacgcacctaaccgccgctaaaaacgaaaataacgaacgaaacgcgaaaaccccgcccctctccccgcccccgctcccaccgaaccaatcaaaaaaaactacgaaacccgtacgaaacgtcgcgctaaaaacgaaacctacgaaaactaaaaaacgaaccgaacgaacgaaccgcacgtatcgaactaaaactaaaactaaaactaaaattaaaacgacgacgacgacgaccgaatacccgaaacaacgacgcaacgcgccgacgaccgcgacaaaaccaacgaaaaccccgcaacccgccgcaactaccgcctcgccgcgaccgaaccgaaaaacacgacgacgaaaacgcgaccttaaaaaacgaccgaaacgataaacacaactcgacgcgaaatccctatcaaacgacgaccgaaaacgtcgcgaactctccccgcgataataccgataaataaaaacgaacgaaaaataacgacgacttcctccgcgaaccgctaaccaaacctccttcctcccgcgactcccaacccccgcgaaccgatacgaaaccgaacgaacgaaaaaaaaaataactaaacgaacgcgcccgaccgcgacgccccccaaacgaacaaataaaaacgacgccgaactatcaacgcgaaaccgaaaccgcctacgaacccttcctactcgacctccgcgaccgcgaaaaaaaacaaatacatttaaaaccgatcatctcctcgatcctctcaaatacgcgatcgaacgctaaaacacaaatctaataaataacgcaactataacccgcctaaaacgaacgttctaaaatcgccctaaaaatcgacgaaataaacacccgcgcccgaaattcccacactctacaaacgcattcccgtaaccttcgcgattatactaaaaaaaaataccgaatacacgaatttaaaaaaccatcttaaaaattcccttttcccgtatctacaatattaattcgt

SEQ ID NO: 27181 - DNA, 608 bp, Artificial Sequence
  chemically treated genomic DNA (Homo sapiens) CpG-island No: 27181
  unsure (594..)
tggtacgcgtgcgtacggtgttggtgagcgtgtgtgtgcgtgttcgtttgaggggaatgtgatcgtcgtgtatgcgttcgcgatagtgcggggggtcgtatatcggattcgtgcgtgtgcgtaggggtcgcgtgtggttatgggtatacgggcgtgtacgtacgggggttgcgtatgttatgttggcgtggggggtgcgggcgaggtggtcgcggggaggagcggcgttatattttttcggtttttacgcggtttgcgtggttttttgattcggaaaggcggggacgcggggacgtcggcggcgggggcgcggcgggggcggcgagagcgaggaggttcgcggggcgtcggcggggacggtcggtaggcgggggcgtcggcgcgtttcgttcgttcgcgcgcggcgttgttaaggcgggtcggtcgcgcgggcgttagggttttcgtacgggtcgcgggttttcgggggcgtcggtcgtgggcggcgcgtttcggttttgttttttattttcgttttcggggcgggagggggttcgggaatttattcgagagaaattattcgggttttagaataaagaaaagagattagttcgnnattaaggttatta

SEQ ID NO: 27182 - DNA, 608 bp, Artificial Sequence
  chemically treated genomic DNA (Homo sapiens) CpG-island No: 27182
  unsure (14..)
taataaccttaatnncgaactaatctcttttctttattctaaaacccgaataatttctctcgaataaattcccgaaccccctcccgccccgaaaacgaaaataaaaaacaaaaccgaaacgcgccgcccacgaccgacgcccccgaaaacccgcgacccgtacgaaaaccctaacgcccgcgcgaccgacccgccttaacaacgccgcgcgcgaacgaacgaaacgcgccgacgcccccgcctaccgaccgtccccgccgacgccccgcgaacctcctcgctctcgccgcccccgccgcgcccccgccgccgacgtccccgcgtccccgcctttccgaatcaaaaaaccacgcaaaccgcgtaaaaaccgaaaaaatataacgccgctcctccccgcgaccacctcgcccgcaccccccacgccaacataacatacgcaacccccgtacgtacacgcccgtatacccataaccacacgcgacccctacgcacacgcacgaatccgatatacgaccccccgcactatcgcgaacgcatacacgacgatcacattcccctcaaacgaacacgcacacacacgctcaccaacaccgtacgcacgcgtacca

SEQ ID NO: 27183 - DNA, 608 bp, Artificial Sequence
  chemically treated genomic DNA (Homo sapiens) CpG-island No: 27183
  unsure (14..)
tagtgattttggtnncgggttggttttttttttttgttttaagattcggatagtttttttcgggtggattttcgggttttttttcgtttcggaggcgggggtggagggtagagtcggagcgcgtcgtttacggtcggcgttttcgggggttcgcgattcgtgcgaaggttttagcgttcgcgcggtcggttcgttttagtaacgtcgcgcgcgggcgggcgggacgcgtcggcgttttcgtttgtcggtcgttttcgtcggcgtttcgcgggttttttcgttttcgtcgttttcgtcgcgttttcgtcgtcggcgttttcgcgttttcgttttttcgggttaaaaagttacgtaggtcgcgtgggggtcgagagggtgtggcgtcgttttttttcgcggttatttcgttcgtattttttacgttagtatagtatacgtagttttcgtgcgtgtacgttcgtgtgtttatggttatacgcgatttttacgtatacgtacgggttcgatatgcggtttttcgtattgtcgcggacgtatatacgacggttatattttttttaagcggatacgtatatatacgtttattaatatcgtgcgtacgcgtatta

SEQ ID NO: 27184 - DNA, 608 bp, Artificial Sequence
  chemically treated genomic DNA (Homo sapiens) CpG-island No: 27184
  unsure (594..)
taatacgcgtacgcacgatattaataaacgtatatatacgtatccgcttaaaaaaaatataaccgtcgtatatacgtccgcgacaatacgaaaaaccgcatatcgaacccgtacgtatacgtaaaaatcgcgtataaccataaacacacgaacgtacacgcacgaaaactacgtatactatactaacgtaaaaaatacgaacgaaataaccgcgaaaaaaaacgacgccacaccctctcgacccccacgcgacctacgtaactttttaacccgaaaaaacgaaaacgcgaaaacgccgacgacgaaaacgcgacgaaaacgacgaaaacgaaaaaacccgcgaaacgccgacgaaaacgaccgacaaacgaaaacgccgacgcgtcccgcccgcccgcgcgcgacgttactaaaacgaaccgaccgcgcgaacgctaaaaccttcgcacgaatcgcgaacccccgaaaacgccgaccgtaaacgacgcgctccgactctaccctccacccccgcctccgaaacgaaaaaaaacccgaaaatccacccgaaaaaaactatccgaatcttaaaacaaaaaaaaaaaaccaacccgnnaccaaaatcacta

SEQ ID NO: 27185 - DNA, 978 bp, Artificial Sequence
  chemically treated genomic DNA (Homo sapiens) CpG-island No: 27185
  unsure (38..)
ggagcgagggagcgagggagcgcggcgcggtcgtcgtnntgcgcgagtttggggttgtagtttagtcgggattttttagtcggcggtagcgcggcggtcgcgcggttttttttcgtttttcgttatggggtagttcggggagtagaacgttgcggatcgcggcggaggacgcgttcgtcgtttttgagtcggtcgagcggcgacggatcgcgaggtaaggggtcgcggcgggcgggcgggttttcggcgcgcggtcgggcgtttttattttcgtcgtttttatttcgcgttttgggcggcggggttcgggggtttcggggttgttcggcgcgggttcggcgcggcgtaggttcggttcgttttagcggcgacggcggggcgcggttttagtttggtttcgcgttttagtcgggttgtttttcgttttcggacgttttaatttcggtaaattttgtttcggaggtcgggttcggggttcgagggggtcggggcgttcgtatttttttaggaaacggggcgcgtaggtttcgttacggtcgtgattttcgttggcgttgaggattcggtatttcgcggggtcgcgggttttacgcggggggacgggcggtttaggggttgcgtggtcgagcgcgttgttcgggtcggtcgggggggttcgggcgttattggaaagttggttttgagttatttcgttttagaggcgttttcgatcgtttggcgggcggcgcgggggttcgggtatgggtagagggcgcgaatttttttcgcgcggtcgtcgagggtcggcgattttcggggtatcgggcggtttttggtcgcgggttttgcgtttttttcgcgggcgttaggcggttttcggcgggttggtcggttttacgtcgttagttagtttcgtgtggggatttcggtttagtatttggattcgaggagataattttgtgtggaaaatttttttttttcggttggaaatagtaataa

SEQ ID NO: 27186 - DNA, 978 bp, Artificial Sequence
  chemically treated genomic DNA (Homo sapiens) CpG-island No: 27186
  unsure (940..)
ttattactatttccaaccgaaaaaaaaaaattttccacacaaaattatctcctcgaatccaaatactaaaccgaaatccccacacgaaactaactaacgacgtaaaaccgaccaacccgccgaaaaccgcctaacgcccgcgaaaaaaacgcaaaacccgcgaccaaaaaccgcccgataccccgaaaatcgccgaccctcgacgaccgcgcgaaaaaaattcgcgccctctacccatacccgaacccccgcgccgcccgccaaacgatcgaaaacgcctctaaaacgaaataactcaaaaccaactttccaataacgcccgaacccccccgaccgacccgaacaacgcgctcgaccacgcaacccctaaaccgcccgtccccccgcgtaaaacccgcgaccccgcgaaataccgaatcctcaacgccaacgaaaatcacgaccgtaacgaaacctacgcgccccgtttcctaaaaaaatacgaacgccccgaccccctcgaaccccgaacccgacctccgaaacaaaatttaccgaaattaaaacgtccgaaaacgaaaaacaacccgactaaaacgcgaaaccaaactaaaaccgcgccccgccgtcgccgctaaaacgaaccgaacctacgccgcgccgaacccgcgccgaacaaccccgaaacccccgaaccccgccgcccaaaacgcgaaataaaaacgacgaaaataaaaacgcccgaccgcgcgccgaaaacccgcccgcccgccgcgaccccttacctcgcgatccgtcgccgctcgaccgactcaaaaacgacgaacgcgtcctccgccgcgatccgcaacgttctactccccgaactaccccataacgaaaaacgaaaaaaaaccgcgcgaccgccgcgctaccgccgactaaaaaatcccgactaaactacaaccccaaactcgcgcannacgacgaccgcgccgcgctccctcgctccctcgctcc

SEQ ID NO: 27187 - DNA, 978 bp, Artificial Sequence
  chemically treated genomic DNA (Homo sapiens) CpG-island No: 27187
  unsure (940..)
ttgttattgtttttaatcgaagggagagaattttttatatagaattattttttcgggtttaaatattagatcgaagtttttatacggggttggttggcggcgtggaatcggttagttcgtcgagagtcgtttggcgttcgcggggaagacgtagagttcgcggttaggagtcgttcggtgtttcgggagtcgtcggttttcggcggtcgcgcgagggggattcgcgttttttgtttatattcggattttcgcgtcgttcgttaagcggtcggaggcgtttttgaggcggaatgatttaggattaattttttaataacgttcgggttttttcggtcggttcgggtagcgcgttcggttacgtagtttttgagtcgttcgttttttcgcgtgaaattcgcggtttcgcggggtgtcgggtttttaacgttagcgggggttacggtcgtagcgaggtttgcgcgtttcgttttttgaaaaggtgcgggcgtttcggttttttcgggtttcgagttcggttttcgggataaagtttgtcgaagttgaggcgttcggaggcgggaggtagttcggttggggcgcggggttaggttgaagtcgcgtttcgtcgtcgtcgttgggacgggtcgggtttgcgtcgcgtcgggttcgcgtcgggtagtttcgaggttttcgggtttcgtcgtttagggcgcgggatggaggcgacggggatggaggcgttcggtcgcgcgtcggaggttcgttcgttcgtcgcggttttttatttcgcggttcgtcgtcgttcggtcggtttaggggcgacgggcgcgtttttcgtcgcggttcgtagcgttttgtttttcgggttgttttatggcggggggcggggaagagtcgcgcggtcgtcgcgttgtcgtcggttggaaagtttcggttgggttgtaattttaggttcgcgtanngcggcggtcgcgtcgcgttttttcgttttttcgtttt

SEQ ID NO: 27188 - DNA, 978 bp, Artificial Sequence
  chemically treated genomic DNA (Homo sapiens) CpG-island No: 27188
  unsure (38..)
aaaacgaaaaaacgaaaaaacgcgacgcgaccgccgcnntacgcgaacctaaaattacaacccaaccgaaactttccaaccgacgacaacgcgacgaccgcgcgactcttccccgccccccgccataaaacaacccgaaaaacaaaacgctacgaaccgcgacgaaaaacgcgcccgtcgcccctaaaccgaccgaacgacgacgaaccgcgaaataaaaaaccgcgacgaacgaacgaacctccgacgcgcgaccgaacgcctccatccccgtcgcctccatcccgcgccctaaacgacgaaacccgaaaacctcgaaactacccgacgcgaacccgacgcgacgcaaacccgacccgtcccaacgacgacgacgaaacgcgacttcaacctaaccccgcgccccaaccgaactacctcccgcctccgaacgcctcaacttcgacaaactttatcccgaaaaccgaactcgaaacccgaaaaaaccgaaacgcccgcaccttttcaaaaaacgaaacgcgcaaacctcgctacgaccgtaacccccgctaacgttaaaaacccgacaccccgcgaaaccgcgaatttcacgcgaaaaaacgaacgactcaaaaactacgtaaccgaacgcgctacccgaaccgaccgaaaaaacccgaacgttattaaaaaattaatcctaaatcattccgcctcaaaaacgcctccgaccgcttaacgaacgacgcgaaaatccgaatataaacaaaaaacgcgaatccccctcgcgcgaccgccgaaaaccgacgactcccgaaacaccgaacgactcctaaccgcgaactctacgtcttccccgcgaacgccaaacgactctcgacgaactaaccgattccacgccgccaaccaaccccgtataaaaacttcgatctaatatttaaacccgaaaaaataattctatataaaaaattctctcccttcgattaaaaacaataacaa

SEQ ID NO: 27189 - DNA, 567 bp, Artificial Sequence
  chemically treated genomic DNA (Homo sapiens) CpG-island No: 27189
  unsure (506)
ttgacgcgatatgttttttttgcgtgggcgttgttttgttcgtcgttattatcgtcgtttggttttgttcggtttgtagttcgtttttcgtttcgtttattcggggttttcgcgttaagttttttgtttgtcgcggtgagttgaggtttagttattatggtgggcgggaagcgcgtagttttggcggggcgtttcgacgggtggggagaagggaggatacggcgtgtaggtttcgcgtgggaggtttttgtggtttggtcgtcgttgggggaggtttttgtggtttggtcgtttttgggggaggtttttgggagagggtcgcggtgaggatgtcgtcgtcgggtataggggcggaaagtcgggagatttgaggaacgcgcggggattgggttttttcgttgttatttttatacgtattggttcggaggagggttgtggtttcgcggagaatgattaatatttcggacgtattcggattgcgaaatttagcgtttttattatattgntgaatttttgggtatatcgtagtttagagtgcgagagttggatcgagatttttagatgaat

SEQ ID NO: 27190 - DNA, 567 bp, Artificial Sequence
  chemically treated genomic DNA (Homo sapiens) CpG-island No: 27190
  unsure (62)
attcatctaaaaatctcgatccaactctcgcactctaaactacgatatacccaaaaattcancaatataataaaaacgctaaatttcgcaatccgaatacgtccgaaatattaatcattctccgcgaaaccacaaccctcctccgaaccaatacgtataaaaataacaacgaaaaaacccaatccccgcgcgttcctcaaatctcccgactttccgcccctatacccgacgacgacatcctcaccgcgaccctctcccaaaaacctcccccaaaaacgaccaaaccacaaaaacctcccccaacgacgaccaaaccacaaaaacctcccacgcgaaacctacacgccgtatcctcccttctccccacccgtcgaaacgccccgccaaaactacgcgcttcccgcccaccataataactaaacctcaactcaccgcgacaaacaaaaaacttaacgcgaaaaccccgaataaacgaaacgaaaaacgaactacaaaccgaacaaaaccaaacgacgataataacgacgaacaaaacaacgcccacgcaaaaaaaacatatcgcgtcaa

SEQ ID NO: 27191 - DNA, 567 bp, Artificial Sequence
  chemically treated genomic DNA (Homo sapiens) CpG-island No: 27191
  unsure (62)
atttatttaggggtttcggtttaattttcgtattttgaattgcgatgtgtttaggagtttantagtgtagtgaaaacgttagatttcgtagttcgagtacgttcgaggtgttaattatttttcgcgaaattatagttttttttcgagttagtgcgtgtaaaggtaataacgaagaggtttaattttcgcgcgttttttaggtttttcggtttttcgtttttgtgttcgacgacggtatttttatcgcgatttttttttaggaattttttttaaaggcgattaagttataggaattttttttaacggcgattaagttataagagttttttacgcgaggtttgtacgtcgtgtttttttttttttttattcgtcggggcgtttcgttagggttacgcgtttttcgtttattatgatggttgggttttaatttatcgcggtagatagggggtttggcgcgggggtttcgagtgggcgaagcggggagcgggttgtaggtcgagtagggttaagcggcggtagtggcggcgggtaggatagcgtttacgtaggagaggtatatcgcgttag

SEQ ID NO: 27192 - DNA, 567 bp, Artificial Sequence
  chemically treated genomic DNA (Homo sapiens) CpG-island No: 27192
  unsure (506)
ctaacgcgatatacctctcctacgtaaacgctatcctacccgccgccactaccgccgcttaaccctactcgacctacaacccgctccccgcttcgcccactcgaaacccccgcgccaaaccccctatctaccgcgataaattaaaacccaaccatcataataaacgaaaaacgcgtaaccctaacgaaacgccccgacgaataaaaaaaaaaaaaaacacgacgtacaaacctcgcgtaaaaaactcttataacttaatcgccgttaaaaaaaattcctataacttaatcgcctttaaaaaaaattcctaaaaaaaaatcgcgataaaaataccgtcgtcgaacacaaaaacgaaaaaccgaaaaacctaaaaaacgcgcgaaaattaaacctcttcgttattacctttacacgcactaactcgaaaaaaaactataatttcgcgaaaaataattaacacctcgaacgtactcgaactacgaaatctaacgttttcactacactantaaactcctaaacacatcgcaattcaaaatacgaaaattaaaccgaaacccctaaataaat

SEQ ID NO: 27193 - DNA, 631 bp, Artificial Sequence
  chemically treated genomic DNA (Homo sapiens) CpG-island No: 27193
tcgtagggttcggcgttttatttattcgtgttttttttgttgtttttagtttcggacgagagtagtttggagattagttcgttagattcgtcgtagcggtcgttcgttaggttcgcgttttcgggttcggacgtcgagaaaaggaagaagcggcgggtgttattttttaaggcgtagacgttggagttggagcggcgttttcggtagtagcggtatttgtttgcgttcgagcgcgagtagttggcgagtttgtttcgttttacgtttacgtaggttaagatttggttttagaattatcgttataagttgaagcgcgttcgcgttttaggggcggcggagtcgtttgatttggtagtattcgtcgagttgtacgtcgcgttcggtttgttgcgtcgcgtggtggtgtcggtgtttgttcgcgacgggtagtcgtgcggcggcggcggcggtggcgaggtgggaatcgtcgcggtttaggagaagtgcggcgtttttttagtcgtcgtttgttttttgtcgggttattttgttttcggtttcggttcggcgtttggtttttttttcgtttattagtatttagtatttttcgttttggttttttggaattggtgaggtcgtagggcggtatttg

SEQ ID NO: 27194 - DNA, 631 bp, Artificial Sequence
  chemically treated genomic DNA (Homo sapiens) CpG-island No: 27194
caaataccgccctacgacctcaccaattccaaaaaaccaaaacgaaaaatactaaatactaataaacgaaaaaaaaaccaaacgccgaaccgaaaccgaaaacaaaataacccgacaaaaaacaaacgacgactaaaaaaacgccgcacttctcctaaaccgcgacgattcccacctcgccaccgccgccgccgccgcacgactacccgtcgcgaacaaacaccgacaccaccacgcgacgcaacaaaccgaacgcgacgtacaactcgacgaatactaccaaatcaaacgactccgccgcccctaaaacgcgaacgcgcttcaacttataacgataattctaaaaccaaatcttaacctacgtaaacgtaaaacgaaacaaactcgccaactactcgcgctcgaacgcaaacaaataccgctactaccgaaaacgccgctccaactccaacgtctacgccttaaaaaataacacccgccgcttcttccttttctcgacgtccgaacccgaaaacgcgaacctaacgaacgaccgctacgacgaatctaacgaactaatctccaaactactctcgtccgaaactaaaaacaacaaaaaaaacacgaataaataaaacgccgaaccctacga

SEQ ID NO: 27195 - DNA, 631 bp, Artificial Sequence
  chemically treated genomic DNA (Homo sapiens) CpG-island No: 27195
taggtgtcgttttgcggttttattagttttaggagattagggcgggggatgttaagtgttggtaggcggggaagaggttaagcgtcgagtcgggatcgaaggtagggtagttcggtagagggtaggcggcggttggaggggcgtcgtattttttttgggtcgcggcggtttttatttcgttatcgtcgtcgtcgtcgtacggttgttcgtcgcgaataagtatcggtattattacgcgacgtagtaggtcgggcgcggcgtgtagttcggcggatgttgttaggttaggcgatttcgtcgtttttggagcgcgagcgcgttttagtttgtagcgatgattttggaattagattttgatttgcgtgggcgtgaggcgaagtaggttcgttagttgttcgcgttcgggcgtagataggtatcgttgttgtcggaagcgtcgttttaattttagcgtttgcgttttggagaatagtattcgtcgttttttttttttttcggcgttcgagttcggagacgcgggtttagcggacggtcgttgcgacgagtttggcgggttggtttttaggttgttttcgttcgaggttagggatagtaaaggagatacgggtgggtgagacgtcggattttacga

SEQ ID NO: 27196 - DNA, 631 bp, Artificial Sequence
  chemically treated genomic DNA (Homo sapiens) CpG-island No: 27196
tcgtaaaatccgacgtctcacccacccgtatctcctttactatccctaacctcgaacgaaaacaacctaaaaaccaacccgccaaactcgtcgcaacgaccgtccgctaaacccgcgtctccgaactcgaacgccgaaaaaaaaaaaaaacgacgaatactattctccaaaacgcaaacgctaaaattaaaacgacgcttccgacaacaacgatacctatctacgcccgaacgcgaacaactaacgaacctacttcgcctcacgcccacgcaaatcaaaatctaattccaaaatcatcgctacaaactaaaacgcgctcgcgctccaaaaacgacgaaatcgcctaacctaacaacatccgccgaactacacgccgcgcccgacctactacgtcgcgtaataataccgatacttattcgcgacgaacaaccgtacgacgacgacgacgataacgaaataaaaaccgccgcgacccaaaaaaaatacgacgcccctccaaccgccgcctaccctctaccgaactaccctaccttcgatcccgactcgacgcttaacctcttccccgcctaccaacacttaacatcccccgccctaatctcctaaaactaataaaaccgcaaaacgacaccta

SEQ ID NO: 27197 - DNA, 565 bp, Artificial Sequence
  chemically treated genomic DNA (Homo sapiens) CpG-island No: 27197
tcgtcgtcgaattatgtcgatgagtttaaagtatacgatttcgtttttagtgtttgatattttgagttttttggaggaaagttataagaaagtgggtatggagggcggcggtttcggggtttcgttggcggcgtataggtagggttaggcggtatcgttaatagcggttatgtagtagtacgtcgtggggtattacggcgtcgttatcgtcgtttattatatgacggcggcgggggtgttttagttttcgtatttcgtcgtggggggttattgtaacggtaatttgggtaatatgagcgagttgtcgtcgtattaggatattatgaggaatagcgtttttggtttcggatggtacggcgttaatttagattcgcgttttttcgttagtaagtgaggtcgttttattgcggggtcgcgggttgagtttaggaggtgcggcgagagtcgtttagaaggcgcggcgtcggtaggtgcgcgttgggtattagggagggcggttcggtagcggcgttagggatttgggtgcgggagttggggatgtttttttttgttcggttgggggttt

SEQ ID NO: 27198 - DNA, 565 bp, Artificial Sequence
  chemically treated genomic DNA (Homo sapiens) CpG-island No: 27198
aaacccccaaccgaacaaaaaaaaacatccccaactcccgcacccaaatccctaacgccgctaccgaaccgccctccctaatacccaacgcgcacctaccgacgccgcgccttctaaacgactctcgccgcacctcctaaactcaacccgcgaccccgcaataaaacgacctcacttactaacgaaaaaacgcgaatctaaattaacgccgtaccatccgaaaccaaaaacgctattcctcataatatcctaatacgacgacaactcgctcatattacccaaattaccgttacaataaccccccacgacgaaatacgaaaactaaaacacccccgccgccgtcatataataaacgacgataacgacgccgtaataccccacgacgtactactacataaccgctattaacgataccgcctaaccctacctatacgccgccaacgaaaccccgaaaccgccgccctccatacccactttcttataactttcctccaaaaaactcaaaatatcaaacactaaaaacgaaatcgtatactttaaactcatcgacataattcgacgacga

SEQ ID NO: 27199 - DNA, 565 bp, Artificial Sequence
  chemically treated genomic DNA (Homo sapiens) CpG-island No: 27199
ggatttttagtcgagtagggggaagtatttttagttttcgtatttaagtttttggcgtcgttgtcgggtcgttttttttgatgtttagcgcgtatttgtcggcgtcgcgttttttggacggttttcgtcgtattttttgagtttagttcgcggtttcgtagtggggcggttttatttattggcggggaagcgcgggtttgggttggcgtcgtattattcggggttagaggcgttgttttttatggtgttttggtacggcggtagttcgtttatgttgtttaggttgtcgttgtagtagttttttacggcggagtgcgagagttggggtattttcgtcgtcgttatgtggtaggcggcggtgacggcgtcgtggtgttttacggcgtgttgttgtatggtcgttgttggcggtgtcgtttggttttgtttgtacgtcgttagcggagtttcgaggtcgtcgttttttatgtttatttttttgtagtttttttttaggggatttaagatgttagatattgagaacggagtcgtgtgttttggatttatcgatatgattcggcggcgg

SEQ ID NO: 27200 - DNA, 565 bp, Artificial Sequence
  chemically treated genomic DNA (Homo sapiens) CpG-island No: 27200
ccgccgccgaatcatatcgataaatccaaaacacacgactccgttctcaatatctaacatcttaaatcccctaaaaaaaaactacaaaaaaataaacataaaaaacgacgacctcgaaactccgctaacgacgtacaaacaaaaccaaacgacaccgccaacaacgaccatacaacaacacgccgtaaaacaccacgacgccgtcaccgccgcctaccacataacgacgacgaaaataccccaactctcgcactccgccgtaaaaaactactacaacgacaacctaaacaacataaacgaactaccgccgtaccaaaacaccataaaaaacaacgcctctaaccccgaataatacgacgccaacccaaacccgcgcttccccgccaataaataaaaccgccccactacgaaaccgcgaactaaactcaaaaaatacgacgaaaaccgtccaaaaaacgcgacgccgacaaatacgcgctaaacatcaaaaaaaacgacccgacaacgacgccaaaaacttaaatacgaaaactaaaaatacttccccctactcgactaaaaatcc

SEQ ID NO: 27201 - DNA, 839 bp, Artificial Sequence
  chemically treated genomic DNA (Homo sapiens) CpG-island No: 27201
gcgtcgtcggttggggcgggtcgggcgggttaatggcgcggaaaataggggtggtttggttcggtttggtttcggtcgacgttgtgcgtttgtcgtttatagtttttcgttttatgggttcggcgagcggtatgaatatgagcggtatgggcggtttgggttcgttgggggacgtgagtaagaatatggtttcgttgttaagcgcgtcgcgtaggaagcgtcgggtgtttttttcgtaggcgtaggtgtacgagttggagcgacgttttaagtaatagaagtatttgtcggcgtcggagcgcgagtatttggttagtatgatttatttgacgtttacgtaggttaagatttggttttagaattatcgttataaaatgaagcgttaggttaaggataaggcggcgtagtagtaattgtagtaggatagcggcggcggcgggggcggcgggggtatcgggtgttcgtagtagtaataggtttagtagtagtcgtcgcgacgcgtggcggtgtcggttttggtgaaagacggtaaatcgtgttaggcgggtgttttcgcgtcgggcgtcgttagtttataaggttacgcgtagtagtaggcgtagtattaggcgtaggtcgcgtaggcggcggtagcggttattttcgtgggtagcggtggcgtcggttttggcgtatattcgggttattagttaggtagcgtaggttagttttcggatttggcgtattacgtcgttagtttcgcggcgttgtagggttaggtatttagtttgttttatttgaatttttcgggttcggattacggtattatgttttgttttattttgttatacggtcggatt

SEQ ID NO: 27202 - DNA, 839 bp, Artificial Sequence
  chemically treated genomic DNA (Homo sapiens) CpG-island No: 27202
aatccgaccgtataacaaaataaaacaaaacataataccgtaatccgaacccgaaaaattcaaataaaacaaactaaatacctaaccctacaacgccgcgaaactaacgacgtaatacgccaaatccgaaaactaacctacgctacctaactaataacccgaatatacgccaaaaccgacgccaccgctacccacgaaaataaccgctaccgccgcctacgcgacctacgcctaatactacgcctactactacgcgtaaccttataaactaacgacgcccgacgcgaaaacacccgcctaacacgatttaccgtctttcaccaaaaccgacaccgccacgcgtcgcgacgactactactaaacctattactactacgaacacccgatacccccgccgcccccgccgccgccgctatcctactacaattactactacgccgccttatccttaacctaacgcttcattttataacgataattctaaaaccaaatcttaacctacgtaaacgtcaaataaatcatactaaccaaatactcgcgctccgacgccgacaaatacttctattacttaaaacgtcgctccaactcgtacacctacgcctacgaaaaaaacacccgacgcttcctacgcgacgcgcttaacaacgaaaccatattcttactcacgtcccccaacgaacccaaaccgcccataccgctcatattcataccgctcgccgaacccataaaacgaaaaactataaacgacaaacgcacaacgtcgaccgaaaccaaaccgaaccaaaccacccctattttccgcgccattaacccgcccgacccgccccaaccgacgacgc

SEQ ID NO: 27203 - DNA, 839 bp, Artificial Sequence
  chemically treated genomic DNA (Homo sapiens) CpG-island No: 27203
ggttcgatcgtatagtaaggtggagtaggatatggtgtcgtagttcgagttcgaggagtttaggtgggataggttggatatttggttttgtagcgtcgcggggttggcggcgtggtgcgttaggttcggagattggtttgcgttgtttggttggtggttcgggtgtgcgttaaggtcggcgttatcgttgtttacggagatggtcgttgtcgtcgtttgcgcggtttgcgtttggtgttgcgtttgttgttgcgcgtggttttgtaggttggcggcgttcggcgcgggggtattcgtttggtacggtttgtcgttttttattaggatcggtatcgttacgcgtcgcggcgattgttgttgagtttgttgttgttgcgggtattcggtgttttcgtcgttttcgtcgtcgtcgttgttttgttgtagttgttgttgcgtcgttttgtttttggtttggcgttttattttgtagcggtggttttggaattagattttgatttgcgtgggcgttaggtggattatgttggttaggtgttcgcgtttcggcgtcgataggtatttttgttgtttgaagcgtcgttttagttcgtatatttgcgtttgcgagaagagtattcggcgttttttgcgcggcgcgtttggtagcggggttatgtttttgtttacgttttttagcgagtttaggtcgtttatgtcgtttatgtttatgtcgttcgtcgggtttatgaagcgggagattgtaagcgataaacgtatagcgtcggtcggggttaggtcgagttaggttatttttgtttttcgcgttattggttcgttcggttcgttttaatcgacggcgt

SEQ ID NO: 27204 - DNA, 839 bp, Artificial Sequence
  chemically treated genomic DNA (Homo sapiens) CpG-island No: 27204
acgccgtcgattaaaacgaaccgaacgaaccaataacgcgaaaaacaaaaataacctaactcgacctaaccccgaccgacgctatacgtttatcgcttacaatctcccgcttcataaacccgacgaacgacataaacataaacgacataaacgacctaaactcgctaaaaaacgtaaacaaaaacataaccccgctaccaaacgcgccgcgcaaaaaacgccgaatactcttctcgcaaacgcaaatatacgaactaaaacgacgcttcaaacaacaaaaatacctatcgacgccgaaacgcgaacacctaaccaacataatccacctaacgcccacgcaaatcaaaatctaattccaaaaccaccgctacaaaataaaacgccaaaccaaaaacaaaacgacgcaacaacaactacaacaaaacaacgacgacgacgaaaacgacgaaaacaccgaatacccgcaacaacaacaaactcaacaacaatcgccgcgacgcgtaacgataccgatcctaataaaaaacgacaaaccgtaccaaacgaatacccccgcgccgaacgccgccaacctacaaaaccacgcgcaacaacaaacgcaacaccaaacgcaaaccgcgcaaacgacgacaacgaccatctccgtaaacaacgataacgccgaccttaacgcacacccgaaccaccaaccaaacaacgcaaaccaatctccgaacctaacgcaccacgccgccaaccccgcgacgctacaaaaccaaatatccaacctatcccacctaaactcctcgaactcgaactacgacaccatatcctactccaccttactatacgatcgaacc

SEQ ID NO: 27205 - DNA, 631 bp, Artificial Sequence
  chemically treated genomic DNA (Homo sapiens) CpG-island No: 27205
gaattcgcggcgtaagggaagaattgtgtggagatgacgtttagttggaggggcgtttaagtttaggtcgtcgtttaggttttcgatggggattttatgtttcgtcgtcgcgcggagtttttttaatacggttcgttggttgattggttttcgcgtgggttcgggtagtgggcgtttgtcgggcgtttttttttttgcggcggagtaggtttttttaaggcgttggtcgttagtttcgcgatacggcgattgaggaggcggcgtggttagtttgattttagtttgcgtttcgggagtttttcgttcgcgttcgttgagttgttcgcggggatcggttgcggttttattgcgtagggtcggttttaggggtgggggcgagcgtttttttttgtagggtttttttttgagttcgtattggttcggcggttatcgaattttcggagagttcgaggtttgatttttttattttttcgtcgggttttagaggtttaaagtttaggattttgggcgtagtttttcgtcgggttgcgtagggacggtcgtttaggtcgttaggatttttgtcgtttaatttcgatgtagtttttaaaagttgtttgtaattattgttaagttaggttattttagtagt

SEQ ID NO: 27206 - DNA, 631 bp, Artificial Sequence
  chemically treated genomic DNA (Homo sapiens) CpG-island No: 27206
actactaaaataacctaacttaacaataattacaaacaacttttaaaaactacatcgaaattaaacgacaaaaatcctaacgacctaaacgaccgtccctacgcaacccgacgaaaaactacgcccaaaatcctaaactttaaacctctaaaacccgacgaaaaaataaaaaaatcaaacctcgaactctccgaaaattcgataaccgccgaaccaatacgaactcaaaaaaaaaccctacaaaaaaaaacgctcgcccccacccctaaaaccgaccctacgcaataaaaccgcaaccgatccccgcgaacaactcaacgaacgcgaacgaaaaactcccgaaacgcaaactaaaatcaaactaaccacgccgcctcctcaatcgccgtatcgcgaaactaacgaccaacgccttaaaaaaacctactccgccgcaaaaaaaaaaacgcccgacaaacgcccactacccgaacccacgcgaaaaccaatcaaccaacgaaccgtattaaaaaaactccgcgcgacgacgaaacataaaatccccatcgaaaacctaaacgacgacctaaacttaaacgcccctccaactaaacgtcatctccacacaattcttcccttacgccgcgaattc

SEQ ID NO: 27207 - DNA, 631 bp, Artificial Sequence
  chemically treated genomic DNA (Homo sapiens) CpG-island No: 27207
attattaaagtgatttgatttgatagtaattgtaggtagtttttgagaattgtatcggggttaaacggtagagattttgacgatttgggcgatcgtttttgcgtagttcggcgggaggttgcgtttagaattttgggttttgggtttttggggttcggcgaggagatgaagaagttaagtttcgagtttttcggaggttcgatggtcgtcgggttagtgcgggtttagaggaagattttgtaaaaaagagcgttcgtttttatttttggagtcgattttgcgtagtagggtcgtagtcggttttcgcgggtagtttagcgggcgcgggcgggaggttttcggaacgtaggttgaggttaggttgattacgtcgtttttttagtcgtcgtatcgcggggttggcggttagcgttttagaagagtttgtttcgtcgtaggaagaaagacgttcgataggcgtttattgttcgaatttacgcgggggttagttagttagcgggtcgtgttgggaaagtttcgcgcggcggcgggatataggatttttatcggggatttgggcgacggtttgagtttgggcgtttttttagttgggcgttatttttatatagttttttttttgcgtcgcgaattt

SEQ ID NO: 27208 - DNA, 631 bp, Artificial Sequence
  chemically treated genomic DNA (Homo sapiens) CpG-island No: 27208
aaattcgcgacgcaaaaaaaaaactatataaaaataacgcccaactaaaaaaacgcccaaactcaaaccgtcgcccaaatccccgataaaaatcctatatcccgccgccgcgcgaaactttcccaacacgacccgctaactaactaacccccgcgtaaattcgaacaataaacgcctatcgaacgtctttcttcctacgacgaaacaaactcttctaaaacgctaaccgccaaccccgcgatacgacgactaaaaaaacgacgtaatcaacctaacctcaacctacgttccgaaaacctcccgcccgcgcccgctaaactacccgcgaaaaccgactacgaccctactacgcaaaatcgactccaaaaataaaaacgaacgctcttttttacaaaatcttcctctaaacccgcactaacccgacgaccatcgaacctccgaaaaactcgaaacttaacttcttcatctcctcgccgaaccccaaaaacccaaaacccaaaattctaaacgcaacctcccgccgaactacgcaaaaacgatcgcccaaatcgtcaaaatctctaccgtttaaccccgatacaattctcaaaaactacctacaattactatcaaatcaaatcactttaataat

SEQ ID NO: 27209 - DNA, 507 bp, Artificial Sequence
  chemically treated genomic DNA (Homo sapiens) CpG-island No: 27209
ttcggtttggagcggtgggaggaggcgagtcgagatgtttgatgttttttattttttttatatagatacgcgtatagacggttcggttttcgttattttttatttttttcgtttttcgtaatttttaggttgtcgggattttgggcggtcgggcgaatatttatcgtcggtttaagggtttaggcgagggcgtttgttagtacgtatagttagcgggcgggtagcggatttggcgggcgtatggtttgttttgagttcgcggcgggcggtttcgcgcgggtaaagagttggcgggcggcgtattaggcgggcgatggtcgggagtttggtagagtggcgttggcgttgtggttttagagttaagaggcgtagtttagggttgggggcgggtttcgggggttcgtttgacgggcggcggatttagttaatggatgggtggaggcggggtcgtcgcgtaggtatggggcggggttggggagtttttgttagtgaggaagttttgttttt

SEQ ID NO: 27210 - DNA, 507 bp, Artificial Sequence
  chemically treated genomic DNA (Homo sapiens) CpG-island No: 27210
aaaaacaaaacttcctcactaacaaaaactccccaaccccgccccatacctacgcgacgaccccgcctccacccatccattaactaaatccgccgcccgtcaaacgaacccccgaaacccgcccccaaccctaaactacgcctcttaactctaaaaccacaacgccaacgccactctaccaaactcccgaccatcgcccgcctaatacgccgcccgccaactctttacccgcgcgaaaccgcccgccgcgaactcaaaacaaaccatacgcccgccaaatccgctacccgcccgctaactatacgtactaacaaacgccctcgcctaaacccttaaaccgacgataaatattcgcccgaccgcccaaaatcccgacaacctaaaaattacgaaaaacgaaaaaaataaaaaataacgaaaaccgaaccgtctatacgcgtatctatataaaaaaaataaaaaacatcaaacatctcgactcgcctcctcccaccgctccaaaccgaa

SEQ ID NO: 27211 - DNA, 507 bp, Artificial Sequence
  chemically treated genomic DNA (Homo sapiens) CpG-island No: 27211
gagagtagagtttttttattggtaggggttttttagtttcgttttatatttgcgcggcggtttcgtttttatttatttattggttagattcgtcgttcgttagacgagttttcggggttcgtttttagttttgagttgcgttttttagttttggggttatagcgttagcgttattttgttaggttttcggttatcgttcgtttggtgcgtcgttcgttagttttttgttcgcgcggggtcgttcgtcgcgggtttagggtagattatgcgttcgttaagttcgttgttcgttcgttggttatgcgtgttggtaggcgttttcgtttgggtttttgggtcggcggtgagtgttcgttcggtcgtttagagtttcggtagtttgggggttgcggagggcgggggaggtgggggatggcgggagtcgggtcgtttgtgcgcgtgtttgtgtaagaggaataggggatattaagtatttcgattcgtttttttttatcgttttagatcgaa

SEQ ID NO: 27212 - DNA, 507 bp, Artificial Sequence
  chemically treated genomic DNA (Homo sapiens) CpG-island No: 27212
ttcgatctaaaacgataaaaaaaaacgaatcgaaatacttaatatcccctattcctcttacacaaacacgcgcacaaacgacccgactcccgccatcccccacctcccccgccctccgcaacccccaaactaccgaaactctaaacgaccgaacgaacactcaccgccgacccaaaaacccaaacgaaaacgcctaccaacacgcataaccaacgaacgaacaacgaacttaacgaacgcataatctaccctaaacccgcgacgaacgaccccgcgcgaacaaaaaactaacgaacgacgcaccaaacgaacgataaccgaaaacctaacaaaataacgctaacgctataaccccaaaactaaaaaacgcaactcaaaactaaaaacgaaccccgaaaactcgtctaacgaacgacgaatctaaccaataaataaataaaaacgaaaccgccgcgcaaatataaaacgaaactaaaaaacccctaccaataaaaaaactctactctc

SEQ ID NO: 27213 - DNA, 601 bp, Artificial Sequence
  chemically treated genomic DNA (Homo sapiens) CpG-island No: 27213
tgagtcgttttttttttttaaaggatgtttatacgtgggtggtattcgttggaatttagcgttcgggtagttttgggaggacgcgtttagttgcgaggaggtgatcggcggcggcgcgggtagttcggaggggcgggacggggcggggtaaggcgggggtcgggtcggaggaggcgggttttcgggattcgcggtgttcggtagtagagttcgttgtagattcgggttttgattatgatttggcgtcgcgcggcgttggcggggacgcggttggtttggagtaggagcggttcggtaggttggtttgatagggcggcgggagttgcgggagttgcggtagttgcggtttttgggtacggggttagcgggtaggagtgtcgcggcgtggtgcgtaggttttgcgggggtttggagaaagcggtgggcggaggtgtttttttgtttcggcgtcgggtgggcgaggcgtattagcgcgtgggttttgagttataatacgtagaggcgttcgagggatgggtagggaagggtgtttttcgcggttgtgttgattttaggagtttgtgattttcgcgttgaaaatattttatttatgtttatttag

SEQ ID NO: 27214 - DNA, 601 bp, Artificial Sequence
  chemically treated genomic DNA (Homo sapiens) CpG-island No: 27214
ctaaataaacataaataaaatattttcaacgcgaaaatcacaaactcctaaaatcaacacaaccgcgaaaaacacccttccctacccatccctcgaacgcctctacgtattataactcaaaacccacgcgctaatacgcctcgcccacccgacgccgaaacaaaaaaacacctccgcccaccgctttctccaaacccccgcaaaacctacgcaccacgccgcgacactcctacccgctaaccccgtacccaaaaaccgcaactaccgcaactcccgcaactcccgccgccctatcaaaccaacctaccgaaccgctcctactccaaaccaaccgcgtccccgccaacgccgcgcgacgccaaatcataatcaaaacccgaatctacaacgaactctactaccgaacaccgcgaatcccgaaaacccgcctcctccgacccgacccccgccttaccccgccccgtcccgcccctccgaactacccgcgccgccgccgatcacctcctcgcaactaaacgcgtcctcccaaaactacccgaacgctaaattccaacgaataccacccacgtataaacatcctttaaaaaaaaaaaacgactca

SEQ ID NO: 27215 - DNA, 601 bp, Artificial Sequence
  chemically treated genomic DNA (Homo sapiens) CpG-island No: 27215
ttaagtgaatatgagtgaagtatttttaacgcgagagttataggtttttgaagttagtatagtcgcggagggtatttttttttgtttatttttcgagcgtttttgcgtgttatgatttagagtttacgcgttagtacgtttcgtttattcggcgtcggggtaaaggggtattttcgtttatcgttttttttagattttcgtaaggtttgcgtattacgtcgcggtatttttgttcgttgatttcgtatttagaggtcgtagttgtcgtagttttcgtagttttcgtcgttttgttaagttagtttgtcgagtcgtttttgttttaaattagtcgcgttttcgttagcgtcgcgcggcgttaaattatggttagagttcggatttgtagcgagttttattgtcggatatcgcggatttcgggagttcgtttttttcggttcggttttcgttttgtttcgtttcgtttcgttttttcggattgttcgcgtcgtcgtcggttattttttcgtagttgagcgcgtttttttagggttgttcgagcgttggattttagcgagtgttatttacgtgtaaatattttttagaggggagaagcggttta

SEQ ID NO: 27216 - DNA, 601 bp, Artificial Sequence
  chemically treated genomic DNA (Homo sapiens) CpG-island No: 27216
taaaccgcttctcccctctaaaaaatatttacacgtaaataacactcgctaaaatccaacgctcgaacaaccctaaaaaaacgcgctcaactacgaaaaaataaccgacgacgacgcgaacaatccgaaaaaacgaaacgaaacgaaacaaaacgaaaaccgaaccgaaaaaaacgaactcccgaaatccgcgatatccgacaataaaactcgctacaaatccgaactctaaccataatttaacgccgcgcgacgctaacgaaaacgcgactaatttaaaacaaaaacgactcgacaaactaacttaacaaaacgacgaaaactacgaaaactacgacaactacgacctctaaatacgaaatcaacgaacaaaaataccgcgacgtaatacgcaaaccttacgaaaatctaaaaaaaacgataaacgaaaatacccctttaccccgacgccgaataaacgaaacgtactaacgcgtaaactctaaatcataacacgcaaaaacgctcgaaaaataaacaaaaaaaaataccctccgcgactatactaacttcaaaaacctataactctcgcgttaaaaatacttcactcatattcacttaa

SEQ ID NO: 27217 - DNA, 623 bp, Artificial Sequence
  chemically treated genomic DNA (Homo sapiens) CpG-island No: 27217
ggattcgtagcgtcgttaggagaagttttgcgtagcgttgggaaacgataaaagaaggtagtttgacgggtagcgatagttatagtaatagtaatagttttattgtcgtcggggattttaggttcggttttcgggaacgagttttgtttttttttttttgtttcgttttcgttttagaggggcgaggatttcggatgttgttttttcggcgttgtgaattatcgttttttttttttaggttttagttttttcgaattcgttacgggtgttgtaaggtttgggaagagtttcgatgtttttagggtggttagagcgttttttcgcgtttagtcgcgttgtaggtgacggcgttcggaggttgtcgggaagtaggcggggtgacgtgtggttgacgagttcggcggcgggtttgttgagatttgtggtcggcggtagttggtgcggggggtagttgagagcgagaggtggatcggggcggtgtgtggttagggttatgacgggtaatgtcggggagtggtgttttatggaaagcgatttcggggtttttatcgagtttattaaaggattcggtgagaattaaggggatcgttttgggtttggggttacgggaggaggtttaagtt

SEQ ID NO: 27218 - DNA, 623 bp, Artificial Sequence
  chemically treated genomic DNA (Homo sapiens) CpG-island No: 27218
aacttaaacctcctcccgtaaccccaaacccaaaacgatccccttaattctcaccgaatcctttaataaactcgataaaaaccccgaaatcgctttccataaaacaccactccccgacattacccgtcataaccctaaccacacaccgccccgatccacctctcgctctcaactaccccccgcaccaactaccgccgaccacaaatctcaacaaacccgccgccgaactcgtcaaccacacgtcaccccgcctacttcccgacaacctccgaacgccgtcacctacaacgcgactaaacgcgaaaaaacgctctaaccaccctaaaaacatcgaaactcttcccaaaccttacaacacccgtaacgaattcgaaaaaactaaaacctaaaaaaaaaaaacgataattcacaacgccgaaaaaacaacatccgaaatcctcgcccctctaaaacgaaaacgaaacaaaaaaaaaaaaacaaaactcgttcccgaaaaccgaacctaaaatccccgacgacaataaaactattactattactataactatcgctacccgtcaaactaccttcttttatcgtttcccaacgctacgcaaaacttctcctaacgacgctacgaatcc

SEQ ID NO: 27219 - DNA, 623 bp, Artificial Sequence
  chemically treated genomic DNA (Homo sapiens) CpG-island No: 27219
agtttgggttttttttcgtgattttaggtttaggacggtttttttggtttttatcgaattttttaatgagttcggtgaagatttcggggtcgttttttatgaggtattatttttcggtattgttcgttatggttttggttatatatcgtttcgatttatttttcgtttttagttgtttttcgtattagttgtcgtcggttatagattttagtaaattcgtcgtcgagttcgttaattatacgttatttcgtttatttttcgatagttttcgggcgtcgttatttgtagcgcgattgagcgcgggaggacgttttagttattttagagatatcgaaattttttttaggttttgtagtattcgtagcggattcggaagggttggggtttgagaagaaagggcggtgatttatagcgtcgaggaggtaatattcgggattttcgtttttttggggcggaggcggggtaaaagaagaggggtaggattcgttttcgggaatcgaatttggaattttcggcggtagtggggttgttgttgttgttgtggttgtcgttgttcgttaggttgtttttttttgtcgttttttagcgttgcgtaggattttttttggcggcgttgcggattt

SEQ ID NO: 27220 - DNA, 623 bp, Artificial Sequence
  chemically treated genomic DNA (Homo sapiens) CpG-island No: 27220
aaatccgcaacgccgccaaaaaaaatcctacgcaacgctaaaaaacgacaaaaaaaaacaacctaacgaacaacgacaaccacaacaacaacaacaaccccactaccgccgaaaattccaaattcgattcccgaaaacgaatcctacccctcttcttttaccccgcctccgccccaaaaaaacgaaaatcccgaatattacctcctcgacgctataaatcaccgccctttcttctcaaaccccaacccttccgaatccgctacgaatactacaaaacctaaaaaaaatttcgatatctctaaaataactaaaacgtcctcccgcgctcaatcgcgctacaaataacgacgcccgaaaactatcgaaaaataaacgaaataacgtataattaacgaactcgacgacgaatttactaaaatctataaccgacgacaactaatacgaaaaacaactaaaaacgaaaaataaatcgaaacgatatataaccaaaaccataacgaacaataccgaaaaataatacctcataaaaaacgaccccgaaatcttcaccgaactcattaaaaaattcgataaaaaccaaaaaaaccgtcctaaacctaaaatcacgaaaaaaaacccaaact

SEQ ID NO: 27221 - DNA, 641 bp, Artificial Sequence
  chemically treated genomic DNA (Homo sapiens) CpG-island No: 27221
cgtaggtcgatgtcgtcggtagaaaagagcgaggggttatcggtttcggcgttcgcggaacgcgttcggggtcgggtgttcggtttgtcgtcgtcggcgttgtgttgcgtttgcggtttgtgcgcgttgttggcgggcgtgaacgtgacgttggtaggcgttttcgttttttttttgttcgagtataacgcgttgttcgtcgtggggttggcgttgttggtgttggcgttcggttttttcgcggtttgttgcgtgtgtagtcgtcggggtttcgcgtttcgtgggcgttcggcggtcgcggcgggttcgggttagggtggcggtcgcgtcgggttcgtggcgttggagatggagagtagcgagtttacggtataggatattacggtcgtgtagtttagttttgtcgttttcgtcgcgtttttcggttgttttagtttcggttttagttttttcgttttggaggtttcggcgttcgcggtcgtttgcgcgttgcgttcggaaggagtttagtttaatttatttcgggcgcgcgtcgttttttagcggattagggtttcgtcgtgatttcgttgttcgggtttatttttttttttttagtgttatttaaggggggaaaagaaagaaaagaaaaagaaaaaaga

SEQ ID NO: 27222 - DNA, 641 bp, Artificial Sequence
  chemically treated genomic DNA (Homo sapiens) CpG-island No: 27222
tcttttttctttttcttttctttcttttccccccttaaataacactaaaaaaaaaaaaataaacccgaacaacgaaatcacgacgaaaccctaatccgctaaaaaacgacgcgcgcccgaaataaattaaactaaactccttccgaacgcaacgcgcaaacgaccgcgaacgccgaaacctccaaaacgaaaaaactaaaaccgaaactaaaacaaccgaaaaacgcgacgaaaacgacaaaactaaactacacgaccgtaatatcctataccgtaaactcgctactctccatctccaacgccacgaacccgacgcgaccgccaccctaacccgaacccgccgcgaccgccgaacgcccacgaaacgcgaaaccccgacgactacacacgcaacaaaccgcgaaaaaaccgaacgccaacaccaacaacgccaaccccacgacgaacaacgcgttatactcgaacaaaaaaaaaacgaaaacgcctaccaacgtcacgttcacgcccgccaacaacgcgcacaaaccgcaaacgcaacacaacgccgacgacgacaaaccgaacacccgaccccgaacgcgttccgcgaacgccgaaaccgataacccctcgctcttttctaccgacgacatcgacctacg

SEQ ID NO: 27223 - DNA, 641 bp, Artificial Sequence
  chemically treated genomic DNA (Homo sapiens) CpG-island No: 27223
ttttttttttttttttttttttttttttttttttttaaatggtattgaaggaaggggaatgaattcggatagcggagttacggcggggttttggttcgttagggggcggcgcgcgttcggggtgggttgagttggatttttttcgagcgtagcgcgtagacggtcgcgggcgtcggggtttttagggcgagggggttggggtcggggttggagtagtcggaggacgcggcggagacggtagggttgagttgtacggtcgtggtgttttgtgtcgtgggttcgttgttttttatttttagcgttacgggttcggcgcggtcgttattttggttcgggttcgtcgcggtcgtcgagcgtttacggggcgcgaggtttcggcggttatatacgtagtaggtcgcgaagaagtcgagcgttagtattagtagcgttagttttacgacgagtagcgcgttgtgttcgggtaagaaggaggcgaaggcgtttgttagcgttacgtttacgttcgttagtagcgcgtatagatcgtaggcgtagtatagcgtcggcgacggtaggtcgggtattcggtttcgggcgcgtttcgcgggcgtcgggatcggtggtttttcgtttttttttgtcggcggtatcggtttgcg

SEQ ID NO: 27224 - DNA, 641 bp, Artificial Sequence
  chemically treated genomic DNA (Homo sapiens) CpG-island No: 27224
cgcaaaccgataccgccgacaaaaaaaaacgaaaaaccaccgatcccgacgcccgcgaaacgcgcccgaaaccgaatacccgacctaccgtcgccgacgctatactacgcctacgatctatacgcgctactaacgaacgtaaacgtaacgctaacaaacgccttcgcctccttcttacccgaacacaacgcgctactcgtcgtaaaactaacgctactaatactaacgctcgacttcttcgcgacctactacgtatataaccgccgaaacctcgcgccccgtaaacgctcgacgaccgcgacgaacccgaaccaaaataacgaccgcgccgaacccgtaacgctaaaaataaaaaacaacgaacccacgacacaaaacaccacgaccgtacaactcaaccctaccgtctccgccgcgtcctccgactactccaaccccgaccccaaccccctcgccctaaaaaccccgacgcccgcgaccgtctacgcgctacgctcgaaaaaaatccaactcaacccaccccgaacgcgcgccgccccctaacgaaccaaaaccccgccgtaactccgctatccgaattcattccccttccttcaataccatttaaaaaaaaaaaaaaaaaaaaaaaaaaaaaaaaaaaa

SEQ ID NO: 27225 - DNA, 595 bp, Artificial Sequence
  chemically treated genomic DNA (Homo sapiens) CpG-island No: 27225
gaggcgggtcgtggtatatatagggcggcgagagcgcgtagtgtcggggttagagcggcgcgttttttttttttcgtttcgtttcgtcgttatttcgcgttcggaatttttggcgcgcggaatttcggtgtcggagcgcgggcgcggcgtattcggagcgggatggagcgggcgcgcgggtcgcgggtcgaggtcgacgcgtttgaggaggaggaggaggcgggggcggttatggttgttgtggtggtggcggttgcgggtggcgcgggatcggcggttttgtaggtggtcggtttttatcggggtttgtgcgcggtgcgtagtcgcgttttgggtttggggttcgtgttattcgcgtagttgcgcgtttttttagtgcgtttcggttcgggtcggttcgaggggggcgtttgacggtagcggggtcggggtcgatgtcgagttttaggttaattttttttacgatcgttatcgcgataagatttagttgttgcgtaggtgcgggtttgggttggttggaggcgggtagaaggcgggaggaggggcggttcgggttgttgggttttaggatagttttgtgaggtgggtattagta

SEQ ID NO: 27226 - DNA, 595 bp, Artificial Sequence
  chemically treated genomic DNA (Homo sapiens) CpG-island No: 27226
tactaatacccacctcacaaaactatcctaaaacccaacaacccgaaccgcccctcctcccgccttctacccgcctccaaccaacccaaacccgcacctacgcaacaactaaatcttatcgcgataacgatcgtaaaaaaaattaacctaaaactcgacatcgaccccgaccccgctaccgtcaaacgcccccctcgaaccgacccgaaccgaaacgcactaaaaaaacgcgcaactacgcgaataacacgaaccccaaacccaaaacgcgactacgcaccgcgcacaaaccccgataaaaaccgaccacctacaaaaccgccgatcccgcgccacccgcaaccgccaccaccacaacaaccataaccgcccccgcctcctcctcctcctcaaacgcgtcgacctcgacccgcgacccgcgcgcccgctccatcccgctccgaatacgccgcgcccgcgctccgacaccgaaattccgcgcgccaaaaattccgaacgcgaaataacgacgaaacgaaacgaaaaaaaaaaaacgcgccgctctaaccccgacactacgcgctctcgccgccctatatataccacgacccgcctc

SEQ ID NO: 27227 - DNA, 595 bp, Artificial Sequence
  chemically treated genomic DNA (Homo sapiens) CpG-island No: 27227
tattagtgtttattttatagggttgttttaaggtttagtagttcgggtcgttttttttttcgttttttgttcgtttttagttaatttaggttcgtatttgcgtagtagttggattttgtcgcggtagcggtcgtaaaaagggttggtttggagttcggtatcggtttcgatttcgttgtcgttaggcgtttttttcgggtcggttcgagtcggggcgtattgggaagacgcgtagttgcgcgggtgatacgagttttaggtttagggcgcggttgcgtatcgcgtataggtttcggtagagatcggttatttgtaggatcgtcggtttcgcgttattcgtagtcgttattattatagtagttatggtcgttttcgttttttttttttttttaggcgcgtcggtttcggttcgcggttcgcgcgttcgttttatttcgtttcgagtgcgtcgcgttcgcgtttcggtatcgaggtttcgcgcgttaaaggtttcgggcgcgggatagcggcgaggcggggcggggaggagggggcgcgtcgttttggtttcggtattgcgcgttttcgtcgttttgtgtatgttacggttcgtttt

SEQ ID NO: 27228 - DNA, 595 bp, Artificial Sequence
  chemically treated genomic DNA (Homo sapiens) CpG-island No: 27228
aaaacgaaccgtaacatacacaaaacgacgaaaacgcgcaataccgaaaccaaaacgacgcgccccctcctccccgccccgcctcgccgctatcccgcgcccgaaacctttaacgcgcgaaacctcgataccgaaacgcgaacgcgacgcactcgaaacgaaataaaacgaacgcgcgaaccgcgaaccgaaaccgacgcgcctaaaaaaaaaaaaaaaacgaaaacgaccataactactataataataacgactacgaataacgcgaaaccgacgatcctacaaataaccgatctctaccgaaacctatacgcgatacgcaaccgcgccctaaacctaaaactcgtatcacccgcgcaactacgcgtcttcccaatacgccccgactcgaaccgacccgaaaaaaacgcctaacgacaacgaaatcgaaaccgataccgaactccaaaccaaccctttttacgaccgctaccgcgacaaaatccaactactacgcaaatacgaacctaaattaactaaaaacgaacaaaaaacgaaaaaaaaaacgacccgaactactaaaccttaaaacaaccctataaaataaacactaata

SEQ ID NO: 27229 - DNA, 554 bp, Artificial Sequence
  chemically treated genomic DNA (Homo sapiens) CpG-island No: 27229
aacggtgttttagcgtttagagtattcgttttgttttagtgtcgagtagtataatttagaggatgattatgttttgttcgagtacgagcggtttggtttcgatcgttttggcgatatcgatcgtcgttattagtatcggtagaacggttatgaggttgattttatagggaatgatgtttagttggtttattttttatcgtgcgattaatcggttagatatcgggatacgtttagttacgtagggattatggttgttcgttgattagttatcgttatgttgaaaatggttatgggtttcgttgtttcggcgatcgtagtgttgttatttatattggtaattattcggttgggtggagttatagggattgtcggcgatgtcgggtgttttcgtttcggcgatcgtcggtaattcggtcgtcggattgatgtttatgtcgtcgttgtcgattttcgggttattcggtattgttttgttttcgaattagatggtaatgcgttcgaatagttttatgttagtattttcgatcggttgtttatacgatatacgtttttcg

SEQ ID NO: 27230 - DNA, 554 bp, Artificial Sequence
  chemically treated genomic DNA (Homo sapiens) CpG-island No: 27230
cgaaaaacgtatatcgtataaacaaccgatcgaaaatactaacataaaactattcgaacgcattaccatctaattcgaaaacaaaacaataccgaataacccgaaaatcgacaacgacgacataaacatcaatccgacgaccgaattaccgacgatcgccgaaacgaaaacacccgacatcgccgacaatccctataactccacccaaccgaataattaccaatataaataacaacactacgatcgccgaaacaacgaaacccataaccattttcaacataacgataactaatcaacgaacaaccataatccctacgtaactaaacgtatcccgatatctaaccgattaatcgcacgataaaaaataaaccaactaaacatcattccctataaaatcaacctcataaccgttctaccgatactaataacgacgatcgatatcgccaaaacgatcgaaaccaaaccgctcgtactcgaacaaaacataatcatcctctaaattatactactcgacactaaaacaaaacgaatactctaaacgctaaaacaccgtt

SEQ ID NO: 27231 - DNA, 554 bp, Artificial Sequence
  chemically treated genomic DNA (Homo sapiens) CpG-island No: 27231
cgaaaaacgtatatcgtgtgaatagtcgatcgggagtgttgatatgagattgttcgagcgtattgttatttggttcgaagataggataatgtcggataattcggggatcggtagcgacggtatggatattaattcggcgatcggattgtcgacgatcgtcggggcggagatattcgatatcgtcggtaatttttatggttttatttagtcgaatgattgttagtgtgaatggtagtattacgatcgtcgggatagcgggatttataattatttttagtataacgatagttggttaacgagtagttatggtttttgcgtagttaagcgtatttcggtgtttgatcgattagtcgtacgatgggaggtgagttaattgagtattattttttatgggattagttttatggtcgttttatcgatgttgatagcgacgatcggtatcgttaaggcgatcgggattaggtcgttcgtgttcgggtaaagtatggttattttttggattgtgttgttcggtattgagatagggcggatattttggacgttgaagtatcgtt

SEQ ID NO: 27232 - DNA, 554 bp, Artificial Sequence
  chemically treated genomic DNA (Homo sapiens) CpG-island No: 27232
aacgatacttcaacgtccaaaatatccgccctatctcaataccgaacaacacaatccaaaaaataaccatactttacccgaacacgaacgacctaatcccgatcgccttaacgataccgatcgtcgctatcaacatcgataaaacgaccataaaactaatcccataaaaaataatactcaattaactcacctcccatcgtacgactaatcgatcaaacaccgaaatacgcttaactacgcaaaaaccataactactcgttaaccaactatcgttatactaaaaataattataaatcccgctatcccgacgatcgtaatactaccattcacactaacaatcattcgactaaataaaaccataaaaattaccgacgatatcgaatatctccgccccgacgatcgtcgacaatccgatcgccgaattaatatccataccgtcgctaccgatccccgaattatccgacattatcctatcttcgaaccaaataacaatacgctcgaacaatctcatatcaacactcccgatcgactattcacacgatatacgtttttcg

SEQ ID NO: 27233 - DNA, 688 bp, Artificial Sequence
  chemically treated genomic DNA (Homo sapiens) CpG-island No: 27233
ggtagagcgcggcggtagtagtagcggcggtcgggtcgtgagcgatttcgggcgatatagtagagtgttggcggtttaggggcgcgtggtagtattgcgagtcgaagggtgggaaggaagttttgagtagaggtagcgcgggcggttcggggggtttatgtagttgcgaggcggtgacgtagagcgggtatacgtatagtagtttagttttgcgcgcgtggtaggcgttaggcgagagatcgtgtagcgcgtgcggcgggggtatagcgtaggggaagagcggcggcgggttgttttcgggcgtttttttttcgttcgtttcgcgtagtattagcgagtttattaggaaggagcgcggtatggtttcggcgcgcggtcgtttcgtagttagttcgttttttgcgtttatcgtatttttcggttttttacgcgttttttttggtcgcggtatttcgtagttgtttttgtttaggaggttgaacgcgcggttgagatttaggttgaaatagtagtttttgttgtcgtgggtatcgtttaaagagcgcggggtgttggttagcgttagtggtgttgaaaggcgtcggcggcgcggtttaaataggattattgttatgtgatggattacgttaggagcggtcggggttttttaatagggtttttgtgtttttttttttggtatttattttgt

SEQ ID NO: 27234 - DNA, 688 bp, Artificial Sequence
  chemically treated genomic DNA (Homo sapiens) CpG-island No: 27234
acaaaataaataccaaaaaaaaaaacacaaaaaccctattaaaaaaccccgaccgctcctaacgtaatccatcacataacaataatcctatttaaaccgcgccgccgacgcctttcaacaccactaacgctaaccaacaccccgcgctctttaaacgatacccacgacaacaaaaactactatttcaacctaaatctcaaccgcgcgttcaacctcctaaacaaaaacaactacgaaataccgcgaccaaaaaaaacgcgtaaaaaaccgaaaaatacgataaacgcaaaaaacgaactaactacgaaacgaccgcgcgccgaaaccataccgcgctccttcctaataaactcgctaatactacgcgaaacgaacgaaaaaaaaacgcccgaaaacaacccgccgccgctcttcccctacgctatacccccgccgcacgcgctacacgatctctcgcctaacgcctaccacgcgcgcaaaactaaactactatacgtatacccgctctacgtcaccgcctcgcaactacataaaccccccgaaccgcccgcgctacctctactcaaaacttccttcccacccttcgactcgcaatactaccacgcgcccctaaaccgccaacactctactatatcgcccgaaatcgctcacgacccgaccgccgctactactaccgccgcgctctacc

SEQ ID NO: 27235 - DNA, 688 bp, Artificial Sequence
  chemically treated genomic DNA (Homo sapiens) CpG-island No: 27235
gtagagtgaatgttaagagaaaaggtataaaaattttattgagaggtttcggtcgtttttggcgtagtttattatatggtaatagttttatttaagtcgcgtcgtcggcgttttttagtattattagcgttggttagtatttcgcgttttttgggcggtgtttacggtagtagaggttattgttttagtttaggttttagtcgcgcgtttagttttttgggtagaggtagttgcgggatatcgcggttagggaaagcgcgtggagagtcgaaaggtgcggtgggcgtagagggcgggttggttgcggggcgatcgcgcgtcggggttatgtcgcgtttttttttggtggattcgttagtgttgcgcgaggcgggcgagaagaaggcgttcgagggtagttcgtcgtcgttttttttttacgttgtgttttcgtcgtacgcgttgtacggtttttcgtttggcgtttgttacgcgcgtaaggttgggttgttgtgcgtgtgttcgttttgcgttatcgtttcgtagttgtatgggtttttcgggtcgttcgcgttgtttttgtttaaggttttttttttatttttcggttcgtagtattgttacgcgtttttgggtcgttagtattttgttgtgtcgttcggggtcgtttacggttcggtcgtcgttgttgttgtcgtcgcgttttatt

SEQ ID NO: 27236 - DNA, 688 bp, Artificial Sequence
  chemically treated genomic DNA (Homo sapiens) CpG-island No: 27236
aataaaacgcgacgacaacaacaacgacgaccgaaccgtaaacgaccccgaacgacacaacaaaatactaacgacccaaaaacgcgtaacaatactacgaaccgaaaaataaaaaaaaaaccttaaacaaaaacaacgcgaacgacccgaaaaacccatacaactacgaaacgataacgcaaaacgaacacacgcacaacaacccaaccttacgcgcgtaacaaacgccaaacgaaaaaccgtacaacgcgtacgacgaaaacacaacgtaaaaaaaaaacgacgacgaactaccctcgaacgccttcttctcgcccgcctcgcgcaacactaacgaatccaccaaaaaaaaacgcgacataaccccgacgcgcgatcgccccgcaaccaacccgccctctacgcccaccgcacctttcgactctccacgcgctttccctaaccgcgatatcccgcaactacctctacccaaaaaactaaacgcgcgactaaaacctaaactaaaacaataacctctactaccgtaaacaccgcccaaaaaacgcgaaatactaaccaacgctaataatactaaaaaacgccgacgacgcgacttaaataaaactattaccatataataaactacgccaaaaacgaccgaaacctctcaataaaatttttataccttttctcttaacattcactctac

SEQ ID NO: 27237 - DNA, 724 bp, Artificial Sequence
  chemically treated genomic DNA (Homo sapiens) CpG-island No: 27237
ttttgtattacggtggtcggaattagtaaacgttaatagtcggaggtcgttcgtttttcgggcgtttgtaggcggcgggtatcgggcgtcgatttttttttttggattagatttatattcgagtttacgttagtttcgtagttcgggcgagcgaagatagtcgcgaaggattaaggtttcggggcgagttgtggcgtcgtttcggtcgtttttcggggcgcggcgttgatttatatttagttgacgttcgtatttgaggcggttgttcgtagttagcgagagggcgcgtagcgaggcgggtagggtaaagttatttattgggaaagcgcggttgttcgggtcgcgtacgggtttttggcgtcgttgttcggtattagttttcgtttttcgcggttcgttgagggagcggagagtttgttcggtttcgtttcgttaggaatcgtcgtcgtcgtcgtcgtcgtcgcggattttttggtaaaaagtaaatttcggttaagattttattttttaatcgtttttgttgttttttcgggggtagcgttaaggtcgagcggtttaattcgtattcgggttaatcggaggtagtatagggcgggaggtgggcggattagagggcggttttatttattcgagagttcgggaggcgggttagaagggattcgttattttcgggttagagtgagattatttcgtttttggcgtttcgtttttttaatcgtttcgg

SEQ ID NO: 27238 - DNA, 724 bp, Artificial Sequence
  chemically treated genomic DNA (Homo sapiens) CpG-island No: 27238
ccgaaacgattaaaaaaacgaaacgccaaaaacgaaataatctcactctaacccgaaaataacgaatcccttctaacccgcctcccgaactctcgaataaataaaaccgccctctaatccgcccacctcccgccctatactacctccgattaacccgaatacgaattaaaccgctcgaccttaacgctacccccgaaaaaacaacaaaaacgattaaaaaataaaatcttaaccgaaatttactttttaccaaaaaatccgcgacgacgacgacgacgacgacgattcctaacgaaacgaaaccgaacaaactctccgctccctcaacgaaccgcgaaaaacgaaaactaataccgaacaacgacgccaaaaacccgtacgcgacccgaacaaccgcgctttcccaataaataactttaccctacccgcctcgctacgcgccctctcgctaactacgaacaaccgcctcaaatacgaacgtcaactaaatataaatcaacgccgcgccccgaaaaacgaccgaaacgacgccacaactcgccccgaaaccttaatccttcgcgactatcttcgctcgcccgaactacgaaactaacgtaaactcgaatataaatctaatccaaaaaaaaaaatcgacgcccgatacccgccgcctacaaacgcccgaaaaacgaacgacctccgactattaacgtttactaattccgaccaccgtaatacaaaa

SEQ ID NO: 27239 - DNA, 724 bp, Artificial Sequence
  chemically treated genomic DNA (Homo sapiens) CpG-island No: 27239
tcggggcgattagggaagcgggacgttaagggcggagtggttttattttaattcgggagtgacgggttttttttggttcgtttttcgagttttcggataggtggagtcgttttttggttcgtttatttttcgttttgtgttattttcgattggttcgggtgcgggttgggtcgttcggttttggcgttgttttcgggaaggtagtaggggcggttgagaagtgaagttttggtcggagtttgttttttgttaggaaattcgcggcggcggcggcggcggcggcgatttttggcggagcggagtcgggtaggtttttcgtttttttagcgggtcgcggagagcgggagttggtgtcgagtagcggcgttaggagttcgtgcgcggttcgggtagtcgcgtttttttagtgagtaattttgttttgttcgtttcgttgcgcgttttttcgttggttgcgggtagtcgttttaggtgcgggcgttagttgggtgtgggttagcgtcgcgtttcgggaggcggtcggagcggcgttatagttcgtttcggagttttggtttttcgcggttgttttcgttcgttcgggttgcggggttggcgtggattcgggtgtgggtttggtttaggagggagagtcggcgttcggtgttcgtcgtttgtaggcgttcgggaggcgggcggttttcggttgttagcgtttgttggtttcggttatcgtggtgtagag

SEQ ID NO: 27240 - DNA, 724 bp, Artificial Sequence
  chemically treated genomic DNA (Homo sapiens) CpG-island No: 27240
ctctacaccacgataaccgaaaccaacaaacgctaacaaccgaaaaccgcccgcctcccgaacgcctacaaacgacgaacaccgaacgccgactctccctcctaaaccaaacccacacccgaatccacgccaaccccgcaacccgaacgaacgaaaacaaccgcgaaaaaccaaaactccgaaacgaactataacgccgctccgaccgcctcccgaaacgcgacgctaacccacacccaactaacgcccgcacctaaaacgactacccgcaaccaacgaaaaaacgcgcaacgaaacgaacaaaacaaaattactcactaaaaaaacgcgactacccgaaccgcgcacgaactcctaacgccgctactcgacaccaactcccgctctccgcgacccgctaaaaaaacgaaaaacctacccgactccgctccgccaaaaatcgccgccgccgccgccgccgccgcgaatttcctaacaaaaaacaaactccgaccaaaacttcacttctcaaccgcccctactaccttcccgaaaacaacgccaaaaccgaacgacccaacccgcacccgaaccaatcgaaaataacacaaaacgaaaaataaacgaaccaaaaaacgactccacctatccgaaaactcgaaaaacgaaccaaaaaaaacccgtcactcccgaattaaaataaaaccactccgcccttaacgtcccgcttccctaatcgccccga

SEQ ID NO: 27241 - DNA, 630 bp, Artificial Sequence
  chemically treated genomic DNA (Homo sapiens) CpG-island No: 27241
tacgtaacgagcggttgcgattttttagtttttaattttgtttttaagtgcgtttcgagcgttattcggcgttgttttcgtattatttcgtgattcgatataaattacggtgagtaggggttttcgttttagtattttattttttatcgttaacgtcgattttaatttcgatagtgcgcgcgtcgtcgtatttatttgtagggtatcggttagtggcgtcgggaggggatgttcgagattcgggattagttcggaattatcgcgagttaaagtagcgttagggtttagtattaggaagcgcgttttcgagtcgcgttcgcgtttcgtcgtatttcggcgttttgtgtcgtgtttattttttgcgttattaggttgtatttagtattttcggagtttttcgaggtttgcgacgtcggtgggaggagtatgcgcggagtcgttagttcgggacgcggggcgttttgtttttgcgcgttagttttagagtttggttttaagcgtaggtttcggcgtatgatattttttcgcgttcggttcgcggcggtttttatattttgtagtttaggaaggtgttttggtttggtttttaggagaattcgatttagatttggggcgttattttttatgaat

SEQ ID NO: 27242 - DNA, 630 bp, Artificial Sequence
  chemically treated genomic DNA (Homo sapiens) CpG-island No: 27242
attcataaaaaataacgccccaaatctaaatcgaattctcctaaaaaccaaaccaaaacaccttcctaaactacaaaatataaaaaccgccgcgaaccgaacgcgaaaaaatatcatacgccgaaacctacgcttaaaaccaaactctaaaactaacgcgcaaaaacaaaacgccccgcgtcccgaactaacgactccgcgcatactcctcccaccgacgtcgcaaacctcgaaaaactccgaaaatactaaatacaacctaataacgcaaaaaataaacacgacacaaaacgccgaaatacgacgaaacgcgaacgcgactcgaaaacgcgcttcctaatactaaaccctaacgctactttaactcgcgataattccgaactaatcccgaatctcgaacatcccctcccgacgccactaaccgataccctacaaataaatacgacgacgcgcgcactatcgaaattaaaatcgacgttaacgataaaaaataaaatactaaaacgaaaacccctactcaccgtaatttatatcgaatcacgaaataatacgaaaacaacgccgaataacgctcgaaacgcacttaaaaacaaaattaaaaactaaaaaatcgcaaccgctcgttacgta

SEQ ID NO: 27243 - DNA, 630 bp, Artificial Sequence
  chemically treated genomic DNA (Homo sapiens) CpG-island No: 27243
gtttataaaagatgacgttttaggtttggatcgaatttttttgggagttagattaaagtatttttttggattgtaaagtgtggaagtcgtcgcgggtcgggcgcggggaggtgttatgcgtcggaatttgcgtttggggttaagttttggagttgacgcgtaggggtaaggcgtttcgcgtttcggattggcggtttcgcgtatgttttttttatcggcgtcgtaggtttcgagaggtttcggaagtattgggtgtagtttgatggcgtaggaggtagatacggtatagggcgtcgagatgcggcggggcgcgggcgcggttcggggacgcgttttttggtgttgggttttggcgttgttttggttcgcggtggtttcgggttggtttcgggtttcgggtattttttttcggcgttattggtcggtgttttataagtgagtgcggcggcgcgcgtattgtcggggttggggtcggcgttgacgatgggggatggggtgttggggcggggatttttgtttatcgtggtttgtgtcgggttacgagatggtgcggggatagcgtcgggtgacgttcggagcgtatttgagagtaaagttgaggattggggagtcgtagtcgttcgttacgtg

SEQ ID NO: 27244 - DNA, 630 bp, Artificial Sequence
  chemically treated genomic DNA (Homo sapiens) CpG-island No: 27244
cacgtaacgaacgactacgactccccaatcctcaactttactctcaaatacgctccgaacgtcacccgacgctatccccgcaccatctcgtaacccgacacaaaccacgataaacaaaaatccccgccccaacaccccatcccccatcgtcaacgccgaccccaaccccgacaatacgcgcgccgccgcactcacttataaaacaccgaccaataacgccgaaaaaaaatacccgaaacccgaaaccaacccgaaaccaccgcgaaccaaaacaacgccaaaacccaacaccaaaaaacgcgtccccgaaccgcgcccgcgccccgccgcatctcgacgccctataccgtatctacctcctacgccatcaaactacacccaatacttccgaaacctctcgaaacctacgacgccgataaaaaaaacatacgcgaaaccgccaatccgaaacgcgaaacgccttacccctacgcgtcaactccaaaacttaaccccaaacgcaaattccgacgcataacacctccccgcgcccgacccgcgacgacttccacactttacaatccaaaaaaatactttaatctaactcccaaaaaaattcgatccaaacctaaaacgtcatcttttataaac

SEQ ID NO: 27245 - DNA, 854 bp, Artificial Sequence
  chemically treated genomic DNA (Homo sapiens) CpG-island No: 27245
ggtgtacgtgattcggcgttgtacggtggtgtcggtgttcgattcgttgttttggcgtatgtttacgtagtagtagtcgtaggagttagttcgggatagtaaaggtcgtttttttttggatcgggacggttttttttttcgttatattttggattatttgcgggatttgtagttcgtgttgttcgattattttttcgagcgtagtcggttgtagcgcgaggtcgagtatttcgagttgttagagttcgtgcgtcgtttcggggcgttttagtagttcggttcggggtcgtcgttttcgcggcgcggggtgtataaggagggttcgttgggtgacgagttgttgtcgtttggttattcggagttcgaatagtaggagggcgtttttgtcggggcgtcgtcgtttacgttggagttggttagtcgtagttcgttcgggggcgcggcgggttcgttgtttacgtcgttttagtcgttggacggtagtcggcgttcgggttatattattatcggttatcgcggtttttatattatcgggcgggacgcgtaggcggacgttaagtttcggcgagtggcgcgtattatcgtttgcggaaagacgtcgttggttaaggaggtgtttggggatattttgaacgaaagtcgggatttcgatcgtttttcggagcgttatatttcgcgttattattttaagtttaattttttggagtaggttttcgataagttgttcgagtcgggtttttatatggtggcgtgtagttttacgggtatttgcgtttttgttagtagtatcgattagagcgaggataagatttggattagttatatcgagtacgttttttgtagggagtgagttt

SEQ ID NO: 27246 - DNA, 854 bp, Artificial Sequence
  chemically treated genomic DNA (Homo sapiens) CpG-island No: 27246
aaactcactccctacaaaaaacgtactcgatataactaatccaaatcttatcctcgctctaatcgatactactaacaaaaacgcaaatacccgtaaaactacacgccaccatataaaaacccgactcgaacaacttatcgaaaacctactccaaaaaattaaacttaaaataataacgcgaaatataacgctccgaaaaacgatcgaaatcccgactttcgttcaaaatatccccaaacacctccttaaccaacgacgtctttccgcaaacgataatacgcgccactcgccgaaacttaacgtccgcctacgcgtcccgcccgataatataaaaaccgcgataaccgataataatataacccgaacgccgactaccgtccaacgactaaaacgacgtaaacaacgaacccgccgcgcccccgaacgaactacgactaaccaactccaacgtaaacgacgacgccccgacaaaaacgccctcctactattcgaactccgaataaccaaacgacaacaactcgtcacccaacgaaccctccttatacaccccgcgccgcgaaaacgacgaccccgaaccgaactactaaaacgccccgaaacgacgcacgaactctaacaactcgaaatactcgacctcgcgctacaaccgactacgctcgaaaaaataatcgaacaacacgaactacaaatcccgcaaataatccaaaatataacgaaaaaaaaaaccgtcccgatccaaaaaaaaacgacctttactatcccgaactaactcctacgactactactacgtaaacatacgccaaaacaacgaatcgaacaccgacaccaccgtacaacgccgaatcacgtacacc

SEQ ID NO: 27247 - DNA, 854 bp, Artificial Sequence
  chemically treated genomic DNA (Homo sapiens) CpG-island No: 27247
gagtttattttttgtagaagacgtattcggtgtagttggtttagattttgttttcgttttggtcggtgttgttggtaaaggcgtaggtgttcgtggagttgtacgttattatgtggaagttcgattcggatagtttgtcgaaggtttgttttaggaagttgaatttgaggtaatagcgcgaggtgtagcgtttcgggggacggtcggggtttcggttttcgtttagggtgtttttaaatatttttttggttagcgacgttttttcgtaaacggtgatgcgcgttattcgtcggaatttggcgttcgtttgcgcgtttcgttcgatggtgtaggagtcgcggtagtcgatggtgatgtagttcgagcgtcggttgtcgtttagcgattgggacggcgtgagtagcgggttcgtcgcgttttcggacggattgcggttagttagttttagcgtgggcgacggcgtttcggtagaggcgtttttttgttgttcgggtttcgagtagttaagcggtagtagttcgttatttagcgagttttttttgtgtatttcgcgtcgcgagggcggcggtttcgggtcgggttgttggggcgtttcgaggcggcgtacgagttttggtagttcgaagtattcggtttcgcgttgtagtcggttgcgttcggggaagtagtcgggtagtacgagttgtaagtttcgtaggtaatttaggatgtagcggaagaggaagtcgtttcggtttagaaagaagcggtttttgttgtttcgggttagtttttgcggttgttgttgcgtgaatatgcgttagagtagcgagtcgggtatcgatattatcgtgtagcgtcgggttacgtatatt

SEQ ID NO: 27248 - DNA, 854 bp, Artificial Sequence
  chemically treated genomic DNA (Homo sapiens) CpG-island No: 27248
aatatacgtaacccgacgctacacgataatatcgatacccgactcgctactctaacgcatattcacgcaacaacaaccgcaaaaactaacccgaaacaacaaaaaccgcttctttctaaaccgaaacgacttcctcttccgctacatcctaaattacctacgaaacttacaactcgtactacccgactacttccccgaacgcaaccgactacaacgcgaaaccgaatacttcgaactaccaaaactcgtacgccgcctcgaaacgccccaacaacccgacccgaaaccgccgccctcgcgacgcgaaatacacaaaaaaaactcgctaaataacgaactactaccgcttaactactcgaaacccgaacaacaaaaaaacgcctctaccgaaacgccgtcgcccacgctaaaactaactaaccgcaatccgtccgaaaacgcgacgaacccgctactcacgccgtcccaatcgctaaacgacaaccgacgctcgaactacatcaccatcgactaccgcgactcctacaccatcgaacgaaacgcgcaaacgaacgccaaattccgacgaataacgcgcatcaccgtttacgaaaaaacgtcgctaaccaaaaaaatatttaaaaacaccctaaacgaaaaccgaaaccccgaccgtcccccgaaacgctacacctcgcgctattacctcaaattcaacttcctaaaacaaaccttcgacaaactatccgaatcgaacttccacataataacgtacaactccacgaacacctacgcctttaccaacaacaccgaccaaaacgaaaacaaaatctaaaccaactacaccgaatacgtcttctacaaaaaataaactc

SEQ ID NO: 27249 - DNA, 868 bp, Artificial Sequence
  chemically treated genomic DNA (Homo sapiens) CpG-island No: 27249
acgcgtatatagttgggtacgttttcgggaggtagttgtcggttcgggcgttttgggggtcgggcggcggtcgtgatagcgttagtcgcggggagcggggcgttcgtatagtttggtatcggaggttcgaggacgtaggaagggaagattttagttatattgagtgttgtttttttgggcggattgggagggagcgggttgttcgaggagttgttatcgaggacgttcgaagtttcgttttttgcgcgtagggttcggggttgcgtcggtgttttcgtggggtaaggaggatgcgtattttttttcgtagagcggttgcggttttcggtattgcgcggatttcggtttttgcggtcgttcgtgtcgtgttcgcgttacgggagcgcgttttgtcgtatttggttttagtttttcggggaagtgtaggaaacgcgttttaaattttattatttttcgttcgtttgttttttcgttcggtttttcgttttagatttcgtcgtcgtcgtcgtcgtcgtcgtcgtttgcgtgtggggttcgttcgcgttttatttatacgcgttacgtatagttttgttggtttgtttttatttacgtcgattcgtttttcgtcgagtttagttcgggtattcgaaattattggattaattgtcgttcggatcgtagtagcggtcgggtgatttttacgcgattcgtcgtcgattttcgcgttttgaggttttcgttcgcgtcgttatcgtcggggattacggtgagtaaggcgcgttgttcgtttcgcgcgggggaggggttttgagatttttagatttggggggaaatgagaaggggtaaatcgttaaagggaagtattcgggtgatgttagtaaaaaag

SEQ ID NO: 27250 - DNA, 868 bp, Artificial Sequence
  chemically treated genomic DNA (Homo sapiens) CpG-island No: 27250
cttttttactaacatcacccgaatacttccctttaacgatttaccccttctcatttccccccaaatctaaaaatctcaaaacccctcccccgcgcgaaacgaacaacgcgccttactcaccgtaatccccgacgataacgacgcgaacgaaaacctcaaaacgcgaaaatcgacgacgaatcgcgtaaaaatcacccgaccgctactacgatccgaacgacaattaatccaataatttcgaatacccgaactaaactcgacgaaaaacgaatcgacgtaaataaaaacaaaccaacaaaactatacgtaacgcgtataaataaaacgcgaacgaaccccacacgcaaacgacgacgacgacgacgacgacgacgaaatctaaaacgaaaaaccgaacgaaaaaacaaacgaacgaaaaataataaaatttaaaacgcgtttcctacacttccccgaaaaactaaaaccaaatacgacaaaacgcgctcccgtaacgcgaacacgacacgaacgaccgcaaaaaccgaaatccgcgcaataccgaaaaccgcaaccgctctacgaaaaaaaatacgcatcctccttaccccacgaaaacaccgacgcaaccccgaaccctacgcgcaaaaaacgaaacttcgaacgtcctcgataacaactcctcgaacaacccgctccctcccaatccgcccaaaaaaacaacactcaatataactaaaatcttcccttcctacgtcctcgaacctccgataccaaactatacgaacgccccgctccccgcgactaacgctatcacgaccgccgcccgacccccaaaacgcccgaaccgacaactacctcccgaaaacgtacccaactatatacgcgt

SEQ ID NO: 27251 - DNA, 868 bp, Artificial Sequence
  chemically treated genomic DNA (Homo sapiens) CpG-island No: 27251
tttttttgttggtattattcggatgtttttttttggcgatttgtttttttttatttttttttaaatttagaggttttaaagtttttttttcgcgcgaggcgggtagcgcgttttgtttatcgtggttttcggcggtggcggcgcgggcgggagttttagggcgcgggggtcggcggcgggtcgcgtgggggttattcggtcgttgttgcggttcggacggtagttggtttagtagtttcggatgttcgggttaggttcggcggagagcgagtcggcgtgaatgagagtaaattaatagggttgtgcgtggcgcgtgtgagtaagacgcgagcgggttttatacgtaggcggcggcggcggcggcggcggcggcgaggtttgaggcggggagtcgggcgggggggtaggcgggcgagaagtagtggagtttagggcgcgttttttgtattttttcgagaggttggaattaggtgcggtagggcgcgttttcgtggcgcgggtacggtacgggcggtcgtaggagtcggagttcgcgtagtgtcggagatcgtagtcgttttgcggggggaggtgcgtattttttttgttttacgagggtatcggcgtagtttcggattttgcgcgtagagggcgagatttcgggcgttttcggtgatagtttttcgggtagttcgtttttttttaattcgtttaaaagagtaatatttagtgtgattgggattttttttttttgcgttttcgagttttcggtgttaagttgtgcgggcgtttcgtttttcgcggttggcgttgttacggtcgtcgttcggtttttagagcgttcgagtcggtagttgtttttcggagacgtgtttagttgtgtgcgcgt

SEQ ID NO: 27252 - DNA, 868 bp, Artificial Sequence
  chemically treated genomic DNA (Homo sapiens) CpG-island No: 27252
acgcgcacacaactaaacacgtctccgaaaaacaactaccgactcgaacgctctaaaaaccgaacgacgaccgtaacaacgccaaccgcgaaaaacgaaacgcccgcacaacttaacaccgaaaactcgaaaacgcaaaaaaaaaaaatcccaatcacactaaatattactcttttaaacgaattaaaaaaaaacgaactacccgaaaaactatcaccgaaaacgcccgaaatctcgccctctacgcgcaaaatccgaaactacgccgataccctcgtaaaacaaaaaaaatacgcacctccccccgcaaaacgactacgatctccgacactacgcgaactccgactcctacgaccgcccgtaccgtacccgcgccacgaaaacgcgccctaccgcacctaattccaacctctcgaaaaaatacaaaaaacgcgccctaaactccactacttctcgcccgcctacccccccgcccgactccccgcctcaaacctcgccgccgccgccgccgccgccgccgcctacgtataaaacccgctcgcgtcttactcacacgcgccacgcacaaccctattaatttactctcattcacgccgactcgctctccgccgaacctaacccgaacatccgaaactactaaaccaactaccgtccgaaccgcaacaacgaccgaataacccccacgcgacccgccgccgacccccgcgccctaaaactcccgcccgcgccgccaccgccgaaaaccacgataaacaaaacgcgctacccgcctcgcgcgaaaaaaaaactttaaaacctctaaatttaaaaaaaaataaaaaaaaacaaatcgccaaaaaaaaacatccgaataataccaacaaaaaaa

SEQ ID NO: 27253 - DNA, 727 bp, Artificial Sequence
  chemically treated genomic DNA (Homo sapiens) CpG-island No: 27253
ttcgggtcggggttttattcgtttttttagcgtttcggttgttatcgcgcgggggtcggtcgagtcgtagcgttcggtttttgggggcgacgtttttaggtttcgcgtcggtttttgggagtcgggttcgtgcggcggacggttaggttttttcgttagtaaacggttgtttggggcgtttcgatcgttttttcgttttacggtagaaggcggcggcgcgcgaggggaggggagggtaggtcgggtgattgcgatttcgcgtgtttatttgttggttcgcgaggttgagggagggggcgtcgggggcggggttagagcgcggttggttaatgggggagcgtattcggcggtcggttaaattttttttggaaagtgaagggggttggggtcgaggggaaagttcgaagtttcggagtagcggagggttttggtggcggttagaattattcggggatagttgtaggcgtaggggtaagatcgggggatcggaagacgttagtcgcggtcgcggtcgttttcgttagggacggtaggtttaattttggttgttttttttttttcgggtttcgtcgggttattttttcgttatcgttggttcgatagcgttatttgttggacgtcggtttttacgttcggcgcgtcggggttcgaagttttcggaggttgggattttagtttgggaggggaaggagtttatttattttaggtttagcggttttagagttgg

SEQ ID NO: 27254 - DNA, 727 bp, Artificial Sequence
  chemically treated genomic DNA (Homo sapiens) CpG-island No: 27254
ccaactctaaaaccgctaaacctaaaataaataaactccttcccctcccaaactaaaatcccaacctccgaaaacttcgaaccccgacgcgccgaacgtaaaaaccgacgtccaacaaataacgctatcgaaccaacgataacgaaaaaataacccgacgaaacccgaaaaaaaaaaaacaaccaaaattaaacctaccgtccctaacgaaaacgaccgcgaccgcgactaacgtcttccgatcccccgatcttacccctacgcctacaactatccccgaataattctaaccgccaccaaaaccctccgctactccgaaacttcgaactttcccctcgaccccaacccccttcactttccaaaaaaaatttaaccgaccgccgaatacgctcccccattaaccaaccgcgctctaaccccgcccccgacgccccctccctcaacctcgcgaaccaacaaataaacacgcgaaatcgcaatcacccgacctaccctcccctcccctcgcgcgccgccgccttctaccgtaaaacgaaaaaacgatcgaaacgccccaaacaaccgtttactaacgaaaaaacctaaccgtccgccgcacgaacccgactcccaaaaaccgacgcgaaacctaaaaacgtcgcccccaaaaaccgaacgctacgactcgaccgacccccgcgcgataacaaccgaaacgctaaaaaaacgaataaaaccccgacccgaa

SEQ ID NO: 27255 - DNA, 727 bp, Artificial Sequence
  chemically treated genomic DNA (Homo sapiens) CpG-island No: 27255
ttagttttgaagtcgttggatttggggtgagtgagttttttttttttttagattgaggttttagttttcgagaatttcgggtttcggcgcgtcggacgtggaggtcgacgtttagtaggtggcgttgtcgagttagcgatggcgggagagtggttcggcggggttcgggaagggaggggtagttagggttgggtttatcgtttttggcggaggcggtcgcggtcgcggttggcgtttttcggtttttcgattttgtttttgcgtttgtaattgttttcggatggttttggtcgttattaaagtttttcgttgtttcggagtttcgaatttttttttcgattttagttttttttattttttagggggaatttagtcggtcgtcgaatgcgtttttttattggttagtcgcgttttggtttcgttttcggcgtttttttttttagtttcgcggattagtaggtgagtacgcggagtcgtagttattcggtttgttttttttttttttcgcgcgtcgtcgttttttatcgtgaagcgggagagcgatcgaggcgttttagatagtcgtttgttagcggagggatttgatcgttcgtcgtacgagttcggtttttaaggatcggcgcggggtttaaagacgtcgtttttagaggtcggacgttgcggttcggtcgattttcgcgcggtggtagtcggagcgttagggaaacgagtggagtttcggttcgga

SEQ ID NO: 27256 - DNA, 727 bp, Artificial Sequence
  chemically treated genomic DNA (Homo sapiens) CpG-island No: 27256
tccgaaccgaaactccactcgtttccctaacgctccgactaccaccgcgcgaaaatcgaccgaaccgcaacgtccgacctctaaaaacgacgtctttaaaccccgcgccgatccttaaaaaccgaactcgtacgacgaacgatcaaatccctccgctaacaaacgactatctaaaacgcctcgatcgctctcccgcttcacgataaaaaacgacgacgcgcgaaaaaaaaaaaaaacaaaccgaataactacgactccgcgtactcacctactaatccgcgaaactaaaaaaaaaaacgccgaaaacgaaaccaaaacgcgactaaccaataaaaaaacgcattcgacgaccgactaaattccccctaaaaaataaaaaaaactaaaatcgaaaaaaaaattcgaaactccgaaacaacgaaaaactttaataacgaccaaaaccatccgaaaacaattacaaacgcaaaaacaaaatcgaaaaaccgaaaaacgccaaccgcgaccgcgaccgcctccgccaaaaacgataaacccaaccctaactacccctcccttcccgaaccccgccgaaccactctcccgccatcgctaactcgacaacgccacctactaaacgtcgacctccacgtccgacgcgccgaaacccgaaattctcgaaaactaaaacctcaatctaaaaaaaaaaaaaactcactcaccccaaatccaacgacttcaaaactaa

SEQ ID NO: 27257 - DNA, 940 bp, Artificial Sequence
  chemically treated genomic DNA (Homo sapiens) CpG-island No: 27257
atatgttcgcgttgcggaggggtcgtgaatcgtaattggtgtgcggggtgatcgatatttgttaaagttttagcggaaagaaggcgggcggtgttttggcgttcgtaatatatgacgacgatgtttttgagttttaaggttgggtagtcggcgagagcggcgtatataatattacgtattatttcggtttgacgattaatttcgtggtattggtgtatttcgattgttggtagttttttgcggtgggtaatcgcgttttgcgtagtacggatcgatgacgatgtttatcgcgcggtcgtggtagagcgtgttcggttaaaggttcgttacggattcgtattattaatgttatgatcgagatggacgatggtgacgtcgtgtgaggtcgataacgttttcgttaagttgacgtcgtgttgagtcgtggtcgtcgatgaaaattatacgatcggcggtttagatcgtgattgagtgagtatcgcgtcgacgaggagttggtgtcggtttacggggttcggaatatggtacggtttggtaaggagggtacgttatagcggggtttattacgcgcgggcggggtttagcgggttattcgtaaggttagtatcgttttggtgagatgtgggggcggtatcgtcggtttaggtatttaagacgtcgtgagagtcgcgagttagcgcgtagatcgcgtttgtagtttgtcgtgtagttgtttatgttgtacgcggtattttttgtcgacggttggtttttagatgggttgaaataattttaaaatcgggggaattgtttttaatgatgcggtatatacgtagggttaggggttcgggttgttacggatcgttttttcgtttgatttttaggagatttttttcgagtcgttttcgtagatttagcggcgttgttgtatcgatatcggttgcgattttatgacggcggg

SEQ ID NO: 27258 - DNA, 940 bp, Artificial Sequence
  chemically treated genomic DNA (Homo sapiens) CpG-island No: 27258
cccgccgtcataaaatcgcaaccgatatcgatacaacaacgccgctaaatctacgaaaacgactcgaaaaaaatctcctaaaaatcaaacgaaaaaacgatccgtaacaacccgaacccctaaccctacgtatataccgcatcattaaaaacaattcccccgattttaaaattatttcaacccatctaaaaaccaaccgtcgacaaaaaataccgcgtacaacataaacaactacacgacaaactacaaacgcgatctacgcgctaactcgcgactctcacgacgtcttaaatacctaaaccgacgataccgcccccacatctcaccaaaacgatactaaccttacgaataacccgctaaaccccgcccgcgcgtaataaaccccgctataacgtaccctccttaccaaaccgtaccatattccgaaccccgtaaaccgacaccaactcctcgtcgacgcgatactcactcaatcacgatctaaaccgccgatcgtataattttcatcgacgaccacgactcaacacgacgtcaacttaacgaaaacgttatcgacctcacacgacgtcaccatcgtccatctcgatcataacattaataatacgaatccgtaacgaacctttaaccgaacacgctctaccacgaccgcgcgataaacatcgtcatcgatccgtactacgcaaaacgcgattacccaccgcaaaaaactaccaacaatcgaaatacaccaataccacgaaattaatcgtcaaaccgaaataatacgtaatattatatacgccgctctcgccgactacccaaccttaaaactcaaaaacatcgtcgtcatatattacgaacgccaaaacaccgcccgccttctttccgctaaaactttaacaaatatcgatcaccccgcacaccaattacgattcacgacccctccgcaacgcgaacatat

SEQ ID NO: 27259 - DNA, 940 bp, Artificial Sequence
  chemically treated genomic DNA (Homo sapiens) CpG-island No: 27259
ttcgtcgttatggaatcgtagtcggtatcgatataataacgtcgttgggtttacgagaacgattcgaggaagattttttgggaattaagcgggaaaacgattcgtggtagttcgggtttttggttttgcgtatatgtcgtattattgagaataattttttcggttttgaggttgttttagtttatttggaagttagtcgtcggtaaggagtgtcgcgtgtaatatggataattgtacgataagttgtagacgcgatttgcgcgttagttcgcgatttttacgacgttttgaatgtttgggtcgacggtgtcgtttttatattttattagggcgatattgattttgcgggtgattcgttggatttcgttcgcgcgtggtgggtttcgttgtggcgtattttttttgttaaatcgtgttatgtttcggatttcgtgagtcgatattagtttttcgtcgacgcgatatttatttagttacgatttgaatcgtcgatcgtgtggtttttatcgacgattacggtttagtacgacgttagtttggcggaagcgttgtcggttttatacgacgttattatcgtttatttcgattatggtattggtggtgcggattcgtggcggatttttgatcgggtacgttttgttacgatcgcgcgatggatatcgttatcgattcgtattgcgtagagcgcggttatttatcgtaaagagttgttaatagtcgaaatatattaatgttacggagttgatcgttaggtcgaagtagtacgtgatgttgtatgcgtcgttttcgtcgattatttaattttggaatttagggatatcgtcgttatatgttgcgggcgttaggatatcgttcgtttttttttcgttgggattttggtagatatcgattatttcgtatattagttgcggtttacgattttttcgtaacgcgagtatgt

SEQ ID NO: 27260 - DNA, 940 bp, Artificial Sequence
  chemically treated genomic DNA (Homo sapiens) CpG-island No: 27260
acatactcgcgttacgaaaaaatcgtaaaccgcaactaatatacgaaataatcgatatctaccaaaatcccaacgaaaaaaaaacgaacgatatcctaacgcccgcaacatataacgacgatatccctaaattccaaaattaaataatcgacgaaaacgacgcatacaacatcacgtactacttcgacctaacgatcaactccgtaacattaatatatttcgactattaacaactctttacgataaataaccgcgctctacgcaatacgaatcgataacgatatccatcgcgcgatcgtaacaaaacgtacccgatcaaaaatccgccacgaatccgcaccaccaataccataatcgaaataaacgataataacgtcgtataaaaccgacaacgcttccgccaaactaacgtcgtactaaaccgtaatcgtcgataaaaaccacacgatcgacgattcaaatcgtaactaaataaatatcgcgtcgacgaaaaactaatatcgactcacgaaatccgaaacataacacgatttaacaaaaaaaatacgccacaacgaaacccaccacgcgcgaacgaaatccaacgaatcacccgcaaaatcaatatcgccctaataaaatataaaaacgacaccgtcgacccaaacattcaaaacgtcgtaaaaatcgcgaactaacgcgcaaatcgcgtctacaacttatcgtacaattatccatattacacgcgacactccttaccgacgactaacttccaaataaactaaaacaacctcaaaaccgaaaaaattattctcaataatacgacatatacgcaaaaccaaaaacccgaactaccacgaatcgttttcccgcttaattcccaaaaaatcttcctcgaatcgttctcgtaaacccaacgacgttattatatcgataccgactacgattccataacgacgaa

SEQ ID NO: 27261 - DNA, 1267 bp, Artificial Sequence
  chemically treated genomic DNA (Homo sapiens) CpG-island No: 27261
agtagtcgttggtcgtatagttttcgggtcggtcgcgatttcgttttgcgtcgcgaaggtttttagtttcggggagtcgcgggcgaggggtacgcgtacggacgagatcgtatcgtagcgtacgcgtattggcgggtatttattcgttcgtcgttcgggaggagaaggaaggtatggaaagttttagtcggttcgagagttaggtagtaggtatggtaggaggcggggtaggggtaggtagggtcgcgagggggcgtgcggtcgtcgcgagtcgttttgggtcgcgtttgtagtatcgtttttagtcgcggtcggcgggttgggttggggtcggggcgggggcggtgcggcgggtgcggggttgcggagggggcgtggcggtcgttcgcgggcggagagggggcggggcggcggtaaggcgcgcgggcggggcggggcgcgtcgagggggcgtggcgcggcgtttgcgtagttgttagcgtttttaagttcgggttcgcgttttcggatcgtgttttcgtcgtttgggagtcgttcggcgtagtagtttttaggtttttattgttttcgtcgtttcgttttttcgcgtttcgggaatcggttggttttcgagtcgtattcgtcgattttttaggtatgtttcgttacgagttggttttaattttgaaagttatgtagcgggtaagtgatttttttttagagtcggttttttcgcgcgggcgttttcgttgtcgttaggtcgtcgtttttcgcgcgttttggtcgcgggatttcgggtttttttgtatttttcggaggaggtcggggcggcgggcgggcggcgggcgttcgcgggaagggggcgcgcgtgggtcggtcgggttcggtcgcgtgcgcgcgggaggcgggggtgtgtttgcgcgtgtgcgcggttcgggagggtgtgtttcgtaagcggttcgtcgggcggggggcggggcggatcgagcgggtttcgatttcgatttcggcgtcggttcgcgggagtttagtggaaggttcgcgggaggatacgcgcgggcgtttagttcgatttcggttcgttttcgttagtcgtgaagttgtttcgtcgtcggtttcgtcgtcgtcgtttggttcgtttcgtttcgtcgttcgtcggttgtcgtcgatcgttttcgttttagcgttcgtcggtcgttcggaacgttcgcgtttaataaagcgtttttttaaagtttgtttgtgtcgttgtttgtattttagttttttgtaatcgtttttatgttaaa

SEQ ID NO: 27262 - DNA, 1267 bp, Artificial Sequence
  chemically treated genomic DNA (Homo sapiens) CpG-island No: 27262
tttaacataaaaacgattacaaaaaactaaaatacaaacaacgacacaaacaaactttaaaaaaacgctttattaaacgcgaacgttccgaacgaccgacgaacgctaaaacgaaaacgatcgacgacaaccgacgaacgacgaaacgaaacgaaccaaacgacgacgacgaaaccgacgacgaaacaacttcacgactaacgaaaacgaaccgaaatcgaactaaacgcccgcgcgtatcctcccgcgaaccttccactaaactcccgcgaaccgacgccgaaatcgaaatcgaaacccgctcgatccgccccgccccccgcccgacgaaccgcttacgaaacacaccctcccgaaccgcgcacacgcgcaaacacacccccgcctcccgcgcgcacgcgaccgaacccgaccgacccacgcgcgcccccttcccgcgaacgcccgccgcccgcccgccgccccgacctcctccgaaaaatacaaaaaaacccgaaatcccgcgaccaaaacgcgcgaaaaacgacgacctaacgacaacgaaaacgcccgcgcgaaaaaaccgactctaaaaaaaaatcacttacccgctacataactttcaaaattaaaaccaactcgtaacgaaacatacctaaaaaatcgacgaatacgactcgaaaaccaaccgattcccgaaacgcgaaaaaacgaaacgacgaaaacaataaaaacctaaaaactactacgccgaacgactcccaaacgacgaaaacacgatccgaaaacgcgaacccgaacttaaaaacgctaacaactacgcaaacgccgcgccacgccccctcgacgcgccccgccccgcccgcgcgccttaccgccgccccgccccctctccgcccgcgaacgaccgccacgccccctccgcaaccccgcacccgccgcaccgcccccgccccgaccccaacccaacccgccgaccgcgactaaaaacgatactacaaacgcgacccaaaacgactcgcgacgaccgcacgccccctcgcgaccctacctacccctaccccgcctcctaccatacctactacctaactctcgaaccgactaaaactttccataccttccttctcctcccgaacgacgaacgaataaatacccgccaatacgcgtacgctacgatacgatctcgtccgtacgcgtacccctcgcccgcgactccccgaaactaaaaaccttcgcgacgcaaaacgaaatcgcgaccgacccgaaaactatacgaccaacgactact

SEQ ID NO: 27263 - DNA, 1267 bp, Artificial Sequence
  chemically treated genomic DNA (Homo sapiens) CpG-island No: 27263
tttaatatgagagcgattgtaagagattggaatatagataacggtataaataagttttggaggaacgttttattgggcgcggacgtttcgggcggtcggcgggcgttagagcggaggcggtcggcggtagtcggcgggcggcggagcgggacggattaggcggcggcggcggggtcggcgacgaggtagttttacgattggcggggacgggtcggagtcgggttgggcgttcgcgcgtgttttttcgcggattttttattggattttcgcgggtcggcgtcgggatcggggtcggggttcgttcggttcgtttcgtttttcgttcggcgggtcgtttgcgaggtatattttttcggatcgcgtatacgcgtaggtatattttcgtttttcgcgcgtacgcggtcgggttcggtcggtttacgcgcgtttttttttcgcggacgttcgtcgttcgttcgtcgtttcggtttttttcgaggagtgtaggaaggttcggggtttcgcggttagggcgcgcgggggacggcggtttagcggtagcgggggcgttcgcgcgggaagatcggttttgagggaaggttatttattcgttgtatggtttttaggattaaagttagttcgtagcggggtatgtttggaggatcggcgagtgcggttcggaagttagtcggttttcgggacgcgaaggggcgggacggcggggatagtggggatttagaaattgttgcgtcggacggtttttaggcggcgaaagtacggttcgagagcgcgagttcgggtttaaaggcgttggtagttgcgtagacgtcgcgttacgttttttcggcgcgtttcgtttcgttcgcgcgttttgtcgtcgtttcgtttttttttcgttcgcgggcggtcgttacgtttttttcgtagtttcgtattcgtcgtatcgttttcgtttcgattttagtttagttcgtcggtcgcggttaggggcggtgttgtagacgcggtttagagcggttcgcggcggtcgtacgttttttcgcgattttgtttgtttttatttcgttttttgttatgtttgttatttagttttcgaatcggttggaattttttatgtttttttttttttttcgggcggcgggcgagtgagtgttcgttagtgcgcgtgcgttgcggtgcggtttcgttcgtgcgcgtgtttttcgttcgcgatttttcggagttagggattttcgcggcgtaaggcggggtcgcggtcggttcgggggttgtgcggttaacggttgtt

SEQ ID NO: 27264 - DNA, 1267 bp, Artificial Sequence
  chemically treated genomic DNA (Homo sapiens) CpG-island No: 27264
aacaaccgttaaccgcacaacccccgaaccgaccgcgaccccgccttacgccgcgaaaatccctaactccgaaaaatcgcgaacgaaaaacacgcgcacgaacgaaaccgcaccgcaacgcacgcgcactaacgaacactcactcgcccgccgcccgaaaaaaaaaaaaaaacataaaaaattccaaccgattcgaaaactaaataacaaacataacaaaaaacgaaataaaaacaaacaaaatcgcgaaaaaacgtacgaccgccgcgaaccgctctaaaccgcgtctacaacaccgcccctaaccgcgaccgacgaactaaactaaaatcgaaacgaaaacgatacgacgaatacgaaactacgaaaaaaacgtaacgaccgcccgcgaacgaaaaaaaaacgaaacgacgacaaaacgcgcgaacgaaacgaaacgcgccgaaaaaacgtaacgcgacgtctacgcaactaccaacgcctttaaacccgaactcgcgctctcgaaccgtactttcgccgcctaaaaaccgtccgacgcaacaatttctaaatccccactatccccgccgtcccgccccttcgcgtcccgaaaaccgactaacttccgaaccgcactcgccgatcctccaaacataccccgctacgaactaactttaatcctaaaaaccatacaacgaataaataaccttccctcaaaaccgatcttcccgcgcgaacgcccccgctaccgctaaaccgccgtcccccgcgcgccctaaccgcgaaaccccgaaccttcctacactcctcgaaaaaaaccgaaacgacgaacgaacgacgaacgtccgcgaaaaaaaaacgcgcgtaaaccgaccgaacccgaccgcgtacgcgcgaaaaacgaaaatatacctacgcgtatacgcgatccgaaaaaatatacctcgcaaacgacccgccgaacgaaaaacgaaacgaaccgaacgaaccccgaccccgatcccgacgccgacccgcgaaaatccaataaaaaatccgcgaaaaaacacgcgcgaacgcccaacccgactccgacccgtccccgccaatcgtaaaactacctcgtcgccgaccccgccgccgccgcctaatccgtcccgctccgccgcccgccgactaccgccgaccgcctccgctctaacgcccgccgaccgcccgaaacgtccgcgcccaataaaacgttcctccaaaacttatttataccgttatctatattccaatctcttacaatcgctctcatattaaa

SEQ ID NO: 27265 - DNA, 572 bp, Artificial Sequence
  chemically treated genomic DNA (Homo sapiens) CpG-island No: 27265
gtgggttacgtaagcggagtaggttttaaaggtcgcgttttaaatagtgcgtgggttacgtgagcggagtaggttttaaaggtcgcgttttaaatagtgcgtgggttacgtgagcggagtaggttttaaaggtcgcgttttaaatagtgcgtgggttacgtgagcggagtaggttttaaaggtcgcgttttaaatagtgcgtgggttacgtgagcggagtaggttttaaaggtcgcgttttaaatagtgcgtgggttacgtgagcggagtaggttttaaaggtcgcgttttaaatagtgcgtgggttacgtgagcggagtaggttttaaaggtcgcgttttaaatagtgcgtgggttacgtgagcggagtaggttttaaaggtcgcgttttaaatagtgcgtgggttacgtgagcggagtaggttttaaaggtcgcgttttaaatagtgcgtgggttacgggagcggagtagattttaaaggtcgcgttttaaatagtgtgtgggttacgtgagcggagcgttttttttattgttttcggggtcgtagtttttagtttagtttttagttttg

SEQ ID NO: 27266 - DNA, 572 bp, Artificial Sequence
  chemically treated genomic DNA (Homo sapiens) CpG-island No: 27266
caaaactaaaaactaaactaaaaactacgaccccgaaaacaataaaaaaaacgctccgctcacgtaacccacacactatttaaaacgcgacctttaaaatctactccgctcccgtaacccacgcactatttaaaacgcgacctttaaaacctactccgctcacgtaacccacgcactatttaaaacgcgacctttaaaacctactccgctcacgtaacccacgcactatttaaaacgcgacctttaaaacctactccgctcacgtaacccacgcactatttaaaacgcgacctttaaaacctactccgctcacgtaacccacgcactatttaaaacgcgacctttaaaacctactccgctcacgtaacccacgcactatttaaaacgcgacctttaaaacctactccgctcacgtaacccacgcactatttaaaacgcgacctttaaaacctactccgctcacgtaacccacgcactatttaaaacgcgacctttaaaacctactccgctcacgtaacccacgcactatttaaaacgcgacctttaaaacctactccgcttacgtaacccac

SEQ ID NO: 27267 - DNA, 572 bp, Artificial Sequence
  chemically treated genomic DNA (Homo sapiens) CpG-island No: 27267
tagggttgggagttgagttgggagttgcggtttcgagggtagtggagagggcgtttcgtttacgtggtttatatattgtttaggacgcggtttttagagtttgtttcgttttcgtggtttacgtattgtttaggacgcggtttttagagtttgtttcgtttacgtggtttacgtattgtttaggacgcggtttttagagtttgtttcgtttacgtggtttacgtattgtttaggacgcggtttttagagtttgtttcgtttacgtggtttacgtattgtttaggacgcggtttttagagtttgtttcgtttacgtggtttacgtattgtttaggacgcggtttttagagtttgtttcgtttacgtggtttacgtattgtttaggacgcggtttttagagtttgtttcgtttacgtggtttacgtattgtttaggacgcggtttttagagtttgtttcgtttacgtggtttacgtattgtttaggacgcggtttttagagtttgtttcgtttacgtggtttacgtattgtttaggacgcggtttttagagtttgtttcgtttacgtggtttat

SEQ ID NO: 27268 - DNA, 572 bp, Artificial Sequence
  chemically treated genomic DNA (Homo sapiens) CpG-island No: 27268
ataaaccacgtaaacgaaacaaactctaaaaaccgcgtcctaaacaatacgtaaaccacgtaaacgaaacaaactctaaaaaccgcgtcctaaacaatacgtaaaccacgtaaacgaaacaaactctaaaaaccgcgtcctaaacaatacgtaaaccacgtaaacgaaacaaactctaaaaaccgcgtcctaaacaatacgtaaaccacgtaaacgaaacaaactctaaaaaccgcgtcctaaacaatacgtaaaccacgtaaacgaaacaaactctaaaaaccgcgtcctaaacaatacgtaaaccacgtaaacgaaacaaactctaaaaaccgcgtcctaaacaatacgtaaaccacgtaaacgaaacaaactctaaaaaccgcgtcctaaacaatacgtaaaccacgtaaacgaaacaaactctaaaaaccgcgtcctaaacaatacgtaaaccacgaaaacgaaacaaactctaaaaaccgcgtcctaaacaatatataaaccacgtaaacgaaacgccctctccactaccctcgaaaccgcaactcccaactcaactcccaacccta

SEQ ID NO: 27269 - DNA, 662 bp, Artificial Sequence
  chemically treated genomic DNA (Homo sapiens) CpG-island No: 27269
tcggtatcgttttttaatttattaaattttatttttatttcggcgtttagaggatagtgtatttttcgtcgtagtttgagagggatcggttcgattggttacgtttttttaaattattattttttttcgaaaaagggacgaaagttttaggtttttaaacgagcgttttttcgtttagagatttcggtttgtatatttcgttttgtttttcgcggcgcgggaggagaggtcgttttatataggaagtgtgttttgcgtcgggattttgcgtttaattcgtcggtatttgtttttcgtttttaataggcgagaagtagtcgcgtttatatggttttaggtgtttatatggtagtaaacgggtttttgtttttttgggcgttttagcgcggcgttttttcgtttatatttcggtttagtttcgttggtttcgtttttagttcgtagttaagaggcgagcgcggtcggtgttttcggggttgttaggggtttcgaagtaggcggcgttgattttcggacgtcgttcgtttatattcgtcgtttttgtatttaaggtttcgcgcgattagtaggtagatttttttttcgtattttcgggttagtatcggtatttaagtttcgtcggaatttcgggtcggtttaagatattttagttttttgatgtt

SEQ ID NO: 27270 - DNA, 662 bp, Artificial Sequence
  chemically treated genomic DNA (Homo sapiens) CpG-island No: 27270
aacatcaaaaaactaaaatatcttaaaccgacccgaaattccgacgaaacttaaataccgatactaacccgaaaatacgaaaaaaaaatctacctactaatcgcgcgaaaccttaaatacaaaaacgacgaatataaacgaacgacgtccgaaaatcaacgccgcctacttcgaaacccctaacaaccccgaaaacaccgaccgcgctcgcctcttaactacgaactaaaaacgaaaccaacgaaactaaaccgaaatataaacgaaaaaacgccgcgctaaaacgcccaaaaaaacaaaaacccgtttactaccatataaacacctaaaaccatataaacgcgactacttctcgcctattaaaaacgaaaaacaaataccgacgaattaaacgcaaaatcccgacgcaaaacacacttcctatataaaacgacctctcctcccgcgccgcgaaaaacaaaacgaaatatacaaaccgaaatctctaaacgaaaaaacgctcgtttaaaaacctaaaactttcgtccctttttcgaaaaaaaataataatttaaaaaaacgtaaccaatcgaaccgatccctctcaaactacgacgaaaaatacactatcctctaaacgccgaaataaaaataaaatttaataaattaaaaaacgataccga

SEQ ID NO: 27271 - DNA, 662 bp, Artificial Sequence
  chemically treated genomic DNA (Homo sapiens) CpG-island No: 27271
ggtattagagggttaaggtgttttgggtcggttcggggtttcggcggggtttgggtgtcggtgttggttcgagggtgcggagggaaggtttatttgttggtcgcgcgaggttttgggtgtaaaggcggcgggtgtgagcgggcggcgttcgggagttagcgtcgtttgtttcggggtttttggtagtttcgggggtatcggtcgcgttcgttttttggttacgggttggaggcgaggttagcggggttgggtcgggatgtgggcgggagggcgtcgcgttggggcgtttaggagagtaggggttcgtttattgttatgtgaatatttgaagttatgtggacgcggttgtttttcgtttgttgggggcggagggtaggtatcggcgggttgggcgtaaggtttcggcgtaggatatattttttgtgtggggcggttttttttttcgcgtcgcggggaatagggcggggtgtgtaagtcggggtttttgggcgagggagcgttcgtttggggatttgaggttttcgtttttttttcgggggaaagtggtggtttgaaggagcgtggttaatcgggtcgattttttttaggttacggcgggaggtgtattgttttttggacgtcggaatgggagtggaatttagtgagttggggggcggtgtcga

SEQ ID NO: 27272 - DNA, 662 bp, Artificial Sequence
  chemically treated genomic DNA (Homo sapiens) CpG-island No: 27272
tcgacaccgccccccaactcactaaattccactcccattccgacgtccaaaaaacaatacacctcccgccgtaacctaaaaaaaatcgacccgattaaccacgctccttcaaaccaccactttcccccgaaaaaaaaacgaaaacctcaaatccccaaacgaacgctccctcgcccaaaaaccccgacttacacaccccgccctattccccgcgacgcgaaaaaaaaaaccgccccacacaaaaaatatatcctacgccgaaaccttacgcccaacccgccgatacctaccctccgcccccaacaaacgaaaaacaaccgcgtccacataacttcaaatattcacataacaataaacgaacccctactctcctaaacgccccaacgcgacgccctcccgcccacatcccgacccaaccccgctaacctcgcctccaacccgtaaccaaaaaacgaacgcgaccgatacccccgaaactaccaaaaaccccgaaacaaacgacgctaactcccgaacgccgcccgctcacacccgccgcctttacacccaaaacctcgcgcgaccaacaaataaaccttccctccgcaccctcgaaccaacaccgacacccaaaccccgccgaaaccccgaaccgacccaaaacaccttaaccctctaatacc

SEQ ID NO: 27273 - DNA, 598 bp, Artificial Sequence
  chemically treated genomic DNA (Homo sapiens) CpG-island No: 27273
gtggcgacggcgggcggcgttgcgcggggtgggggtgggggtggtttcgtcgtttttagttcgggcgttcgggtcggcggcggggcgggtcggggtcgcggtttttcgaggttcgtttcggttcgcgcgttcgtttttcggttaggcgcgttttagggcgggtttttttggcggaggtcgcggtcgtttcgtaggggtcgaaagcggttgggttcggggttttttttttttatttttttaatatataggaaataatagagcgttaggtgacggcgcgcggttaatggggaggtttcgggtcgcggcgcgcgggcgggcgggagggcgcgcggcggggcggggcgcgcggcgggggcggggcgttgggggcggggtcgggcgcgcgcgtgtttattcgcgtgcggcggcgtcgaggttggcgcgcgtcgggtagggatcgcgaagatttttatttcgcggtagggtcgtacggggtttttttttgcggtcgttgggcgtcgcgcgttattcgtttagtgttattttggtttgcgttttagggtcgttttgggggtggacgcgagttaattttttgggggagttggtggttcggaatttt

SEQ ID NO: 27274 - DNA, 598 bp, Artificial Sequence
  chemically treated genomic DNA (Homo sapiens) CpG-island No: 27274
aaaattccgaaccaccaactcccccaaaaaattaactcgcgtccacccccaaaacgaccctaaaacgcaaaccaaaataacactaaacgaataacgcgcgacgcccaacgaccgcaaaaaaaaaccccgtacgaccctaccgcgaaataaaaatcttcgcgatccctacccgacgcgcgccaacctcgacgccgccgcacgcgaataaacacgcgcgcgcccgaccccgcccccaacgccccgcccccgccgcgcgccccgccccgccgcgcgccctcccgcccgcccgcgcgccgcgacccgaaacctccccattaaccgcgcgccgtcacctaacgctctattatttcctatatattaaaaaaataaaaaaaaaaaaccccgaacccaaccgctttcgacccctacgaaacgaccgcgacctccgccaaaaaaacccgccctaaaacgcgcctaaccgaaaaacgaacgcgcgaaccgaaacgaacctcgaaaaaccgcgaccccgacccgccccgccgccgacccgaacgcccgaactaaaaacgacgaaaccacccccacccccaccccgcgcaacgccgcccgccgtcgccac

SEQ ID NO: 27275 - DNA, 598 bp, Artificial Sequence
  chemically treated genomic DNA (Homo sapiens) CpG-island No: 27275
gagatttcgggttattaatttttttagaaagttggttcgcgtttatttttaagacggttttgaggcgtaggttaagatggtattgggcgggtggcgcgcggcgtttagcggtcgtagaggagaatttcgtgcgattttgtcgcgaggtgggggttttcgcgatttttattcggcgcgcgttagtttcgacgtcgtcgtacgcgggtgggtacgcgcgcgttcggtttcgtttttagcgtttcgttttcgtcgcgcgtttcgtttcgtcgcgcgttttttcgttcgttcgcgcgtcgcggttcggagtttttttattggtcgcgcgtcgttatttgacgttttgttattttttgtgtgttgggagaatggagagaaaaaatttcgagtttagtcgttttcggtttttgcgaggcggtcgcggttttcgttaggggagttcgttttgaggcgcgtttgatcggggagcgagcgcgcgggtcggagcgagtttcgaggggtcgcggtttcggttcgtttcgtcgtcggttcgggcgttcgagttggaggcggcggagttatttttatttttatttcgcgtagcgtcgttcgtcgtcgttat

SEQ ID NO: 27276 - DNA, 598 bp, Artificial Sequence
  chemically treated genomic DNA (Homo sapiens) CpG-island No: 27276
ataacgacgacgaacgacgctacgcgaaataaaaataaaaataactccgccgcctccaactcgaacgcccgaaccgacgacgaaacgaaccgaaaccgcgacccctcgaaactcgctccgacccgcgcgctcgctccccgatcaaacgcgcctcaaaacgaactcccctaacgaaaaccgcgaccgcctcgcaaaaaccgaaaacgactaaactcgaaattttttctctccattctcccaacacacaaaaaataacaaaacgtcaaataacgacgcgcgaccaataaaaaaactccgaaccgcgacgcgcgaacgaacgaaaaaacgcgcgacgaaacgaaacgcgcgacgaaaacgaaacgctaaaaacgaaaccgaacgcgcgcgtacccacccgcgtacgacgacgtcgaaactaacgcgcgccgaataaaaatcgcgaaaacccccacctcgcgacaaaatcgcacgaaattctcctctacgaccgctaaacgccgcgcgccacccgcccaataccatcttaacctacgcctcaaaaccgtcttaaaaataaacgcgaaccaactttctaaaaaaattaataacccgaaatctc

SEQ ID NO: 27277 - DNA, 643 bp, Artificial Sequence
  chemically treated genomic DNA (Homo sapiens) CpG-island No: 27277
ttttcgtcgcgttcgcgttgtttttttattttggcggtcggagggtcggtatcggtttcgtaggagagttcgggtagcggggtcgggtttcggagcgcggggcgcgggcgcgagtagggcgcgcgggggcgcgggtcgcgcgtttcgggtcgtgcgtttcgcggtcgtcgcgttttcgtttttagcgcgggtttcgcgcgtttcggtcggttcgggggtaggttttgcgtagcgtcgcgtcgggtggggggcgggtttcgcgggttttggagaggcgttcgggcggcgcgggttttcggcgggcgcgggcggcgtcgttgcggtggtttcgtcgttgagtggtgggacgcgatttattggttgtaattttcggcgtttttcgatggtatttaagagagatcgggagggagtcggggagagcgggcggagggcgggcgggcgggcggaggaggggcggcgggagtcgtgcgcgtcggcgggggaggggcgcgggcgggggcgggcgggcgggaggtggggagaggttcggatggaggcggcgggcggtcgcggcgcgtcgggttggggtagggggggttttgtttttagttttcgtttattcgcgtttagttttttacgtacggtgtcgttgttgggggtgagg

SEQ ID NO: 27278 - DNA, 643 bp, Artificial Sequence
  chemically treated genomic DNA (Homo sapiens) CpG-island No: 27278
cctcacccccaacaacgacaccgtacgtaaaaaactaaacgcgaataaacgaaaactaaaaacaaaaccccccctaccccaacccgacgcgccgcgaccgcccgccgcctccatccgaacctctccccacctcccgcccgcccgcccccgcccgcgcccctcccccgccgacgcgcacgactcccgccgcccctcctccgcccgcccgcccgccctccgcccgctctccccgactccctcccgatctctcttaaataccatcgaaaaacgccgaaaattacaaccaataaatcgcgtcccaccactcaacgacgaaaccaccgcaacgacgccgcccgcgcccgccgaaaacccgcgccgcccgaacgcctctccaaaacccgcgaaacccgccccccacccgacgcgacgctacgcaaaacctacccccgaaccgaccgaaacgcgcgaaacccgcgctaaaaacgaaaacgcgacgaccgcgaaacgcacgacccgaaacgcgcgacccgcgcccccgcgcgccctactcgcgcccgcgccccgcgctccgaaacccgaccccgctacccgaactctcctacgaaaccgataccgaccctccgaccgccaaaataaaaaaacaacgcgaacgcgacgaaaa

SEQ ID NO: 27279 - DNA, 643 bp, Artificial Sequence
  chemically treated genomic DNA (Homo sapiens) CpG-island No: 27279
ttttatttttagtagcggtatcgtgcgtggggggttgggcgcgggtgggcgggggttggaggtagagttttttttattttagttcggcgcgtcgcggtcgttcgtcgtttttattcgggtttttttttatttttcgttcgttcgttttcgttcgcgtttttttttcgtcggcgcgtacggttttcgtcgtttttttttcgttcgttcgttcgtttttcgttcgtttttttcggttttttttcggttttttttaagtgttatcgaggggcgtcgggaattgtagttagtaaatcgcgttttattatttagcggcggggttatcgtagcggcgtcgttcgcgttcgtcgggagttcgcgtcgttcgggcgtttttttagggttcgcgaggttcgttttttattcggcgcggcgttgcgtagggtttgttttcgggtcggtcggggcgcgcggggttcgcgttggaggcgaggacgcggcggtcgcggggcgtacggttcggagcgcgcggttcgcgttttcgcgcgttttgttcgcgttcgcgtttcgcgtttcggagttcggtttcgttgttcgggtttttttgcgggatcgatgtcggtttttcggtcgttagggtaaggggatagcgcgggcgcggcggggg

SEQ ID NO: 27280 - DNA, 643 bp, Artificial Sequence
  chemically treated genomic DNA (Homo sapiens) CpG-island No: 27280
cccccgccgcgcccgcgctatccccttaccctaacgaccgaaaaaccgacatcgatcccgcaaaaaaacccgaacaacgaaaccgaactccgaaacgcgaaacgcgaacgcgaacaaaacgcgcgaaaacgcgaaccgcgcgctccgaaccgtacgccccgcgaccgccgcgtcctcgcctccaacgcgaaccccgcgcgccccgaccgacccgaaaacaaaccctacgcaacgccgcgccgaataaaaaacgaacctcgcgaaccctaaaaaaacgcccgaacgacgcgaactcccgacgaacgcgaacgacgccgctacgataaccccgccgctaaataataaaacgcgatttactaactacaattcccgacgcccctcgataacacttaaaaaaaaccgaaaaaaaaccgaaaaaaacgaacgaaaaacgaacgaacgaacgaaaaaaaaacgacgaaaaccgtacgcgccgacgaaaaaaaaacgcgaacgaaaacgaacgaacgaaaaataaaaaaaaacccgaataaaaacgacgaacgaccgcgacgcgccgaactaaaataaaaaaaactctacctccaacccccgcccacccgcgcccaaccccccacgcacgataccgctactaaaaataaaa

SEQ ID NO: 27281 - DNA, 546 bp, Artificial Sequence
  chemically treated genomic DNA (Homo sapiens) CpG-island No: 27281
ggcgagagaggacgttgggttgaaatagaagtgtatcgtttgggatcgaaggttacgggagagttattagcgtttttatatttttcggagggggttaagtaaggttgggaagtcggtttcggtcggttcggcggggagtcgcgcggcggaggattgagttggcgggaagttggttttagacgcgatttttttggcgggagggggaagtaggcggggtaattggtagttcggtttgtattattgggtcggggcgggggtcgcgtaggaagcggtaagtgatatttggaaggggttcgagttagagtattcgcgcggggagagtgggttcgagtagaattttttttggacgggtaaggaattcgtaaggttcgcgacgttttaggttatatgggttgggttgtattatttcggtatcggataaggggtttaggtcgggacgtgcgtagggtcgcggttaggtttattttattagagttattgggtttaatgatggcggtgaatttttgaaatggttcgataatttgtcgatttttgtacgatttaaag

SEQ ID NO: 27282 - DNA, 546 bp, Artificial Sequence
  chemically treated genomic DNA (Homo sapiens) CpG-island No: 27282
ctttaaatcgtacaaaaatcgacaaattatcgaaccatttcaaaaattcaccgccatcattaaacccaataactctaataaaataaacctaaccgcgaccctacgcacgtcccgacctaaaccccttatccgataccgaaataatacaacccaacccatataacctaaaacgtcgcgaaccttacgaattccttacccgtccaaaaaaaattctactcgaacccactctccccgcgcgaatactctaactcgaaccccttccaaatatcacttaccgcttcctacgcgacccccgccccgacccaataatacaaaccgaactaccaattaccccgcctacttccccctcccgccaaaaaaatcgcgtctaaaaccaacttcccgccaactcaatcctccgccgcgcgactccccgccgaaccgaccgaaaccgacttcccaaccttacttaaccccctccgaaaaatataaaaacgctaataactctcccgtaaccttcgatcccaaacgatacacttctatttcaacccaacgtcctctctcgcc

SEQ ID NO: 27283 - DNA, 546 bp, Artificial Sequence
  chemically treated genomic DNA (Homo sapiens) CpG-island No: 27283
ttttaagtcgtataagggtcgatagattatcggattattttagaggtttatcgttattattggatttaatggttttggtgagataaatttggtcgcggttttgcgtacgtttcggtttggattttttattcggtgtcggagtagtataatttagtttatgtaatttgaaacgtcgcggattttacgggttttttgttcgtttagagggggttttgttcgaatttatttttttcgcgcgggtgttttaattcgaattttttttaggtgttatttgtcgttttttgcgcggttttcgtttcggtttagtggtataggtcgagttgttagttatttcgtttatttttttttttcgttaaaggagtcgcgtttggaattagtttttcgttagtttagtttttcgtcgcgcggtttttcgtcggatcggtcggagtcggttttttagttttatttgatttttttcggagaatgtggggacgttggtagttttttcgtggttttcggttttaaacggtgtatttttgttttagtttagcgttttttttcgtt

SEQ ID NO: 27284 - DNA, 546 bp, Artificial Sequence
  chemically treated genomic DNA (Homo sapiens) CpG-island No: 27284
aacgaaaaaaaacgctaaactaaaacaaaaatacaccgtttaaaaccgaaaaccacgaaaaaactaccaacgtccccacattctccgaaaaaaatcaaataaaactaaaaaaccgactccgaccgatccgacgaaaaaccgcgcgacgaaaaactaaactaacgaaaaactaattccaaacgcgactcctttaacgaaaaaaaaaaataaacgaaataactaacaactcgacctataccactaaaccgaaacgaaaaccgcgcaaaaaacgacaaataacacctaaaaaaaattcgaattaaaacacccgcgcgaaaaaaataaattcgaacaaaaccccctctaaacgaacaaaaaacccgtaaaatccgcgacgtttcaaattacataaactaaattatactactccgacaccgaataaaaaatccaaaccgaaacgtacgcaaaaccgcgaccaaatttatctcaccaaaaccattaaatccaataataacgataaacctctaaaataatccgataatctatcgacccttatacgacttaaaa

SEQ ID NO: 27285 - DNA, 511 bp, Artificial Sequence
  chemically treated genomic DNA (Homo sapiens) CpG-island No: 27285
gttgttcgttcgttcggttttttttcggtttgtcgtacgcgcgtggttatttcgaatatagttttatcgggaattttttttcgatttttcgtttagttgggtcggtattcgcgtgcgcggattttaagtcgcggggttttagaggggttgtttattcggcgtttttaggacgttgttgttcgagagacgacggtagtcgttgattggagaatgagtttacgcgtttggtaagaagttgagttgtgattggttaattggagataaacgaggagggggcggggttaggttagtttcgcgttttcgttttcggaagaaattttcgtcggaagtttcgttttttggggagcgggaattttggcgattcgtgttatgggagcgggtttttgttacgtgggttttagcgcgagttgggcggtcggttcggttttatcgaattgtatagggtcgtgtagtcgggggaagttagttttttgttttgagaagtagattttgtatttgtaaaaggttaagt

SEQ ID NO: 27286 - DNA, 511 bp, Artificial Sequence
  chemically treated genomic DNA (Homo sapiens) CpG-island No: 27286
acttaaccttttacaaatacaaaatctacttctcaaaacaaaaaactaacttcccccgactacacgaccctatacaattcgataaaaccgaaccgaccgcccaactcgcgctaaaacccacgtaacaaaaacccgctcccataacacgaatcgccaaaattcccgctccccaaaaaacgaaacttccgacgaaaatttcttccgaaaacgaaaacgcgaaactaacctaaccccgccccctcctcgtttatctccaattaaccaatcacaactcaacttcttaccaaacgcgtaaactcattctccaatcaacgactaccgtcgtctctcgaacaacaacgtcctaaaaacgccgaataaacaacccctctaaaaccccgcgacttaaaatccgcgcacgcgaataccgacccaactaaacgaaaaatcgaaaaaaaattcccgataaaactatattcgaaataaccacgcgcgtacgacaaaccgaaaaaaaaccgaacgaacgaacaac

SEQ ID NO: 27287 - DNA, 511 bp, Artificial Sequence
  chemically treated genomic DNA (Homo sapiens) CpG-island No: 27287
gtttagttttttatagatgtagagtttgttttttagagtagggggttgatttttttcggttatacggttttatgtagttcggtgggatcgggtcgatcgtttagttcgcgttaaagtttacgtaatagaaattcgtttttatgatacgggtcgttagggttttcgttttttagagaacgggattttcggcggaaatttttttcgggagcggaggcgcgggattgatttggtttcgtttttttttcgtttatttttaattgattaattatagtttagttttttgttaggcgcgtaggtttattttttagttagcgattgtcgtcgtttttcgggtaatagcgttttagagacgtcgaatgggtagtttttttgagatttcgcggtttggggttcgcgtacgcgggtgtcggtttagttaggcggagaatcgaggaggggttttcggtaaggttgtattcggggtggttacgcgcgtgcgataggtcgaggaggggtcgggcgggcgggtagt

SEQ ID NO: 27288 - DNA, 511 bp, Artificial Sequence
  chemically treated genomic DNA (Homo sapiens) CpG-island No: 27288
actacccgcccgcccgacccctcctcgacctatcgcacgcgcgtaaccaccccgaatacaaccttaccgaaaacccctcctcgattctccgcctaactaaaccgacacccgcgtacgcgaaccccaaaccgcgaaatctcaaaaaaactacccattcgacgtctctaaaacgctattacccgaaaaacgacgacaatcgctaactaaaaaataaacctacgcgcctaacaaaaaactaaactataattaatcaattaaaaataaacgaaaaaaaaacgaaaccaaatcaatcccgcgcctccgctcccgaaaaaaatttccgccgaaaatcccgttctctaaaaaacgaaaaccctaacgacccgtatcataaaaacgaatttctattacgtaaactttaacgcgaactaaacgatcgacccgatcccaccgaactacataaaaccgtataaccgaaaaaaatcaaccccctactctaaaaaacaaactctacatctataaaaaactaaac

SEQ ID NO: 27289 - DNA, 893 bp, Artificial Sequence
  chemically treated genomic DNA (Homo sapiens) CpG-island No: 27289
cgtttttatcgcgtttttgtgtttttcgcgtttttatcgcggttttgagtttttcgcgtttttatcgcggttttgagtttttcgcgtttttatcgttgttttgagtttttcgtagttatatcgcggttttgtgtttttcgcgtttttatcgcgtttttgtgtttttcgcgtttttatcgcggttttgagttttttacgtttttatcgcggttttgagtttttcgcgtttttatcgttgttttgagtttttcgtagttatatcgcggttttgagtttttcgcgtttttatcgcgtttttgtgtttttcgcgtttttatcgcgtttttgtgtttttcgcgtttttatcgcggttttgagtttttcgcgtttttatcgcggttttgagtttttcgcgtttttatcgttgttttgagtttttcgtatttatatcgcgtttttgtgtttttcgcgtttttatcgcgtttttgtgtttttcgcgtttttatcgcggttttgagtttttcgcgtttttatcgttgttttgagtttttcgtagttatatcgcggttttgagtttttcgcgtttttatcgcgtttttgtgtttttcgcgtttttatcgcgtttttgtgtttttcgcgtttttatcgcggttttgagtttttcgcgtttttatcgcggttttgagtttttcgcgtttttatcgttgttttgagtttttcgtatttatatcgcggttttgtgtttttcgcgtttttatcgcgtttttgtgtttttcgcgtttttatcgcggttttgagtttttcgcgtttttatcgttgttttgagtttttcgtagttatatcgtagttttgagtttttcgcgtttttatcgtagttttgagttttttgcgtggtttgcgttgttttagagttt

SEQ ID NO: 27290 - DNA, 893 bp, Artificial Sequence
  chemically treated genomic DNA (Homo sapiens) CpG-island No: 27290
aaactctaaaacaacgcaaaccacgcaaaaaactcaaaactacgataaaaacgcgaaaaactcaaaactacgatataactacgaaaaactcaaaacaacgataaaaacgcgaaaaactcaaaaccgcgataaaaacgcgaaaaacacaaaaacgcgataaaaacgcgaaaaacacaaaaccgcgatataaatacgaaaaactcaaaacaacgataaaaacgcgaaaaactcaaaaccgcgataaaaacgcgaaaaactcaaaaccgcgataaaaacgcgaaaaacacaaaaacgcgataaaaacgcgaaaaacacaaaaacgcgataaaaacgcgaaaaactcaaaaccgcgatataactacgaaaaactcaaaacaacgataaaaacgcgaaaaactcaaaaccgcgataaaaacgcgaaaaacacaaaaacgcgataaaaacgcgaaaaacacaaaaacgcgatataaatacgaaaaactcaaaacaacgataaaaacgcgaaaaactcaaaaccgcgataaaaacgcgaaaaactcaaaaccgcgataaaaacgcgaaaaacacaaaaacgcgataaaaacgcgaaaaacacaaaaacgcgataaaaacgcgaaaaactcaaaaccgcgatataactacgaaaaactcaaaacaacgataaaaacgcgaaaaactcaaaaccgcgataaaaacgtaaaaaactcaaaaccgcgataaaaacgcgaaaaacacaaaaacgcgataaaaacgcgaaaaacacaaaaccgcgatataactacgaaaaactcaaaacaacgataaaaacgcgaaaaactcaaaaccgcgataaaaacgcgaaaaactcaaaaccgcgataaaaacgcgaaaaacacaaaaacgcgataaaaacg

SEQ ID NO: 27291 - DNA, 893 bp, Artificial Sequence
  chemically treated genomic DNA (Homo sapiens) CpG-island No: 27291
gggttttgaggtagcgtaggttacgtaggaagtttagggttgcggtgggggcgcgggaagtttagggttgcggtgtggttgcgggaagtttagggtagcggtgggggcgcgggaagtttagggtcgcggtgggggcgcgggaagtatagggacgcggtgggggcgcgggaagtatagggtcgcggtgtgggtgcgggaagtttagggtagcggtgggggcgcgggaagtttagggtcgcggtgggggcgcgggaagtttagggtcgcggtgggggcgcgggaagtatagggacgcggtgggggcgcgggaagtatagggacgcggtgggggcgcgggaagtttagggtcgcggtgtggttgcgggaagtttagggtagcggtgggggcgcgggaagtttagggtcgcggtgggggcgcgggaagtatagggacgcggtgggggcgcgggaagtatagggacgcggtgtgggtgcgggaagtttagggtagcggtgggggcgcgggaagtttagggtcgcggtgggggcgcgggaagtttagggtcgcggtgggggcgcgggaagtatagggacgcggtgggggcgcgggaagtatagggacgcggtgggggcgcgggaagtttagggtcgcggtgtggttgcgggaagtttagggtagcggtgggggcgcgggaagtttagggtcgcggtgggggcgtgggaagtttagggtcgcggtgggggcgcgggaagtatagggacgcggtgggggcgcgggaagtatagggtcgcggtgtggttgcgggaagtttagggtagcggtgggggcgcgggaagtttagggtcgcggtgggggcgcgggaagtttagggtcgcggtgggggcgcgggaagtatagggacgcggtgggggcg

SEQ ID NO: 27292 - DNA, 893 bp, Artificial Sequence
  chemically treated genomic DNA (Homo sapiens) CpG-island No: 27292
cgcccccaccgcgtccctatacttcccgcgcccccaccgcgaccctaaacttcccgcgcccccaccgcgaccctaaacttcccgcgcccccaccgctaccctaaacttcccgcaaccacaccgcgaccctatacttcccgcgcccccaccgcgtccctatacttcccgcgcccccaccgcgaccctaaacttcccacgcccccaccgcgaccctaaacttcccgcgcccccaccgctaccctaaacttcccgcaaccacaccgcgaccctaaacttcccgcgcccccaccgcgtccctatacttcccgcgcccccaccgcgtccctatacttcccgcgcccccaccgcgaccctaaacttcccgcgcccccaccgcgaccctaaacttcccgcgcccccaccgctaccctaaacttcccgcacccacaccgcgtccctatacttcccgcgcccccaccgcgtccctatacttcccgcgcccccaccgcgaccctaaacttcccgcgcccccaccgctaccctaaacttcccgcaaccacaccgcgaccctaaacttcccgcgcccccaccgcgtccctatacttcccgcgcccccaccgcgtccctatacttcccgcgcccccaccgcgaccctaaacttcccgcgcccccaccgcgaccctaaacttcccgcgcccccaccgctaccctaaacttcccgcacccacaccgcgaccctatacttcccgcgcccccaccgcgtccctatacttcccgcgcccccaccgcgaccctaaacttcccgcgcccccaccgctaccctaaacttcccgcaaccacaccgcaaccctaaacttcccgcgcccccaccgcaaccctaaacttcctacgtaacctacgctacctcaaaaccc

SEQ ID NO: 27293 - DNA, 696 bp, Artificial Sequence
  chemically treated genomic DNA (Homo sapiens) CpG-island No: 27293
ggtttagtagaagtttcgggcgcgggcgcggcgtttacgcggtcgcgttgtagggttggggtatggcgtggcgggcgcggtcggcgcggggtttatcggatttggggtaggtgacgatttatacgtcgttgggtcgtatcgggaagttggcgattttttttattttttcgcggtagaagggcggtagtcgtacgttatggaattcgaagtatttgttttcgaattttttcggggtgttgggggtttcggtttcgtttttcgttatgtcgtcgtcgtcgtcgtcgtcgtcgtcgtttttcggttcgtagttcgtacgcgttcgcgttcgcgttcgcgttcgcgtttcgtatacgttcgcgttttatcggcgcgcggcggtagtttcgtaggcgtgacgttatggcgtcgtcgacgcgcggcggaggtttcgcgggtatgacgttatggcgtcgttcggtacgcggtcgcggcgttgtacgggcgtgacgttatggcgtcgcggagtcgcgtttttttcgtttcgttttcggtcggggttatttattcgttgtcggggttgatagagattttggttcgcggtttgtagtttttttagtcgtgcgtgcgtttatttcgtttatagtttttgttatttagtaagcgtttaatatagacgtatgagatattttggttggaaggttttgaaaggtagtcgtt

SEQ ID NO: 27294 - DNA, 696 bp, Artificial Sequence
  chemically treated genomic DNA (Homo sapiens) CpG-island No: 27294
aacgactacctttcaaaaccttccaaccaaaatatctcatacgtctatattaaacgcttactaaataacaaaaactataaacgaaataaacgcacgcacgactaaaaaaactacaaaccgcgaaccaaaatctctatcaaccccgacaacgaataaataaccccgaccgaaaacgaaacgaaaaaaacgcgactccgcgacgccataacgtcacgcccgtacaacgccgcgaccgcgtaccgaacgacgccataacgtcatacccgcgaaacctccgccgcgcgtcgacgacgccataacgtcacgcctacgaaactaccgccgcgcgccgataaaacgcgaacgtatacgaaacgcgaacgcgaacgcgaacgcgaacgcgtacgaactacgaaccgaaaaacgacgacgacgacgacgacgacgacgacataacgaaaaacgaaaccgaaacccccaacaccccgaaaaaattcgaaaacaaatacttcgaattccataacgtacgactaccgcccttctaccgcgaaaaaataaaaaaaatcgccaacttcccgatacgacccaacgacgtataaatcgtcacctaccccaaatccgataaaccccgcgccgaccgcgcccgccacgccataccccaaccctacaacgcgaccgcgtaaacgccgcgcccgcgcccgaaacttctactaaacc

SEQ ID NO: 27295 - DNA, 696 bp, Artificial Sequence
  chemically treated genomic DNA (Homo sapiens) CpG-island No: 27295
gacgattattttttagggttttttagttagggtattttatgcgtttgtgttgagcgtttgttgagtgatagaagttatgagcggaatgaacgtacgtacgattgaggaggttgtagatcgcgggttagggtttttgttagtttcggtagcgggtgggtgatttcggtcgggggcggggcggggaggacgcggtttcgcggcgttatgacgttacgttcgtgtagcgtcgcggtcgcgtgtcgggcggcgttatgacgttatattcgcggagttttcgtcgcgcgtcggcggcgttatgacgttacgtttgcggagttgtcgtcgcgcgtcggtggggcgcgagcgtgtgcggggcgcgggcgcgggcgcgggcgcgggcgcgtgcgggttgcgagtcgggaggcggcggcggcgacggcgacggcggcggtatggcggagagcgaggtcgagatttttagtatttcgggggagttcgagagtaagtatttcgagttttatggcgtgcggttgtcgtttttttgtcgcgggaagatggaggagatcgttaatttttcggtgcggtttagcgacgtgtggatcgttatttattttaagttcggtgagtttcgcgtcgatcgcgttcgttacgttatgttttagttttgtagcgcggtcgcgtagacgtcgcgttcgcgttcggggtttttgttgggtt

SEQ ID NO: 27296 - DNA, 696 bp, Artificial Sequence
  chemically treated genomic DNA (Homo sapiens) CpG-island No: 27296
aacccaacaaaaaccccgaacgcgaacgcgacgtctacgcgaccgcgctacaaaactaaaacataacgtaacgaacgcgatcgacgcgaaactcaccgaacttaaaataaataacgatccacacgtcgctaaaccgcaccgaaaaattaacgatctcctccatcttcccgcgacaaaaaaacgacaaccgcacgccataaaactcgaaatacttactctcgaactcccccgaaatactaaaaatctcgacctcgctctccgccataccgccgccgtcgccgtcgccgccgccgcctcccgactcgcaacccgcacgcgcccgcgcccgcgcccgcgcccgcgccccgcacacgctcgcgccccaccgacgcgcgacgacaactccgcaaacgtaacgtcataacgccgccgacgcgcgacgaaaactccgcgaatataacgtcataacgccgcccgacacgcgaccgcgacgctacacgaacgtaacgtcataacgccgcgaaaccgcgtcctccccgccccgcccccgaccgaaatcacccacccgctaccgaaactaacaaaaaccctaacccgcgatctacaacctcctcaatcgtacgtacgttcattccgctcataacttctatcactcaacaaacgctcaacacaaacgcataaaataccctaactaaaaaaccctaaaaaataatcgtc

SEQ ID NO: 27297 - DNA, 500 bp, Artificial Sequence
  chemically treated genomic DNA (Homo sapiens) CpG-island No: 27297
cggcgtatttcggggttcgcggagaggtttagtttttttcgcggttttttagacgcgtttttcgtttggttcgtgtggatcgtttcggttattgtttacgggggaagtttgtttcgacgtattgttttggttatttttaatttttttcggtttttttcggggtatcgcgggggattttacgttaacgtttttttttcgttcgcgttttaagggtcgattgggtaaattgggagattcgtttcgcggggcgatttaatttttcggaatagttttttatcgtttattttcgtagattttcggattttcgttttcggcggagatttagggaatttcgtattttaagtttttttgaatcgtgcggcgtgagtgtgacggttaagagcggatgtagttcgggatcgttcgtattttttcgttagcggaagcgtaggagtcggttggggagggggcgttttagaaagagtagttagaaagttgagacggggaattgaggttatttt

SEQ ID NO: 27298 - DNA, 500 bp, Artificial Sequence
  chemically treated genomic DNA (Homo sapiens) CpG-island No: 27298
aaaataacctcaattccccgtctcaactttctaactactctttctaaaacgccccctccccaaccgactcctacgcttccgctaacgaaaaaatacgaacgatcccgaactacatccgctcttaaccgtcacactcacgccgcacgattcaaaaaaacttaaaatacgaaattccctaaatctccgccgaaaacgaaaatccgaaaatctacgaaaataaacgataaaaaactattccgaaaaattaaatcgccccgcgaaacgaatctcccaatttacccaatcgacccttaaaacgcgaacgaaaaaaaaacgttaacgtaaaatcccccgcgataccccgaaaaaaaccgaaaaaaattaaaaataaccaaaacaatacgtcgaaacaaacttcccccgtaaacaataaccgaaacgatccacacgaaccaaacgaaaaacgcgtctaaaaaaccgcgaaaaaaactaaacctctccgcgaaccccgaaatacgccg

SEQ ID NO: 27299 - DNA, 500 bp, Artificial Sequence
  chemically treated genomic DNA (Homo sapiens) CpG-island No: 27299
aggatgattttagtttttcgttttagttttttagttgttttttttagggcgttttttttttagtcggtttttgcgttttcgttggcgggaaggtgcgggcgatttcgggttgtattcgtttttggtcgttatatttacgtcgtacgatttagaagggtttggggtgcggggttttttgaattttcgtcgggagcgggggttcgggggtttgcgggggtgggcggtggggggttgtttcgaaaagttgggtcgtttcgcggggcgggttttttaatttgtttagtcggtttttggggcgcgggcggaggggggacgttggcgtagggtttttcgcgatatttcgggaagggtcgggggaagttggaaatggttaaaataatgcgtcgggataggtttttttcgtaaataatggtcgggacggtttatacgggttaggcggagggcgcgtttaagggatcgcgggaggggttgggttttttcgcggatttcgaggtgcgtcg

SEQ ID NO: 27300 - DNA, 500 bp, Artificial Sequence
  chemically treated genomic DNA (Homo sapiens) CpG-island No: 27300
cgacgcacctcgaaatccgcgaaaaaacccaacccctcccgcgatcccttaaacgcgccctccgcctaacccgtataaaccgtcccgaccattatttacgaaaaaaacctatcccgacgcattattttaaccatttccaacttcccccgacccttcccgaaatatcgcgaaaaaccctacgccaacgtcccccctccgcccgcgccccaaaaaccgactaaacaaattaaaaaacccgccccgcgaaacgacccaacttttcgaaacaaccccccaccgcccacccccgcaaacccccgaacccccgctcccgacgaaaattcaaaaaaccccgcaccccaaacccttctaaatcgtacgacgtaaatataacgaccaaaaacgaatacaacccgaaatcgcccgcaccttcccgccaacgaaaacgcaaaaaccgactaaaaaaaaaacgccctaaaaaaaacaactaaaaaactaaaacgaaaaactaaaatcatcct

SEQ ID NO: 27301 - DNA, 1045 bp, Artificial Sequence
  chemically treated genomic DNA (Homo sapiens) CpG-island No: 27301
gggcgtttcgggggcggcgcgggagttttcgtaggattaggcgggcgtttcggttggcgcgggcggggggcgtttttttttatttgtggtttcggtttttcggttattttttcgcgcggcggttgtcgggattgagttgattttattcgggtcggtcgggtttgaaagaggaggagcgggcgcggaggggagggggcggggagggcggagggagggaggtttcgcgtagttttttcggttttttgtgcggatatttttcggatttcgcgttcgtattcggttttttaaaagatacggggagtcgtaagcgaggggtgtagttatttgtcgaggcgtttagtgttttcgcgtttttaagatttttaataaaaaaggagcgtttcgtatttttattttcgttcggaggatttaggggtcgggtttatttcgggcgcggggttaagtgtaggcgcggggggggtttttagagtcgttagggcgcggcgcgttcggcgttgggggattgttgggttagaaagtgtttagggagtagttgttgcgttttttttcggttcgtcgttcggagacgtttcgtttcgttttatttcgttttcgcgtttacgtgattagtataggttcgttttcgtttcgtttttcgttatagatttcgttttcgggacgcgagcgagcggcgagcgcgcgtatttttagttatcgttcggcgattttcgcgtacgtacgcgtcgtgttatttttttcgcgtttttcgttttatatttttattttcgttattcgatttaacgtggcgggcgagcgtcgcggcggtagtcgtgataggtattcggcggggggggcggggggggtcgcgagggtgtgcgtaggcgtagattcgggtttcgttttcgtcgtttttttttttgtaaggtgtgttcgggcgaggggaggggttcgcggttcgaatttttgggttatttcgaattataaataaaattttaacgtcgttgttcgcgggttagaaggtagttgtgcgcgaaaaatattttagattttttttaagcgtgaggaa

SEQ ID NO: 27302 - DNA, 1045 bp, Artificial Sequence
  chemically treated genomic DNA (Homo sapiens) CpG-island No: 27302
ttcctcacgcttaaaaaaaatctaaaatatttttcgcgcacaactaccttctaacccgcgaacaacgacgttaaaattttatttataattcgaaataacccaaaaattcgaaccgcgaacccctcccctcgcccgaacacaccttacaaaaaaaaaaacgacgaaaacgaaacccgaatctacgcctacgcacaccctcgcgaccccccccgccccccccgccgaatacctatcacgactaccgccgcgacgctcgcccgccacgttaaatcgaataacgaaaataaaaatataaaacgaaaaacgcgaaaaaaataacacgacgcgtacgtacgcgaaaatcgccgaacgataactaaaaatacgcgcgctcgccgctcgctcgcgtcccgaaaacgaaatctataacgaaaaacgaaacgaaaacgaacctatactaatcacgtaaacgcgaaaacgaaataaaacgaaacgaaacgtctccgaacgacgaaccgaaaaaaaacgcaacaactactccctaaacactttctaacccaacaatcccccaacgccgaacgcgccgcgccctaacgactctaaaaaccccccccgcgcctacacttaaccccgcgcccgaaataaacccgacccctaaatcctccgaacgaaaataaaaatacgaaacgctccttttttattaaaaatcttaaaaacgcgaaaacactaaacgcctcgacaaataactacacccctcgcttacgactccccgtatcttttaaaaaaccgaatacgaacgcgaaatccgaaaaatatccgcacaaaaaaccgaaaaaactacgcgaaacctccctccctccgccctccccgccccctcccctccgcgcccgctcctcctctttcaaacccgaccgacccgaataaaatcaactcaatcccgacaaccgccgcgcgaaaaaataaccgaaaaaccgaaaccacaaataaaaaaaaacgccccccgcccgcgccaaccgaaacgcccgcctaatcctacgaaaactcccgcgccgcccccgaaacgccc

SEQ ID NO: 27303 - DNA, 1045 bp, Artificial Sequence
  chemically treated genomic DNA (Homo sapiens) CpG-island No: 27303
ttttttacgtttgaagaaaatttgaggtgtttttcgcgtatagttgttttttaattcgcgagtaacggcgttaaggttttgtttgtaattcggggtgatttaggagttcgggtcgcgggttttttttttcgttcgggtatattttgtagaggagggggcggcggggacgggattcgggtttgcgtttgcgtatattttcgcggtttttttcgtttttttcgtcgggtatttgttacggttatcgtcgcggcgttcgttcgttacgttaaatcggatggcgggagtaggggtatggggcggggggcgcggggagggtggtacggcgcgtgcgtgcgcgggagtcgtcgagcgataattgggagtgcgcgcgttcgtcgttcgttcgcgtttcggaggcggagtttgtggcggggggcggagcgggggcgggtttatgttagttacgtgggcgcgggggcggggtggggcggggcggggcgttttcgagcggcgggtcgagggagggcgtagtagttgttttttgaatattttttgatttaatagttttttagcgtcggacgcgtcgcgttttggcggttttagggatttttttcgcgtttgtatttagtttcgcgttcgaggtgagttcggtttttaaatttttcgggcgggggtgggggtgcgggacgttttttttttgttgggggttttggaggcgcgaaggtattaggcgtttcggtagatggttgtatttttcgtttgcggtttttcgtgttttttggggggtcgggtgcgggcgcggaattcgggaggtgttcgtataaaaggtcgagaaaattgcgcgaggttttttttttttcgtttttttcgttttttttttttcgcgttcgtttttttttttttaaattcggtcggttcgagtggagttagtttagtttcggtagtcgtcgcgcgaggaaatggtcgaggggtcggagttataggtaaaggggggcgtttttcgttcgcgttagtcggggcgttcgtttggttttgcggaggttttcgcgtcgttttcgaggcgttt

SEQ ID NO: 27304 - DNA, 1045 bp, Artificial Sequence
  chemically treated genomic DNA (Homo sapiens) CpG-island No: 27304
aaacgcctcgaaaacgacgcgaaaacctccgcaaaaccaaacgaacgccccgactaacgcgaacgaaaaacgcccccctttacctataactccgacccctcgaccatttcctcgcgcgacgactaccgaaactaaactaactccactcgaaccgaccgaatttaaaaaaaaaaaaacgaacgcgaaaaaaaaaaaacgaaaaaaacgaaaaaaaaaaaacctcgcgcaattttctcgaccttttatacgaacacctcccgaattccgcgcccgcacccgaccccccaaaaaacacgaaaaaccgcaaacgaaaaatacaaccatctaccgaaacgcctaataccttcgcgcctccaaaacccccaacaaaaaaaaaacgtcccgcacccccacccccgcccgaaaaatttaaaaaccgaactcacctcgaacgcgaaactaaatacaaacgcgaaaaaaatccctaaaaccgccaaaacgcgacgcgtccgacgctaaaaaactattaaatcaaaaaatattcaaaaaacaactactacgccctccctcgacccgccgctcgaaaacgccccgccccgccccaccccgcccccgcgcccacgtaactaacataaacccgcccccgctccgccccccgccacaaactccgcctccgaaacgcgaacgaacgacgaacgcgcgcactcccaattatcgctcgacgactcccgcgcacgcacgcgccgtaccaccctccccgcgccccccgccccatacccctactcccgccatccgatttaacgtaacgaacgaacgccgcgacgataaccgtaacaaatacccgacgaaaaaaacgaaaaaaaccgcgaaaatatacgcaaacgcaaacccgaatcccgtccccgccgccccctcctctacaaaatatacccgaacgaaaaaaaaaacccgcgacccgaactcctaaatcaccccgaattacaaacaaaaccttaacgccgttactcgcgaattaaaaaacaactatacgcgaaaaacacctcaaattttcttcaaacgtaaaaaa

SEQ ID NO: 27305 - DNA, 1332 bp, Artificial Sequence
  chemically treated genomic DNA (Homo sapiens) CpG-island No: 27305
tcgttcgtggagttcgttcgttttcggggagttacgggatcgcgcgcgcggcgtcgggtagtcgggattcggtttcggattaggtgcggagcgggcggggtcggagcggcgggttcgggatatatagatacgtacgcggcgggataaattgacggatagcgttcggggtgggcgagcgcggtttatcgttgggcggagggttcgacgagagttcgggaggcggcgagcgggcgttatattttaaggcgcgattcggcgggcggcgtttcgggcgcggaaaggggagtttcggcgttttttgttcgcgaattcggtcggtcggttcgcgttttttttttcggttgtcgttcggtttgcgcgtgggttttggggttttcgcgcgtttcggtcgtttcgcgtcgtttttcgcgggtcgtttaatttttagcgttgtttcgcgtcgcgttttcggcgtcgtttcggcgttagtatcgtcgggttcggtcgggtttatagcgcgggggttcgggggttcggggcgtttcgtcgttcgcgttttttattttcgttgtaggcgtttttttcgtcgtcgtttttcgttgcgtttagttttttcgttgttattcgtttttgttcgcgcgttttgttttcggttttgcgttttattttcggtttcgttgcgttcggtttcggtttcgcgatttttcggtttttcggtttggggtcgtttttttcgttttcgtcggtcgggttttgtcgttattttttcgatcgttttcgcgttttttttttgtcgtcggggttttcgtcgcgttcgcgtttcggtttttttttcggtttttttgttttttgcggtttcgttcgttttttgttcgcggggttttcgttttcgtcgcggtcgttcgtcggttttttttcgtttttttttgttcgcgttgttttttttttttgcgcgtttttgttcgtttttttcgcggtttttgtttttttttgttttttttttttttatttttcgtgcggttttttttgtttcggatttcggttttcgttttggtcgcgttttcggttcgttcgggagttcgagttttcgtcgttcgcggcgcgtcgagaatttttaattcgcggtacgtcgtttcgttttgcgagattttcgtttttttttatacgtgattcgcgttttattgcggaggtcgcgcgttttttagttcgggagtttcggttgttcgcgggatttcgttttgttcgtttttcggtttaattcggttttaagttttttttcgcggggttcgcggcgcggagtaggggttggggcggggggttgttggtttcgtttttgttttggattttgttcgg

SEQ ID NO: 27306 - DNA, 1332 bp, Artificial Sequence
  chemically treated genomic DNA (Homo sapiens) CpG-island No: 27306
ccgaacaaaatccaaaacaaaaacgaaaccaacaaccccccgccccaacccctactccgcgccgcgaaccccgcgaaaaaaaacttaaaaccgaattaaaccgaaaaacgaacaaaacgaaatcccgcgaacaaccgaaactcccgaactaaaaaacgcgcgacctccgcaataaaacgcgaatcacgtataaaaaaaaacgaaaatctcgcaaaacgaaacgacgtaccgcgaattaaaaattctcgacgcgccgcgaacgacgaaaactcgaactcccgaacgaaccgaaaacgcgaccaaaacgaaaaccgaaatccgaaacaaaaaaaaccgcacgaaaaataaaaaaaaaaaaaacaaaaaaaaacaaaaaccgcgaaaaaaacgaacaaaaacgcgcaaaaaaaaaaaacaacgcgaacaaaaaaaaacgaaaaaaaaccgacgaacgaccgcgacgaaaacgaaaaccccgcgaacaaaaaacgaacgaaaccgcaaaaaacaaaaaaaccgaaaaaaaaaccgaaacgcgaacgcgacgaaaaccccgacgacaaaaaaaaaacgcgaaaacgatcgaaaaaataacgacaaaacccgaccgacgaaaacgaaaaaaacgaccccaaaccgaaaaaccgaaaaatcgcgaaaccgaaaccgaacgcaacgaaaccgaaaataaaacgcaaaaccgaaaacaaaacgcgcgaacaaaaacgaataacaacgaaaaaactaaacgcaacgaaaaacgacgacgaaaaaaacgcctacaacgaaaataaaaaacgcgaacgacgaaacgccccgaacccccgaacccccgcgctataaacccgaccgaacccgacgatactaacgccgaaacgacgccgaaaacgcgacgcgaaacaacgctaaaaattaaacgacccgcgaaaaacgacgcgaaacgaccgaaacgcgcgaaaaccccaaaacccacgcgcaaaccgaacgacaaccgaaaaaaaaaacgcgaaccgaccgaccgaattcgcgaacaaaaaacgccgaaactcccctttccgcgcccgaaacgccgcccgccgaatcgcgccttaaaatataacgcccgctcgccgcctcccgaactctcgtcgaaccctccgcccaacgataaaccgcgctcgcccaccccgaacgctatccgtcaatttatcccgccgcgtacgtatctatatatcccgaacccgccgctccgaccccgcccgctccgcacctaatccgaaaccgaatcccgactacccgacgccgcgcgcgcgatcccgtaactccccgaaaacgaacgaactccacgaacga

SEQ ID NO: 27307 - DNA, 1332 bp, Artificial Sequence
  chemically treated genomic DNA (Homo sapiens) CpG-island No: 27307
tcgggtaggatttagggtaggagcggggttagtagtttttcgttttagtttttgtttcgcgtcgcgggtttcgcgggagggggtttgaggtcgggttaggtcgaggggcgggtagggcggggtttcgcgggtagtcggggttttcgggttggggggcgcgcggttttcgtagtggggcgcgggttacgtgtgaggaggggcgaaagtttcgtaaagcggggcggcgtgtcgcgagttgggagttttcggcgcgtcgcgggcggcgggagttcgggttttcgggcgagtcggggacgcggttaaggcgggggtcggggttcgagatagagggggtcgtacggagagtgggagggggagagatagagaaggataggggtcgcgagggagacggatagagacgcgtaggggagagaggtagcgcgggtagagggaggcggggggaggtcggcgggcgatcgcgacggagacggagatttcgcgggtagagggcgagcggggtcgtaggaggtagggaggtcgggagagggatcgggacgcgagcgcggcggagatttcggcggtaggagagagacgcgagagcggtcggggaggtggcgatagagttcggtcggcgggggcggggagggcgattttaggtcgggaggtcgaggggtcgcggggtcggggtcgagcgtagcggggtcgggagtggagcgtagggtcgggggtagagcgcgcgagtaggagcgggtgatagcgagggagttgggcgtagcgggggacggcggcggggagggcgtttgtagcgggggtggggggcgcgggcggcggggcgtttcgggttttcggattttcgcgttgtgagttcggtcgggttcgacgatgttgacgtcgaggcggcgtcgagggcgcggcgcggggtagcgttgaaagttgggcggttcgcggggagcggcgcgggacggtcgggacgcgcggagattttaagatttacgcgtagatcgagcggtagtcggggaggggagcgcgggtcggtcggtcgagttcgcgggtagggggcgtcgggattttttttttcgcgttcgggacgtcgttcgtcggatcgcgttttgggatgtagcgttcgttcgtcgtttttcggattttcgtcggatttttcgtttagcggtaagtcgcgttcgtttatttcgggcgttgttcgttagtttgtttcgtcgcgtgcgtgtttgtgtgtttcgggttcgtcgtttcggtttcgttcgtttcgtatttgattcggagtcgggtttcggttgttcggcgtcgcgcgcgcggtttcgtgatttttcgggagcgggcgggttttacgggcgg

SEQ ID NO: 27308 - DNA, 1332 bp, Artificial Sequence
  chemically treated genomic DNA (Homo sapiens) CpG-island No: 27308
ccgcccgtaaaacccgcccgctcccgaaaaatcacgaaaccgcgcgcgcgacgccgaacaaccgaaacccgactccgaatcaaatacgaaacgaacgaaaccgaaacgacgaacccgaaacacacaaacacgcacgcgacgaaacaaactaacgaacaacgcccgaaataaacgaacgcgacttaccgctaaacgaaaaatccgacgaaaatccgaaaaacgacgaacgaacgctacatcccaaaacgcgatccgacgaacgacgtcccgaacgcgaaaaaaaaaatcccgacgccccctacccgcgaactcgaccgaccgacccgcgctcccctccccgactaccgctcgatctacgcgtaaatcttaaaatctccgcgcgtcccgaccgtcccgcgccgctccccgcgaaccgcccaactttcaacgctaccccgcgccgcgccctcgacgccgcctcgacgtcaacatcgtcgaacccgaccgaactcacaacgcgaaaatccgaaaacccgaaacgccccgccgcccgcgccccccacccccgctacaaacgccctccccgccgccgtcccccgctacgcccaactccctcgctatcacccgctcctactcgcgcgctctacccccgaccctacgctccactcccgaccccgctacgctcgaccccgaccccgcgacccctcgacctcccgacctaaaatcgccctccccgcccccgccgaccgaactctatcgccacctccccgaccgctctcgcgtctctctcctaccgccgaaatctccgccgcgctcgcgtcccgatccctctcccgacctccctacctcctacgaccccgctcgccctctacccgcgaaatctccgtctccgtcgcgatcgcccgccgacctccccccgcctccctctacccgcgctacctctctcccctacgcgtctctatccgtctccctcgcgacccctatccttctctatctctccccctcccactctccgtacgaccccctctatctcgaaccccgacccccgccttaaccgcgtccccgactcgcccgaaaacccgaactcccgccgcccgcgacgcgccgaaaactcccaactcgcgacacgccgccccgctttacgaaactttcgcccctcctcacacgtaacccgcgccccactacgaaaaccgcgcgccccccaacccgaaaaccccgactacccgcgaaaccccgccctacccgcccctcgacctaacccgacctcaaaccccctcccgcgaaacccgcgacgcgaaacaaaaactaaaacgaaaaactactaaccccgctcctaccctaaatcctacccga

SEQ ID NO: 27309 - DNA, 627 bp, Artificial Sequence
  chemically treated genomic DNA (Homo sapiens) CpG-island No: 27309
attgaggtttttcgtgtcgtcgttttagtcgaaggtttttttggcggtatttagtcggaagtcgtagaattaaaatttacggtcgaagtttcgaaggtttttcgagtggaggagattttttagcgtatgattaggaatcgggcgtagatgttcgcgaattagagtaagtagggttcgttttttttcgagaaggagtgcgtttttatttttgtttcggttattagggttaaggttcgcggtttcgaggacgacgacgtttaggtttagtattcgcgtaaacgtcgtttttagcgttttatttagtagttgtagtagtagttgaatacgtttacgtagtagacgagggaggtgatttagtagacgttggtcgttatcgtggacgttattaagttggatgttatcgagttttattatagcgatagggttaatttttatttcgaatatttgtagattaggaagaagatcgaggagaagcgtaagattttgtgttgtattacgtcgtaggcgttttagtggtacgtttagtacgttatttatacgggtttttattttttggacggtaagtcgtttagtaagttttatattttcgtgatcgtattttttttttttttggcggagtttttgaag

SEQ ID NO: 27310 - DNA, 627 bp, Artificial Sequence
  chemically treated genomic DNA (Homo sapiens) CpG-island No: 27310
cttcaaaaactccgccaaaaaaaaaaaaaatacgatcacgaaaatataaaacttactaaacgacttaccgtccaaaaaataaaaacccgtataaataacgtactaaacgtaccactaaaacgcctacgacgtaatacaacacaaaatcttacgcttctcctcgatcttcttcctaatctacaaatattcgaaataaaaattaaccctatcgctataataaaactcgataacatccaacttaataacgtccacgataacgaccaacgtctactaaatcacctccctcgtctactacgtaaacgtattcaactactactacaactactaaataaaacgctaaaaacgacgtttacgcgaatactaaacctaaacgtcgtcgtcctcgaaaccgcgaaccttaaccctaataaccgaaacaaaaataaaaacgcactccttctcgaaaaaaaacgaaccctacttactctaattcgcgaacatctacgcccgattcctaatcatacgctaaaaaatctcctccactcgaaaaaccttcgaaacttcgaccgtaaattttaattctacgacttccgactaaataccgccaaaaaaaccttcgactaaaacgacgacacgaaaaacctcaat

SEQ ID NO: 27311 - DNA, 627 bp, Artificial Sequence
  chemically treated genomic DNA (Homo sapiens) CpG-island No: 27311
ttttaggggtttcgttagggagggagggggtgcgattacggggatgtggagtttgttgagcggtttgtcgtttaggaggtaggagttcgtgtaggtgacgtattgggcgtattattggggcgtttgcggcgtgatatagtataggattttgcgttttttttcgattttttttttgatttgtaggtattcgaagtaggggttggttttgtcgttgtggtagggttcgatggtatttagtttgatggcgtttacgatggcggttagcgtttgttggattatttttttcgtttgttgcgtggacgtgtttagttgttgttgtagttgttgggtggagcgttgaaagcggcgtttgcgcggatgttgggtttgggcgtcgtcgttttcggagtcgcgggttttggttttggtgatcggggtaggggtgggggcgtattttttttcggaggggggcgggttttgtttgttttggttcgcgagtatttgcgttcggtttttggttatgcgttgagggattttttttattcggggggttttcggggtttcggtcgtgggttttggttttgcggttttcggttggatgtcgttaggagggttttcggttggggcggcggtacgggaggttttagt

SEQ ID NO: 27312 - DNA, 627 bp, Artificial Sequence
  chemically treated genomic DNA (Homo sapiens) CpG-island No: 27312
actaaaacctcccgtaccgccgccccaaccgaaaaccctcctaacgacatccaaccgaaaaccgcaaaaccaaaacccacgaccgaaaccccgaaaaccccccgaataaaaaaaatccctcaacgcataaccaaaaaccgaacgcaaatactcgcgaaccaaaacaaacaaaacccgcccccctccgaaaaaaaatacgcccccacccctaccccgatcaccaaaaccaaaacccgcgactccgaaaacgacgacgcccaaacccaacatccgcgcaaacgccgctttcaacgctccacccaacaactacaacaacaactaaacacgtccacgcaacaaacgaaaaaaataatccaacaaacgctaaccgccatcgtaaacgccatcaaactaaataccatcgaaccctaccacaacgacaaaaccaacccctacttcgaatacctacaaatcaaaaaaaaaatcgaaaaaaaacgcaaaatcctatactatatcacgccgcaaacgccccaataatacgcccaatacgtcacctacacgaactcctacctcctaaacgacaaaccgctcaacaaactccacatccccgtaatcgcaccccctccctccctaacgaaacccctaaaa

SEQ ID NO: 27313 - DNA, 540 bp, Artificial Sequence
  chemically treated genomic DNA (Homo sapiens) CpG-island No: 27313
acgcgttatttttcggcggttgggttttaggtaggaagtttttgattggcggagtcgtagaagtatcgggtgaaaagagttttattggttgcgtatcggagttcgggcgtagttagtgtcgtacggtaaaatggcggtttttagttgttttgggacgtttgggttcggggagataaatttcgatttggaagagatcgttgattatgtgggtcgtattggaggtgttcgcggggcgggtttattgttattttcggttataggaagtttgtgtttcgtacgataatatggcggcgtttagttgtatgaaggcggaaattttgtgattttcggttcgtagtggggtttgcggtgggagtgggaaggaaggcggagggaattatgcgaggttttgagaattgcggcgagggtcgtttcgagagacggtttttgaggtgggggtcggacggtgcggggattagaggcgggggcggggatatagagggagaggtattggggagagttgggcgttgagtttgaggggaaagttgtggtatttttttg

SEQ ID NO: 27314 - DNA, 540 bp, Artificial Sequence
  chemically treated genomic DNA (Homo sapiens) CpG-island No: 27314
caaaaaaataccacaactttcccctcaaactcaacgcccaactctccccaatacctctccctctatatccccgcccccgcctctaatccccgcaccgtccgacccccacctcaaaaaccgtctctcgaaacgaccctcgccgcaattctcaaaacctcgcataattccctccgccttccttcccactcccaccgcaaaccccactacgaaccgaaaatcacaaaatttccgccttcatacaactaaacgccgccatattatcgtacgaaacacaaacttcctataaccgaaaataacaataaacccgccccgcgaacacctccaatacgacccacataatcaacgatctcttccaaatcgaaatttatctccccgaacccaaacgtcccaaaacaactaaaaaccgccattttaccgtacgacactaactacgcccgaactccgatacgcaaccaataaaactcttttcacccgatacttctacgactccgccaatcaaaaacttcctacctaaaacccaaccgccgaaaaataacgcgt

SEQ ID NO: 27315 - DNA, 540 bp, Artificial Sequence
  chemically treated genomic DNA (Homo sapiens) CpG-island No: 27315
taggaaggtattatagttttttttttagatttagcgtttagttttttttaatatttttttttttatattttcgttttcgtttttgattttcgtatcgttcggtttttattttagaaatcgtttttcgaggcgattttcgtcgtaatttttagaatttcgtatggtttttttcgtttttttttttatttttatcgtaggttttattacggatcggaagttatagagttttcgtttttatgtaattaagcgtcgttatattgtcgtacggaatataggttttttgtggtcggaggtgatagtaggttcgtttcgcgaatatttttagtgcggtttatatagttagcggttttttttaggtcggagtttgttttttcgaatttaggcgttttaaagtagttgggggtcgttattttgtcgtacggtattggttacgttcggatttcggtgcgtagttagtggagttttttttattcggtgtttttacgatttcgttaattagaaattttttgtttggggtttaatcgtcggagagtagcgcgt

SEQ ID NO: 27316 - DNA, 540 bp, Artificial Sequence
  chemically treated genomic DNA (Homo sapiens) CpG-island No: 27316
acgcgctactctccgacgattaaaccccaaacaaaaaatttctaattaacgaaatcgtaaaaacaccgaataaaaaaaactccactaactacgcaccgaaatccgaacgtaaccaataccgtacgacaaaataacgacccccaactactttaaaacgcctaaattcgaaaaaacaaactccgacctaaaaaaaaccgctaactatataaaccgcactaaaaatattcgcgaaacgaacctactatcacctccgaccacaaaaaacctatattccgtacgacaatataacgacgcttaattacataaaaacgaaaactctataacttccgatccgtaataaaacctacgataaaaataaaaaaaaaaacgaaaaaaaccatacgaaattctaaaaattacgacgaaaatcgcctcgaaaaacgatttctaaaataaaaaccgaacgatacgaaaatcaaaaacgaaaacgaaaatataaaaaaaaaaatattaaaaaaaactaaacgctaaatctaaaaaaaaaactataataccttccta

SEQ ID NO: 27317 - DNA, 550 bp, Artificial Sequence
  chemically treated genomic DNA (Homo sapiens) CpG-island No: 27317
ggttttcggcgtcgtttggggtgcgtggcgggcgcggggggcggcggtcgggttagcgggtcgttcggcggggaagtttagggagttaggtagcggtttagggcggcggcggggagtaggaaggttcgggtcggggggaaaggtcggatttgttcggcggaagaaatatagatggcggcggcgtagcgttatttcgggtcgggagtaggtagttagtagttttgtttttatcgcggttcgttcgtcgtcgttaaatattcggatgcgtcgtttaagcgttagacgcggagttgggaaaagggaggtagaggaggcggaggtagaggtagaggtagaggtagagttcgagttcggtgtcgagattaagcgatagatcggcggggttgggtttcgtaaagtcggttcggcgagttttttcgatattcgagtcggggaggaaaagtagcgatttttcgttcgtattttcgggagtcgtattttagattggttcggtagttaggggtttaggagtagatttcgaggtaggttttgtttagttttcgacgagggt

SEQ ID NO: 27318 - DNA, 550 bp, Artificial Sequence
  chemically treated genomic DNA (Homo sapiens) CpG-island No: 27318
accctcgtcgaaaactaaacaaaacctacctcgaaatctactcctaaacccctaactaccgaaccaatctaaaatacgactcccgaaaatacgaacgaaaaatcgctacttttcctccccgactcgaatatcgaaaaaactcgccgaaccgactttacgaaacccaaccccgccgatctatcgcttaatctcgacaccgaactcgaactctacctctacctctacctctacctccgcctcctctacctcccttttcccaactccgcgtctaacgcttaaacgacgcatccgaatatttaacgacgacgaacgaaccgcgataaaaacaaaactactaactacctactcccgacccgaaataacgctacgccgccgccatctatatttcttccgccgaacaaatccgacctttccccccgacccgaaccttcctactccccgccgccgccctaaaccgctacctaactccctaaacttccccgccgaacgacccgctaacccgaccgccgccccccgcgcccgccacgcaccccaaacgacgccgaaaacc

SEQ ID NO: 27319 - DNA, 550 bp, Artificial Sequence
  chemically treated genomic DNA (Homo sapiens) CpG-island No: 27319
gttttcgtcggaggttgagtaaagtttgtttcgggatttgtttttgagtttttgattatcgggttagtttggagtgcggttttcggggatgcgagcgaggagtcgttgtttttttttttcggttcgggtgtcgggagagttcgtcgagtcggttttgcgaggtttagtttcgtcggtttgtcgtttggtttcggtatcgggttcgggttttgtttttgtttttgtttttgttttcgttttttttgtttttttttttttagtttcgcgtttggcgtttgggcggcgtattcgggtatttagcggcggcgggcggatcgcggtgaggatagggttgttggttgtttgttttcggttcggaatggcgttgcgtcgtcgttatttgtgtttttttcgtcgagtaaattcgattttttttttcggttcgggtttttttgtttttcgtcgtcgttttgggtcgttgtttggttttttgggttttttcgtcgggcggttcgttggttcggtcgtcgtttttcgcgttcgttacgtattttaaacggcgtcgaggatt

SEQ ID NO: 27320 - DNA, 550 bp, Artificial Sequence
  chemically treated genomic DNA (Homo sapiens) CpG-island No: 27320
aatcctcgacgccgtttaaaatacgtaacgaacgcgaaaaacgacgaccgaaccaacgaaccgcccgacgaaaaaacccaaaaaaccaaacaacgacccaaaacgacgacgaaaaacaaaaaaacccgaaccgaaaaaaaaaatcgaatttactcgacgaaaaaaacacaaataacgacgacgcaacgccattccgaaccgaaaacaaacaaccaacaaccctatcctcaccgcgatccgcccgccgccgctaaatacccgaatacgccgcccaaacgccaaacgcgaaactaaaaaaaaaaaaacaaaaaaaacgaaaacaaaaacaaaaacaaaaacaaaacccgaacccgataccgaaaccaaacgacaaaccgacgaaactaaacctcgcaaaaccgactcgacgaactctcccgacacccgaaccgaaaaaaaaaaacaacgactcctcgctcgcatccccgaaaaccgcactccaaactaacccgataatcaaaaactcaaaaacaaatcccgaaacaaactttactcaacctccgacgaaaac

SEQ ID NO: 27321 - DNA, 632 bp, Artificial Sequence
  chemically treated genomic DNA (Homo sapiens) CpG-island No: 27321
atttagatcgacgtgaggcggtacgaggcgagatttagatagcggcgtagaaagtgcgtcgtcgtttttgtggtttttaggagtcgtcgttggcgttgttttgttgcgttggtagcgtcgcgattttttgggttagtcgatcgcggtagggttttacgtcgttggttaattcgcggtttagcgtgttttgttgtattagttcgggttcgtcgtcgcgtttttttcgtagttatttagaaggtgtttgtaggaggcgtagtagtcgttttgggtgtacgtgtttcggtttgggcgtttatcggtagtcgtcggtcgtttacgataagttgtagggttacgcggggcgggagggtcggtcgtggattagttgtaagtttgcgttttgtagaattagaggttttgaggatcgttttaagggcgtaatgtttttgttttttgcgtcgcgtacggggtttagggtcgcgggttattagaagcggtagtaggagtggatggaggtggtatcgggcgtatttaaggtttaggtttacggtcgcgttttttatggtcgtttgtttttttttttttttttttattttcgtttttatattagtttagttttgtcgttgttgggagtttatcgttttaggtta

SEQ ID NO: 27322 - DNA, 632 bp, Artificial Sequence
  chemically treated genomic DNA (Homo sapiens) CpG-island No: 27322
taacctaaaacgataaactcccaacaacgacaaaactaaactaatataaaaacgaaaataaaaaaaaaaaaaaaaaaacaaacgaccataaaaaacgcgaccgtaaacctaaaccttaaatacgcccgataccacctccatccactcctactaccgcttctaataacccgcgaccctaaaccccgtacgcgacgcaaaaaacaaaaacattacgcccttaaaacgatcctcaaaacctctaattctacaaaacgcaaacttacaactaatccacgaccgaccctcccgccccgcgtaaccctacaacttatcgtaaacgaccgacgactaccgataaacgcccaaaccgaaacacgtacacccaaaacgactactacgcctcctacaaacaccttctaaataactacgaaaaaaacgcgacgacgaacccgaactaatacaacaaaacacgctaaaccgcgaattaaccaacgacgtaaaaccctaccgcgatcgactaacccaaaaaatcgcgacgctaccaacgcaacaaaacaacgccaacgacgactcctaaaaaccacaaaaacgacgacgcactttctacgccgctatctaaatctcgcctcgtaccgcctcacgtcgatctaaat

SEQ ID NO: 27323 - DNA, 632 bp, Artificial Sequence
  chemically treated genomic DNA (Homo sapiens) CpG-island No: 27323
tggtttagggcgatgagtttttagtagcggtaaggttaagttgatatgagagcggaggtggagggaaggaggaaggaataggcggttataaagagcgcggtcgtgagtttagattttgggtgcgttcggtgttatttttatttatttttattgtcgtttttggtagttcgcggttttgaatttcgtgcgcgacgtagagaataaggatattgcgtttttggggcggtttttagagtttttgattttgtagaacgtagatttgtagttggtttacggtcggttttttcgtttcgcgtggttttatagtttgtcgtgggcggtcggcgattatcggtaggcgtttaagtcgaaatacgtgtatttagagcggttgttgcgttttttatagatattttttggatgattgcggaagaagcgcggcggcggattcgggttggtgtagtaggatacgttgagtcgcgggttggttaacggcgtggagttttatcgcgatcggttagtttagggggtcgcggcgttgttagcgtagtagggtaacgttagcggcggtttttgggagttataggggcggcgacgtattttttgcgtcgttgtttggatttcgtttcgtgtcgttttacgtcggtttgggt

SEQ ID NO: 27324 - DNA, 632 bp, Artificial Sequence
  chemically treated genomic DNA (Homo sapiens) CpG-island No: 27324
acccaaaccgacgtaaaacgacacgaaacgaaatccaaacaacgacgcaaaaaatacgtcgccgcccctataactcccaaaaaccgccgctaacgttaccctactacgctaacaacgccgcgaccccctaaactaaccgatcgcgataaaactccacgccgttaaccaacccgcgactcaacgtatcctactacaccaacccgaatccgccgccgcgcttcttccgcaatcatccaaaaaatatctataaaaaacgcaacaaccgctctaaatacacgtatttcgacttaaacgcctaccgataatcgccgaccgcccacgacaaactataaaaccacgcgaaacgaaaaaaccgaccgtaaaccaactacaaatctacgttctacaaaatcaaaaactctaaaaaccgccccaaaaacgcaatatccttattctctacgtcgcgcacgaaattcaaaaccgcgaactaccaaaaacgacaataaaaataaataaaaataacaccgaacgcacccaaaatctaaactcacgaccgcgctctttataaccgcctattccttcctccttccctccacctccgctctcatatcaacttaaccttaccgctactaaaaactcatcgccctaaacca

SEQ ID NO: 27325 - DNA, 1020 bp, Artificial Sequence
  chemically treated genomic DNA (Homo sapiens) CpG-island No: 27325
gttacgttttttacggtttataggaggcgtattgggtcgtagggttcgggcgcgggacgtggcgcgggtttttgcgggagggtatttgttcgtttcgttgattaggcgtttttcgtaggtatttggtcgtgcggtattcgttgcgttcgcgcgttttgcgtacgtcgcgtaacgttcgcgtcgtagtggggttggtgtggttgttggcggcgtttttttcggcgttttattttagttattacggtatcgtgcgttacggcgcgttggagttttgcgtgttcgtttgggaggacgcgcgtcgtcgcgttttggacgtggttattttcgttgtcggttatttgttgttcgtggttgtggtgagtttggtttacgggcgtacgttgcgttttttgtgggtcgtcgtgggtttcgcgggcgcggcggcggtcgaggcgcggcggagggcgacgggtcgcgcggggcgcgttatgttggcggtggtcgcgttttacgcgttttgttggggttcgtattacgcgtttattttgtgtttttggtacggtcgtttcgtttttagttcggttatttacgtttgtcgtttggttttatattgtttggtttacgttaatttttgttttaattcgttcgtttacgcgttcgtttcgcgttattttcgcgcgcgttttcgtcgtttgtggtcgtgcggtcgtcgacgtcgttatcgtgttcgtcgcgttttgcgtcgcgttcgtttcgcgttttcgggtttattcggttgtttcggagacgttcggtttagcgggaggttgttggttggtggcggttagggttcggagtttagggagggattcgtttacggcggagaggttgttcgaggatcggaataaattttgtcgtttggatttcgtttgtgttcgtttgttttattttcgtttttcgaaggcgggacgttatcgggttagggatggggtaatgttacgagttttttgaggggcgttgagtggagcgatttgttttcgttttatagcggagtattagttt

SEQ ID NO: 27326 - DNA, 1020 bp, Artificial Sequence
  chemically treated genomic DNA (Homo sapiens) CpG-island No: 27326
aaactaatactccgctataaaacgaaaacaaatcgctccactcaacgcccctcaaaaaactcgtaacattaccccatccctaacccgataacgtcccgccttcgaaaaacgaaaataaaacaaacgaacacaaacgaaatccaaacgacaaaatttattccgatcctcgaacaacctctccgccgtaaacgaatccctccctaaactccgaaccctaaccgccaccaaccaacaacctcccgctaaaccgaacgtctccgaaacaaccgaataaacccgaaaacgcgaaacgaacgcgacgcaaaacgcgacgaacacgataacgacgtcgacgaccgcacgaccacaaacgacgaaaacgcgcgcgaaaataacgcgaaacgaacgcgtaaacgaacgaattaaaacaaaaattaacgtaaaccaaacaatataaaaccaaacgacaaacgtaaataaccgaactaaaaacgaaacgaccgtaccaaaaacacaaaataaacgcgtaatacgaaccccaacaaaacgcgtaaaacgcgaccaccgccaacataacgcgccccgcgcgacccgtcgccctccgccgcgcctcgaccgccgccgcgcccgcgaaacccacgacgacccacaaaaaacgcaacgtacgcccgtaaaccaaactcaccacaaccacgaacaacaaataaccgacaacgaaaataaccacgtccaaaacgcgacgacgcgcgtcctcccaaacgaacacgcaaaactccaacgcgccgtaacgcacgataccgtaataactaaaataaaacgccgaaaaaaacgccgccaacaaccacaccaaccccactacgacgcgaacgttacgcgacgtacgcaaaacgcgcgaacgcaacgaataccgcacgaccaaatacctacgaaaaacgcctaatcaacgaaacgaacaaataccctcccgcaaaaacccgcgccacgtcccgcgcccgaaccctacgacccaatacgcctcctataaaccgtaaaaaacgtaac

SEQ ID NO: 27327 - DNA, 1020 bp, Artificial Sequence
  chemically treated genomic DNA (Homo sapiens) CpG-island No: 27327
gggttggtgtttcgttgtggagcggggataagtcgttttatttaacgttttttagagagttcgtggtattgttttatttttggttcggtggcgtttcgttttcggagaacgggagtgagatagacggatataggcggagtttaggcggtagggtttatttcggttttcgggtagttttttcgtcgtggacgggtttttttttgggtttcgggttttggtcgttattagttagtagtttttcgttaggtcgggcgttttcggggtagtcgggtgggttcgaggacgcggggcggacgcgacgtaaggcgcggcgggtacggtggcggcgtcggcggtcgtacggttataggcggcggaagcgcgcgcggaagtggcgcgaggcgagcgcgtagacgagcgggttgaggtaggagttggcgtaggttaggtagtgtgaggttaggcggtaggcgtaggtggtcgggttgaaggcgaagcggtcgtattagaagtataggatgagcgcgtggtgcggattttagtagagcgcgtagagcgcggttatcgttagtatggcgcgtttcgcgcggttcgtcgtttttcgtcgcgtttcggtcgtcgtcgcgttcgcgggatttacggcggtttataggaagcgtagcgtgcgttcgtaggttaggtttattatagttacgggtagtaggtagtcggtagcgaaggtggttacgtttagggcgcggcggcgcgcgtttttttaggcgggtacgtagagttttagcgcgtcgtagcgtacggtgtcgtagtagttgaggtagggcgtcgagaagagcgtcgttagtagttatattagttttattgcggcgcgggcgttacgcggcgtgcgtagggcgcgcgagcgtagcgggtgtcgtacggttaggtatttgcggagggcgtttggttagcggggcgggtaggtgttttttcgtaggggttcgcgttacgtttcgcgttcgggttttgcggtttagtgcgttttttgtgaatcgtgggggacgtggt

SEQ ID NO: 27328 - DNA, 1020 bp, Artificial Sequence
  chemically treated genomic DNA (Homo sapiens) CpG-island No: 27328
accacgtcccccacgattcacaaaaaacgcactaaaccgcaaaacccgaacgcgaaacgtaacgcgaacccctacgaaaaaacacctacccgccccgctaaccaaacgccctccgcaaatacctaaccgtacgacacccgctacgctcgcgcgccctacgcacgccgcgtaacgcccgcgccgcaataaaactaatataactactaacgacgctcttctcgacgccctacctcaactactacgacaccgtacgctacgacgcgctaaaactctacgtacccgcctaaaaaaacgcgcgccgccgcgccctaaacgtaaccaccttcgctaccgactacctactacccgtaactataataaacctaacctacgaacgcacgctacgcttcctataaaccgccgtaaatcccgcgaacgcgacgacgaccgaaacgcgacgaaaaacgacgaaccgcgcgaaacgcgccatactaacgataaccgcgctctacgcgctctactaaaatccgcaccacgcgctcatcctatacttctaatacgaccgcttcgccttcaacccgaccacctacgcctaccgcctaacctcacactacctaacctacgccaactcctacctcaacccgctcgtctacgcgctcgcctcgcgccacttccgcgcgcgcttccgccgcctataaccgtacgaccgccgacgccgccaccgtacccgccgcgccttacgtcgcgtccgccccgcgtcctcgaacccacccgactaccccgaaaacgcccgacctaacgaaaaactactaactaataacgaccaaaacccgaaacccaaaaaaaaacccgtccacgacgaaaaaactacccgaaaaccgaaataaaccctaccgcctaaactccgcctatatccgtctatctcactcccgttctccgaaaacgaaacgccaccgaaccaaaaataaaacaataccacgaactctctaaaaaacgttaaataaaacgacttatccccgctccacaacgaaacaccaaccc

SEQ ID NO: 27329 - DNA, 708 bp, Artificial Sequence
  chemically treated genomic DNA (Homo sapiens) CpG-island No: 27329
ggggatttcggttgagggtcgggggcgattaaagcgcggttattggttttttgaggtttcgtttttcgttcgggttgtttcgtttcgggttttcgcgtcgttcgcgtcgtttatcgtgtatttttttgttcgtgggttcgagtcgtcggtggggtttggtagcgcgttttagtcggttagcgggtattttgtagcgtagttcgtcgcgcggtttcgtattttgttgttataggacgtgtaagtagcgtagcggcgattgggtttcgtcggacgttcggttcgagaggttcgcgtcgtcgtcgtttagcgtagattcgaagttagcgaaggagaagaggtttttagcgttagttagcggtttcggcgttatcgcgtattcgtttttcgagttcgagtggtttgagcgcggttcgtcgttcgcgttttcggcggcggttgttatggtaacggtttcgcgcgggtttggtcgtttgagtttcgttttcgatcgattaacggatttattttttttcgttttgagtcgtgttgttagcgagttggcgggcgggtagggttcgtaattacggtaatcgagcgggggcgggtttaggtcgagatagagcggcgaattaatgattatttttttagtttaaatcggttttaaaattaatcggaaagggagggtatagtataagtaggataattggatagggttttcggtaacgtgat

SEQ ID NO: 27330 - DNA, 708 bp, Artificial Sequence
  chemically treated genomic DNA (Homo sapiens) CpG-island No: 27330
atcacgttaccgaaaaccctatccaattatcctacttatactataccctccctttccgattaattttaaaaccgatttaaactaaaaaaataatcattaattcgccgctctatctcgacctaaacccgcccccgctcgattaccgtaattacgaaccctacccgcccgccaactcgctaacaacacgactcaaaacgaaaaaaaataaatccgttaatcgatcgaaaacgaaactcaaacgaccaaacccgcgcgaaaccgttaccataacaaccgccgccgaaaacgcgaacgacgaaccgcgctcaaaccactcgaactcgaaaaacgaatacgcgataacgccgaaaccgctaactaacgctaaaaacctcttctccttcgctaacttcgaatctacgctaaacgacgacgacgcgaacctctcgaaccgaacgtccgacgaaacccaatcgccgctacgctacttacacgtcctataacaacaaaatacgaaaccgcgcgacgaactacgctacaaaatacccgctaaccgactaaaacgcgctaccaaaccccaccgacgactcgaacccacgaacaaaaaaatacacgataaacgacgcgaacgacgcgaaaacccgaaacgaaacaacccgaacgaaaaacgaaacctcaaaaaaccaataaccgcgctttaatcgcccccgaccctcaaccgaaatcccc

SEQ ID NO: 27331 - DNA, 708 bp, Artificial Sequence
  chemically treated genomic DNA (Homo sapiens) CpG-island No: 27331
gttacgttgtcggaaattttgtttaattattttgtttgtattgtgtttttttttttcgattggttttgggatcggtttaagttggaagggtagttattggttcgtcgttttgtttcggtttgagttcgttttcgttcggttgtcgtggttgcgggttttgttcgttcgttagttcgttgatagtacgatttagggcggagggaagtaggttcgttggtcggtcgggaacgaggtttaggcggttaggttcgcgcggagtcgttgttatggtagtcgtcgtcggggacgcggacgacgagtcgcgtttaggttattcgagttcggagggcgagtgcgcggtggcgtcggagtcgttgattgacgttgagggttttttttttttcgttgatttcgggtttgcgttgggcggcggcggcgcgggtttttcgggtcgggcgttcggcggggtttagtcgtcgttgcgttatttgtacgttttgtggtagtaggatgcggagtcgcgcgacgagttgcgttgtaagatattcgttggtcggttgaggcgcgttgttaggttttatcggcggttcgggtttacgggtaaggaggtgtacggtgagcggcgcgagcggcgcgggggttcggggcggggtagttcgggcgaggggcggggttttagaggattagtggtcgcgttttggtcgttttcgatttttagtcggggttttt

SEQ ID NO: 27332 - DNA, 708 bp, Artificial Sequence
  chemically treated genomic DNA (Homo sapiens) CpG-island No: 27332
aaaaaccccgactaaaaatcgaaaacgaccaaaacgcgaccactaatcctctaaaaccccgcccctcgcccgaactaccccgccccgaacccccgcgccgctcgcgccgctcaccgtacacctccttacccgtaaacccgaaccgccgataaaacctaacaacgcgcctcaaccgaccaacgaatatcttacaacgcaactcgtcgcgcgactccgcatcctactaccacaaaacgtacaaataacgcaacgacgactaaaccccgccgaacgcccgacccgaaaaacccgcgccgccgccgcccaacgcaaacccgaaatcaacgaaaaaaaaaaaaccctcaacgtcaatcaacgactccgacgccaccgcgcactcgccctccgaactcgaataacctaaacgcgactcgtcgtccgcgtccccgacgacgactaccataacaacgactccgcgcgaacctaaccgcctaaacctcgttcccgaccgaccaacgaacctacttccctccgccctaaatcgtactatcaacgaactaacgaacgaacaaaacccgcaaccacgacaaccgaacgaaaacgaactcaaaccgaaacaaaacgacgaaccaataactacccttccaacttaaaccgatcccaaaaccaatcgaaaaaaaaaaacacaatacaaacaaaataattaaacaaaatttccgacaacgtaac

SEQ ID NO: 27333 - DNA, 851 bp, Artificial Sequence
  chemically treated genomic DNA (Homo sapiens) CpG-island No: 27333
cgcgttttgttcgcgtttcgtcgtttttcggttcgttttttcgttgcgttttagtagttttcgggaaatcgcggtcgttcggcggttgtatcgtttttttttttgttcgtttatcgcgcgcgcgcgttgatgttgtgagttcggtcgcgtcgtcgtttatttggtttgtttcgtcgggtttcggtatcgtcgttaggtttagggcgttgcgggagcgcgtaggcgcgttgtcgtcgtcgttatcgtcgtcgtcgtcgatcggatttgaggcgattgcggttttttcggtaacgttaggaaattatttttaaattaagttttgtttaggtcgacgtagtcgttattgtcggcgcgtggcgacgtcgcgggtcgcgtcgatacgtttattatggcgttaaaaagcgtcgacgtcggtatgcggcgcgaggttcggggaggcggggcgtcggggttggggggattcgttgttgttgcgcgtcgacgtttatcggggtcgggtttggggcggggcgagggttattgggatttcgcggcgttttaagggttttgagtttcgcggggttttcggcggatcggtcggttcgggagggaaacggaaggaaggcgtgggaatattttttcgcgggggtggtcgggcgggtttcgcgagggcgttattttaggggagtgggtggggcggataggataaatttttttggtttcgagaaaacgacgcgtttttttcgtttaaaggtttttttttcgtttaggaatcgcgttttttatttgtttttttacgatattcggggatagatatcggattttgtttattttggtagtttaaatttttggtatcggttttggtgtttaat

SEQ ID NO: 27334 - DNA, 851 bp, Artificial Sequence
  chemically treated genomic DNA (Homo sapiens) CpG-island No: 27334
attaaacaccaaaaccgataccaaaaatttaaactaccaaaataaacaaaatccgatatctatccccgaatatcgtaaaaaaacaaataaaaaacgcgattcctaaacgaaaaaaaaacctttaaacgaaaaaaacgcgtcgttttctcgaaaccaaaaaaatttatcctatccgccccacccactcccctaaaataacgccctcgcgaaacccgcccgaccacccccgcgaaaaaatattcccacgccttccttccgtttccctcccgaaccgaccgatccgccgaaaaccccgcgaaactcaaaacccttaaaacgccgcgaaatcccaataaccctcgccccgccccaaacccgaccccgataaacgtcgacgcgcaacaacaacgaatccccccaaccccgacgccccgcctccccgaacctcgcgccgcataccgacgtcgacgctttttaacgccataataaacgtatcgacgcgacccgcgacgtcgccacgcgccgacaataacgactacgtcgacctaaacaaaacttaatttaaaaataatttcctaacgttaccgaaaaaaccgcaatcgcctcaaatccgatcgacgacgacgacgataacgacgacgacaacgcgcctacgcgctcccgcaacgccctaaacctaacgacgataccgaaacccgacgaaacaaaccaaataaacgacgacgcgaccgaactcacaacatcaacgcgcgcgcgcgataaacgaacaaaaaaaaaaacgatacaaccgccgaacgaccgcgatttcccgaaaactactaaaacgcaacgaaaaaacgaaccgaaaaacgacgaaacgcgaacaaaacgcg

SEQ ID NO: 27335 - DNA, 851 bp, Artificial Sequence
  chemically treated genomic DNA (Homo sapiens) CpG-island No: 27335
attagatattagagtcggtgttaggagtttaggttattaagatgaataagattcggtgtttattttcgggtgtcgtaaagaaataagtaaaagacgcggtttttgagcgggggaggggtttttgggcgaaggaggcgcgtcgttttttcgaagttagagaaatttgttttgttcgttttatttatttttttaagatggcgttttcgcgaaattcgttcggttattttcgcgagggaatatttttacgtttttttttcgtttttttttcgggtcggtcgattcgtcggggatttcgcggagtttaaggtttttgaggcgtcgcgggattttagtggttttcgtttcgttttaaattcgatttcggtgggcgtcgacgcgtagtagtagcgggtttttttaatttcggcgtttcgttttttcgggtttcgcgtcgtatgtcggcgtcggcgttttttgacgttatagtgggcgtgtcggcgcgattcgcgacgtcgttacgcgtcgataatggcggttgcgtcggtttgagtagggtttagtttagaagtaattttttgacgttgtcgagggagtcgtagtcgttttagattcggtcggcggcggcggcggtggcggcggcggtagcgcgtttgcgcgttttcgtagcgttttggatttagcggcggtgtcgaggttcggcggagtaagttaggtgggcggcggcgcggtcgagtttatagtattagcgcgcgcgcgcggtgggcgggtagagaggggggcggtgtagtcgtcgagcggtcgcgatttttcggggattgttggggcgtagcggggaggcgggtcggggggcggcggggcgcgagtagagcgcg

SEQ ID NO: 27336 - DNA, 851 bp, Artificial Sequence
  chemically treated genomic DNA (Homo sapiens) CpG-island No: 27336
cgcgctctactcgcgccccgccgccccccgacccgcctccccgctacgccccaacaatccccgaaaaatcgcgaccgctcgacgactacaccgcccccctctctacccgcccaccgcgcgcgcgcgctaatactataaactcgaccgcgccgccgcccacctaacttactccgccgaacctcgacaccgccgctaaatccaaaacgctacgaaaacgcgcaaacgcgctaccgccgccgccaccgccgccgccgccgaccgaatctaaaacgactacgactccctcgacaacgtcaaaaaattacttctaaactaaaccctactcaaaccgacgcaaccgccattatcgacgcgtaacgacgtcgcgaatcgcgccgacacgcccactataacgtcaaaaaacgccgacgccgacatacgacgcgaaacccgaaaaaacgaaacgccgaaattaaaaaaacccgctactactacgcgtcgacgcccaccgaaatcgaatttaaaacgaaacgaaaaccactaaaatcccgcgacgcctcaaaaaccttaaactccgcgaaatccccgacgaatcgaccgacccgaaaaaaaaacgaaaaaaaaacgtaaaaatattccctcgcgaaaataaccgaacgaatttcgcgaaaacgccatcttaaaaaaataaataaaacgaacaaaacaaatttctctaacttcgaaaaaacgacgcgcctccttcgcccaaaaacccctcccccgctcaaaaaccgcgtcttttacttatttctttacgacacccgaaaataaacaccgaatcttattcatcttaataacctaaactcctaacaccgactctaatatctaat

SEQ ID NO: 27337 - DNA, 1022 bp, Artificial Sequence
  chemically treated genomic DNA (Homo sapiens) CpG-island No: 27337
gtcgagagcgggcggcgtcggcggcggtatcggttcgcgggtagttggagttcggcgttgagttttgtttagcgcgattcggatcgacggacgcgtagagattttgtcgggattcgttttttagtcggcgttcggggagtcgtcggtcggttttatttttcgttcgggagtcgggtagggcgagaaggtagcgcgagtggcggtggcgattttcgtcggggtttttgcgacgagcggtgattagtagcgttcgtagtcgcggtttcgttttttattcggacgtggttaagcggcggcggttacgattttcggtttttcgggatcgttcggttgcgttttgggcgtatttgcgcgtttggtttcgcgtttcgcggagagggcgatgggtttcggttaggattgagcgtttttttttttttttttagtttcgtttggtatttttttttttgtttcgagggcgagttacggtttgcgtcgtcgatttttttttcggtgttttcggttcgtcgttttttcgcgtttttttttttcggattcgttttcggggttattatggtcgcggttatcgttagcggtttgattcgttagaagcggtaggcgcgggagtagtattgggatcggtcgtttgttagtaggaggcggagtagttttagtaagaatcgcgggttttgtaacggtaatttggtggatattttttttaaagtgcgtattttcggttttaagaagcgtaggttgcggcgttaaggtttgtgggggttatggtcgggagatgcgtttcgggtcgtttttttttcgtttaaacggagtttttttaggttttttttttttttcggttttttcggtttatttcggtttcggttttttttttgagtattttgggtgtcgtcgcggggattttggagttcgttgtcgggtaatttgtagtcgtcgagaagtgtagtcgttagagatggtaagttggttgtttttcgtcggcggtttttgtttttcgcgtttttgtaggttgggttttgggaaatttg

SEQ ID NO: 27338 - DNA, 1022 bp, Artificial Sequence
  chemically treated genomic DNA (Homo sapiens) CpG-island No: 27338
caaatttcccaaaacccaacctacaaaaacgcgaaaaacaaaaaccgccgacgaaaaacaaccaacttaccatctctaacgactacacttctcgacgactacaaattacccgacaacgaactccaaaatccccgcgacgacacccaaaatactcaaaaaaaaaaccgaaaccgaaataaaccgaaaaaaccgaaaaaaaaaaaaaacctaaaaaaactccgtttaaacgaaaaaaaaacgacccgaaacgcatctcccgaccataacccccacaaaccttaacgccgcaacctacgcttcttaaaaccgaaaatacgcactttaaaaaaaatatccaccaaattaccgttacaaaacccgcgattcttactaaaactactccgcctcctactaacaaacgaccgatcccaatactactcccgcgcctaccgcttctaacgaatcaaaccgctaacgataaccgcgaccataataaccccgaaaacgaatccgaaaaaaaaaaacgcgaaaaaacgacgaaccgaaaacaccgaaaaaaaaatcgacgacgcaaaccgtaactcgccctcgaaacaaaaaaaaaaataccaaacgaaactaaaaaaaaaaaaaaaaacgctcaatcctaaccgaaacccatcgccctctccgcgaaacgcgaaaccaaacgcgcaaatacgcccaaaacgcaaccgaacgatcccgaaaaaccgaaaatcgtaaccgccgccgcttaaccacgtccgaataaaaaacgaaaccgcgactacgaacgctactaatcaccgctcgtcgcaaaaaccccgacgaaaatcgccaccgccactcgcgctaccttctcgccctacccgactcccgaacgaaaaataaaaccgaccgacgactccccgaacgccgactaaaaaacgaatcccgacaaaatctctacgcgtccgtcgatccgaatcgcgctaaacaaaactcaacgccgaactccaactacccgcgaaccgataccgccgccgacgccgcccgctctcgac

SEQ ID NO: 27339 - DNA, 1022 bp, Artificial Sequence
  chemically treated genomic DNA (Homo sapiens) CpG-island No: 27339
taggttttttagagtttagtttgtagggacgcggagggtaggagtcgtcggcgaggagtagttaatttgttatttttggcggttgtatttttcggcggttataggttgttcgatagcggattttagggttttcgcgacggtatttagagtgtttagaagggaggtcggggtcggggtgggtcgggaaaatcgagggagggaaggagtttggagaagtttcgtttaggcggggagggggcgattcggggcgtatttttcgattatgatttttatagattttggcgtcgtaatttgcgttttttgaggtcgaagatgcgtattttggagaagatatttattaggttgtcgttgtagagttcgcggtttttgttggggttgtttcgttttttgttggtagacggtcggttttagtgttgttttcgcgtttgtcgtttttggcggattaagtcgttagcgatggtcgcggttatggtggtttcgggaacgggttcggggagggagggcgcgggaggacggcgagtcgggggtatcggaggggaagtcggcggcgtagatcgtggttcgttttcggggtagaggagagggtgttaggcgggattggggagaggggaaggggcgtttagttttgatcgggatttatcgtttttttcgcggggcgcggggttaggcgcgtagatgcgtttagggcgtagtcggacgatttcgggaagtcggaggtcgtggtcgtcgtcgtttggttacgttcgagtggagagcgggatcgcggttgcgggcgttgttggttatcgttcgtcgtaggaatttcggcgggggtcgttatcgttattcgcgttgttttttcgttttgttcggttttcgggcgggaggtagagtcggtcggcggtttttcgggcgtcggttggagggcgggtttcggtagggtttttgcgcgttcgtcggttcgggtcgcgttgggtaggatttagcgtcgggttttagttgttcgcgggtcggtgtcgtcgtcggcgtcgttcgttttcggt

SEQ ID NO: 27340 - DNA, 1022 bp, Artificial Sequence
  chemically treated genomic DNA (Homo sapiens) CpG-island No: 27340
accgaaaacgaacgacgccgacgacgacaccgacccgcgaacaactaaaacccgacgctaaatcctacccaacgcgacccgaaccgacgaacgcgcaaaaaccctaccgaaacccgccctccaaccgacgcccgaaaaaccgccgaccgactctacctcccgcccgaaaaccgaacaaaacgaaaaaacaacgcgaataacgataacgacccccgccgaaattcctacgacgaacgataaccaacaacgcccgcaaccgcgatcccgctctccactcgaacgtaaccaaacgacgacgaccacgacctccgacttcccgaaatcgtccgactacgccctaaacgcatctacgcgcctaaccccgcgccccgcgaaaaaaacgataaatcccgatcaaaactaaacgccccttcccctctccccaatcccgcctaacaccctctcctctaccccgaaaacgaaccacgatctacgccgccgacttcccctccgatacccccgactcgccgtcctcccgcgccctccctccccgaacccgttcccgaaaccaccataaccgcgaccatcgctaacgacttaatccgccaaaaacgacaaacgcgaaaacaacactaaaaccgaccgtctaccaacaaaaaacgaaacaaccccaacaaaaaccgcgaactctacaacgacaacctaataaatatcttctccaaaatacgcatcttcgacctcaaaaaacgcaaattacgacgccaaaatctataaaaatcataatcgaaaaatacgccccgaatcgccccctccccgcctaaacgaaacttctccaaactccttccctccctcgattttcccgacccaccccgaccccgacctcccttctaaacactctaaataccgtcgcgaaaaccctaaaatccgctatcgaacaacctataaccgccgaaaaatacaaccgccaaaaataacaaattaactactcctcgccgacgactcctaccctccgcgtccctacaaactaaactctaaaaaaccta

SEQ ID NO: 27341 - DNA, 725 bp, Artificial Sequence
  chemically treated genomic DNA (Homo sapiens) CpG-island No: 27341
gcgaaaaaagacggagcgcgagtaacgtgatagacgtaggcggggatgtcgaggcggaatagcggcgggggcgttaatattagaacggacgcgcggaaataagatagaatagtgcggcgggcgagagggatacggaatatatatgggaaaatatgagagagcggggcggcgaatgacgagttaatttaaattcgcggcggtggcgcggggcgcgaatacgaggtcgtatttaatgatttgtaatattattgcgtcggtagcggcggggggtgattattcgcgtaatataaggcgattgattagggcgtagattaggggtagcggattggggaaaaaacggcgcgttttacgggggtatagaagggggagtaaatgacgcgaaggcgataaagaagggggaattcggggaaggcggcgtaaaagaaggggcggggagtaattagggtcgagggacgattaggtgtcggtattcgcggcgacgcgagagaggggaaaggcggggagattatggaagggtggatcgaggggtaacgcgttcgttcgttcggttatcgttacgggttttttaatacggggtaaaaaaggcgggtcggcggtttttttacgtaaagtttcgttaacgggttttcgcgttttttttgggaatcggttaatatttcggatcggtagttttagttttttttttaataaaaagaggggggttcgtcggcgaaaaaaaaaaaggg

SEQ ID NO: 27342 - DNA, 725 bp, Artificial Sequence
  chemically treated genomic DNA (Homo sapiens) CpG-island No: 27342
ccctttttttttttcgccgacgaacccccctctttttattaaaaaaaaaactaaaactaccgatccgaaatattaaccgattcccaaaaaaaacgcgaaaacccgttaacgaaactttacgtaaaaaaaccgccgacccgccttttttaccccgtattaaaaaacccgtaacgataaccgaacgaacgaacgcgttacccctcgatccacccttccataatctccccgcctttcccctctctcgcgtcgccgcgaataccgacacctaatcgtccctcgaccctaattactccccgccccttcttttacgccgccttccccgaattcccccttctttatcgccttcgcgtcatttactcccccttctatacccccgtaaaacgcgccgttttttccccaatccgctacccctaatctacgccctaatcaatcgccttatattacgcgaataatcaccccccgccgctaccgacgcaataatattacaaatcattaaatacgacctcgtattcgcgccccgcgccaccgccgcgaatttaaattaactcgtcattcgccgccccgctctctcatattttcccatatatattccgtatccctctcgcccgccgcactattctatcttatttccgcgcgtccgttctaatattaacgcccccgccgctattccgcctcgacatccccgcctacgtctatcacgttactcgcgctccgtcttttttcgc

SEQ ID NO: 27343 - DNA, 725 bp, Artificial Sequence
  chemically treated genomic DNA (Homo sapiens) CpG-island No: 27343
ttttttttttttttcgtcggcgggtttttttttttttgttggggggggggttggggttgtcggttcggggtgttggtcggtttttagggggggcgcgggggttcgttggcggggttttgcgtgggggggtcgtcggttcgttttttttgtttcgtgttggggggttcgtagcgatggtcgggcgggcgggcgcgttatttttcggtttatttttttatggttttttcgttttttttttttttcgcgtcgtcgcgggtgtcggtatttggtcgtttttcggttttgattatttttcgtttttttttttgcgtcgtttttttcgggtttttttttttttgtcgttttcgcgttatttgtttttttttttgtattttcgtggggcgcgtcgttttttttttagttcgttgtttttggtttacgttttggttaatcgttttatgttgcgcgggtggttatttttcgtcgttatcggcgtagtggtattgtaagttattagatgcggtttcgtgttcgcgtttcgcgttatcgtcgcgagtttggattggttcgttattcgtcgtttcgtttttttatgtttttttatatatgtttcgtgtttttttcgttcgtcgtattgttttgttttgttttcgcgcgttcgttttggtgttggcgttttcgtcgttgtttcgtttcggtattttcgtttgcgtttattacgttgttcgcgtttcgttttttttcgt

SEQ ID NO: 27344 - DNA, 725 bp, Artificial Sequence
  chemically treated genomic DNA (Homo sapiens) CpG-island No: 27344
acgaaaaaaaacgaaacgcgaacaacgtaataaacgcaaacgaaaataccgaaacgaaacaacgacgaaaacgccaacaccaaaacgaacgcgcgaaaacaaaacaaaacaatacgacgaacgaaaaaaacacgaaacatatataaaaaaacataaaaaaacgaaacgacgaataacgaaccaatccaaactcgcgacgataacgcgaaacgcgaacacgaaaccgcatctaataacttacaataccactacgccgataacgacgaaaaataaccacccgcgcaacataaaacgattaaccaaaacgtaaaccaaaaacaacgaactaaaaaaaaaacgacgcgccccacgaaaatacaaaaaaaaaaacaaataacgcgaaaacgacaaaaaaaaaaaaacccgaaaaaaacgacgcaaaaaaaaaaacgaaaaataatcaaaaccgaaaaacgaccaaataccgacacccgcgacgacgcgaaaaaaaaaaaaaacgaaaaaaccataaaaaaataaaccgaaaaataacgcgcccgcccgcccgaccatcgctacgaaccccccaacacgaaacaaaaaaaacgaaccgacgacccccccacgcaaaaccccgccaacgaacccccgcgccccccctaaaaaccgaccaacaccccgaaccgacaaccccaaccccccccccaacaaaaaaaaaaaaacccgccgacgaaaaaaaaaaaaaa

SEQ ID NO: 27345 - DNA, 958 bp, Artificial Sequence
  chemically treated genomic DNA (Homo sapiens) CpG-island No: 27345
ttttatgtttatgcgttttttgtttattcgtttattgtttaattcgcgttttatgtttattcgtttgttgtttatttcgcgtttttagtgtattcgtttagtttcgagcgttcgcggagtcgagtggagagtagcggtcgtagcgcggcgttaggttcgggttgggttggtcggcgcgaattttcgggggcgtttgggcggttaggtcgggtggcggttgcgtacgtaggagtattttttgagtttagtcgttcggtcggtttgattcgcgggtgatcggatacgagtaacgcgtgcgtttcgatttgtgttttgcgcggggtcgggcggggatcggtcgggggcgtcgcgcgttcggtcgggttgattgtcgggggcgattttcgcggggtaaggcgggggcgcgggagtagcgcgtagttgcggggttattttatttgagcgttttgaggttagggtcggggtttgaggatacggcgttgggtttcgggggacgcgggtttacgtcggcgttcgagcgttattttttcgtttttcgtcggtttacgtagtttcggggttcggtacgtgaagtgtcggcgcgaggttgtttaggttatcgtatgggtcgggcgataaataatcgtataggatatataatattttggattgttataagtttttcgtaggaaaagataaataatatttgaggcgttgcggcgcggttttttcgggttgaataaaaattaggaggtggggggcggtggggcgaagtaaataatagaatcgaagaattgtcgtacggagtttgggtcggcggagaaaattagatgtagtttttttttttttggtgattattcgtgggggtttttttcggtggaaatgagcgatatatatattatattatatattacgtttaaattttgtttttgaaagcgataggtagttgtttttttgggtaagaggcgtatttttttag

SEQ ID NO: 27346 - DNA, 958 bp, Artificial Sequence
  chemically treated genomic DNA (Homo sapiens) CpG-island No: 27346
ctaaaaaaatacgcctcttacccaaaaaaacaactacctatcgctttcaaaaacaaaatttaaacgtaatatataatataatatatatatcgctcatttccaccgaaaaaaacccccacgaataatcaccaaaaaaaaaaaaactacatctaattttctccgccgacccaaactccgtacgacaattcttcgattctattatttacttcgccccaccgccccccacctcctaatttttattcaacccgaaaaaaccgcgccgcaacgcctcaaatattatttatcttttcctacgaaaaacttataacaatccaaaatattatatatcctatacgattatttatcgcccgacccatacgataacctaaacaacctcgcgccgacacttcacgtaccgaaccccgaaactacgtaaaccgacgaaaaacgaaaaaataacgctcgaacgccgacgtaaacccgcgtcccccgaaacccaacgccgtatcctcaaaccccgaccctaacctcaaaacgctcaaataaaataaccccgcaactacgcgctactcccgcgcccccgccttaccccgcgaaaatcgcccccgacaatcaacccgaccgaacgcgcgacgcccccgaccgatccccgcccgaccccgcgcaaaacacaaatcgaaacgcacgcgttactcgtatccgatcacccgcgaatcaaaccgaccgaacgactaaactcaaaaaatactcctacgtacgcaaccgccacccgacctaaccgcccaaacgcccccgaaaattcgcgccgaccaacccaacccgaacctaacgccgcgctacgaccgctactctccactcgactccgcgaacgctcgaaactaaacgaatacactaaaaacgcgaaataaacaacaaacgaataaacataaaacgcgaattaaacaataaacgaataaacaaaaaacgcataaacataaaa

SEQ ID NO: 27347 - DNA, 958 bp, Artificial Sequence
  chemically treated genomic DNA (Homo sapiens) CpG-island No: 27347
ttggggaaatgcgttttttatttagagaggtagttgtttatcgtttttaaggataaagtttgaacgtagtgtgtggtgtggtgtgtgtgtcgtttatttttatcgggagaaatttttacggatagttattaaagggaaggagattgtatttgatttttttcgtcggtttaggtttcgtgcggtaatttttcggttttgttgtttatttcgttttatcgttttttattttttagtttttgtttagttcggggaagtcgcgtcgtagcgttttagatgttatttatttttttttgcgaggggtttgtgatagtttagggtgttgtgtattttgtgcgattgtttatcgttcggtttatgcggtggtttgagtagtttcgcgtcggtattttacgtatcgaatttcgggattacgtgagtcggcggagggcggggaggtggcgttcgggcgtcggcgtgaattcgcgtttttcggagtttagcgtcgtgtttttaggtttcggttttgattttagggcgtttaggtggaatggtttcgtagttgcgcgttgttttcgcgttttcgttttgtttcgcggaaatcgttttcgatagttaattcgatcgggcgcgcggcgttttcggtcggttttcgttcgatttcgcgtagggtatagatcggggcgtacgcgttattcgtattcggttattcgcgggttaggtcggtcgagcggttgggtttagggggtatttttacgtgcgtagtcgttattcggtttggtcgtttagacgttttcgggggttcgcgtcggttagtttagttcgagtttggcgtcgcgttgcggtcgttgttttttattcggtttcgcgggcgttcggggttgggcgggtgtattgggggcgcggggtgggtagtaggcgggtggatatggggcgcgggttggatagtgagcgggtggatagggggcgtatggatatgggg

SEQ ID NO: 27348 - DNA, 958 bp, Artificial Sequence
  chemically treated genomic DNA (Homo sapiens) CpG-island No: 27348
ccccatatccatacgccccctatccacccgctcactatccaacccgcgccccatatccacccgcctactacccaccccgcgcccccaatacacccgcccaaccccgaacgcccgcgaaaccgaataaaaaacaacgaccgcaacgcgacgccaaactcgaactaaactaaccgacgcgaacccccgaaaacgtctaaacgaccaaaccgaataacgactacgcacgtaaaaataccccctaaacccaaccgctcgaccgacctaacccgcgaataaccgaatacgaataacgcgtacgccccgatctataccctacgcgaaatcgaacgaaaaccgaccgaaaacgccgcgcgcccgatcgaattaactatcgaaaacgatttccgcgaaacaaaacgaaaacgcgaaaacaacgcgcaactacgaaaccattccacctaaacgccctaaaatcaaaaccgaaacctaaaaacacgacgctaaactccgaaaaacgcgaattcacgccgacgcccgaacgccacctccccgccctccgccgactcacgtaatcccgaaattcgatacgtaaaataccgacgcgaaactactcaaaccaccgcataaaccgaacgataaacaatcgcacaaaatacacaacaccctaaactatcacaaacccctcgcaaaaaaaaataaataacatctaaaacgctacgacgcgacttccccgaactaaacaaaaactaaaaaataaaaaacgataaaacgaaataaacaacaaaaccgaaaaattaccgcacgaaacctaaaccgacgaaaaaaatcaaatacaatctccttccctttaataactatccgtaaaaatttctcccgataaaaataaacgacacacacaccacaccacacactacgttcaaactttatccttaaaaacgataaacaactacctctctaaataaaaaacgcatttccccaa

SEQ ID NO: 27349 - DNA, 595 bp, Artificial Sequence
  chemically treated genomic DNA (Homo sapiens) CpG-island No: 27349
tatgcgtacggcgtgatagtgatggatgaaggtaggtgagacggtatgaggggtatcggagaagcgcgagtgaggtacgggagaggggtgtataggagagacgtgggaggtggagcgaggaggtcgtgcgagatggacgaacgtgagagtggaggcggtggagggatgaagtagaaggtagggataggagatagggggagtgagggttgtatgcggcgggaggtgagtgagagttgttgatatgtacgagtgagtggagattgagcgcggggtaggtgtagttcggtgtgagggagaggagcggggagtaggcgcggaggcgcgagaaggtagggtgcgggcgtgtgttggggaatagtaaggggcggggtattggggcggaggtcgaggttagaacgggagttttgcggcggagtaggggagggggatgatggagattaagggaggtacgtgtgagagcggcgtgggttcgtgcgtcgtgtcgcggagggtgattgtcgttttagttagggagggggttaagtgtggaggcggaggaggcgggtcgtaaagaagagaaagagtttcgagagtagatgttaagcgaaggcgagtg

SEQ ID NO: 27350 - DNA, 595 bp, Artificial Sequence
  chemically treated genomic DNA (Homo sapiens) CpG-island No: 27350
cactcgccttcgcttaacatctactctcgaaactctttctcttctttacgacccgcctcctccgcctccacacttaaccccctccctaactaaaacgacaatcaccctccgcgacacgacgcacgaacccacgccgctctcacacgtacctcccttaatctccatcatccccctcccctactccgccgcaaaactcccgttctaacctcgacctccgccccaataccccgccccttactattccccaacacacgcccgcaccctaccttctcgcgcctccgcgcctactccccgctcctctccctcacaccgaactacacctaccccgcgctcaatctccactcactcgtacatatcaacaactctcactcacctcccgccgcatacaaccctcactccccctatctcctatccctaccttctacttcatccctccaccgcctccactctcacgttcgtccatctcgcacgacctcctcgctccacctcccacgtctctcctatacacccctctcccgtacctcactcgcgcttctccgatacccctcataccgtctcacctaccttcatccatcactatcacgccgtacgcata

SEQ ID NO: 27351 - DNA, 595 bp, Artificial Sequence
  chemically treated genomic DNA (Homo sapiens) CpG-island No: 27351
tattcgttttcgtttaatatttattttcgaaatttttttttttttttgcgattcgtttttttcgtttttatatttagttttttttttggttgaggcggtagttatttttcgcggtacggcgtacgagtttacgtcgtttttatacgtgttttttttgatttttattattttttttttttatttcgtcgtagaattttcgttttgatttcggttttcgttttagtgtttcgttttttattattttttaatatacgttcgtattttgttttttcgcgttttcgcgtttatttttcgttttttttttttatatcggattgtatttatttcgcgtttaatttttatttattcgtgtatgttaataatttttatttatttttcgtcgtatataatttttattttttttattttttatttttgttttttattttatttttttatcgtttttatttttacgttcgtttatttcgtacgattttttcgttttattttttacgttttttttatatatttttttttcgtattttattcgcgttttttcggtattttttatatcgttttatttatttttatttattattgttacgtcgtgcgtata

SEQ ID NO: 27352 - DNA, 595 bp, Artificial Sequence
  chemically treated genomic DNA (Homo sapiens) CpG-island No: 27352
tatacgcacgacgtaacaataataaataaaaataaataaaacgatataaaaaataccgaaaaaacgcgaataaaatacgaaaaaaaaatatataaaaaaaacgtaaaaaataaaacgaaaaaatcgtacgaaataaacgaacgtaaaaataaaaacgataaaaaaataaaataaaaaacaaaaataaaaaataaaaaaaataaaaattatatacgacgaaaaataaataaaaattattaacatacacgaataaataaaaattaaacgcgaaataaatacaatccgatataaaaaaaaaaaacgaaaaataaacgcgaaaacgcgaaaaaacaaaatacgaacgtatattaaaaaataataaaaaacgaaacactaaaacgaaaaccgaaatcaaaacgaaaattctacgacgaaataaaaaaaaaaaataataaaaatcaaaaaaaacacgtataaaaacgacgtaaactcgtacgccgtaccgcgaaaaataactaccgcctcaaccaaaaaaaaaactaaatataaaaacgaaaaaaacgaatcgcaaaaaaaaaaaaaaatttcgaaaataaatattaaacgaaaacgaata

SEQ ID NO: 27353 - DNA, 772 bp, Artificial Sequence
  chemically treated genomic DNA (Homo sapiens) CpG-island No: 27353
  unsure (45)
ttatggttcggttaggcgggggttacggaggtcgaggcgacgttnatttggtttttaggtttttttcgcggcggcggcggcgggggcgcggtagtttttttagttcgtttgttcgagcgcgagtagttagcgagttgtacgtacgcgcggggtttttgggcgcgcgggtttcgcgttcgatcgtcgttgtttgttgcggttcgcgagttcgatacgggtgggcgtgttcgggagggggcggggagttcggttcgcgcggttttatttagcgcggaggggtcgcgtcgggcgcgttcgcgttttgcgtgtagttacgcgcgtttttcgttttcgcggagtagaaggggtggtttgtggttagtacgcgtttacgggttttgtttttaaattcgttgttagtttgttttcgtttttttttttttcgtttacggtcggtcgcggtttcgttagcggaaattcggttttttcgggattcggtttttgtagggagggggtcgtcgcgggagcgcgtttcggtttttcgggttttcggagttaatgcggaattcgtttttagcggtgggggtttgttcggggaagtcggtttttcgtttgtcgatttagttttgttttgcggtttcggtaaatagagaggtcggcggagattcggggttcgttgttatcgcgggtgtttgtgattcgggaagttttcgtttcgagggtaagcgggggtttagggatttggagtttagaaggtttttcgtataagtgaatttttaagttatttcggggt

SEQ ID NO: 27354 - DNA, 772 bp, Artificial Sequence
  chemically treated genomic DNA (Homo sapiens) CpG-island No: 27354
  unsure (728)
accccgaaataacttaaaaattcacttatacgaaaaaccttctaaactccaaatccctaaacccccgcttaccctcgaaacgaaaacttcccgaatcacaaacacccgcgataacaacgaaccccgaatctccgccgacctctctatttaccgaaaccgcaaaacaaaactaaatcgacaaacgaaaaaccgacttccccgaacaaacccccaccgctaaaaacgaattccgcattaactccgaaaacccgaaaaaccgaaacgcgctcccgcgacgaccccctccctacaaaaaccgaatcccgaaaaaaccgaatttccgctaacgaaaccgcgaccgaccgtaaacgaaaaaaaaaaaaacgaaaacaaactaacaacgaatttaaaaacaaaacccgtaaacgcgtactaaccacaaaccaccccttctactccgcgaaaacgaaaaacgcgcgtaactacacgcaaaacgcgaacgcgcccgacgcgacccctccgcgctaaataaaaccgcgcgaaccgaactccccgccccctcccgaacacgcccacccgtatcgaactcgcgaaccgcaacaaacaacgacgatcgaacgcgaaacccgcgcgcccaaaaaccccgcgcgtacgtacaactcgctaactactcgcgctcgaacaaacgaactaaaaaaactaccgcgcccccgccgccgccgccgcgaaaaaaacctaaaaaccaaatnaacgtcgcctcgacctccgtaacccccgcctaaccgaaccataa

SEQ ID NO: 27355 - DNA, 772 bp, Artificial Sequence
  chemically treated genomic DNA (Homo sapiens) CpG-island No: 27355
  unsure (728)
gtttcggggtagtttgagaatttatttatgcgaagaattttttggattttaggtttttgagttttcgtttgttttcggggcgggaatttttcggattataggtattcgcggtggtagcgggtttcgggttttcgtcgatttttttgtttgtcggggtcgtagggtagggttaggtcggtaggcggagagtcggttttttcgggtagatttttatcgttgggggcgggtttcgtattggtttcgaagattcgaggggtcgaggcgcgttttcgcggcggttttttttttgtagggatcgaatttcggaaaagtcgggttttcgttggcggggtcgcggtcggtcgtgggcggggaggggaggagcgggggtagattggtagcggatttgagggtaggattcgtgggcgcgtgttggttatagattattttttttatttcgcgggagcgaggggcgcgcgtggttgtacgtagggcgcgagcgcgttcggcgcggttttttcgcgttgggtggggtcgcgcgggtcgggtttttcgttttttttcggatacgtttattcgtgtcgggttcgcgagtcgtaataggtagcggcggtcgagcgcgaggttcgcgcgtttagaggtttcgcgcgtgcgtgtagttcgttggttgttcgcgttcgggtaggcgggttgaggaggttgtcgcgttttcgtcgtcgtcgtcgcgggggaagtttgggagttagatnggcgtcgtttcggttttcgtaattttcgtttagtcgggttatgg

SEQ ID NO: 27356 - DNA, 772 bp, Artificial Sequence
  chemically treated genomic DNA (Homo sapiens) CpG-island No: 27356
  unsure (45)
ccataacccgactaaacgaaaattacgaaaaccgaaacgacgccnatctaactcccaaacttcccccgcgacgacgacgacgaaaacgcgacaacctcctcaacccgcctacccgaacgcgaacaaccaacgaactacacgcacgcgcgaaacctctaaacgcgcgaacctcgcgctcgaccgccgctacctattacgactcgcgaacccgacacgaataaacgtatccgaaaaaaaacgaaaaacccgacccgcgcgaccccacccaacgcgaaaaaaccgcgccgaacgcgctcgcgccctacgtacaaccacgcgcgcccctcgctcccgcgaaataaaaaaaataatctataaccaacacgcgcccacgaatcctaccctcaaatccgctaccaatctacccccgctcctcccctccccgcccacgaccgaccgcgaccccgccaacgaaaacccgacttttccgaaattcgatccctacaaaaaaaaaaccgccgcgaaaacgcgcctcgacccctcgaatcttcgaaaccaatacgaaacccgcccccaacgataaaaatctacccgaaaaaaccgactctccgcctaccgacctaaccctaccctacgaccccgacaaacaaaaaaatcgacgaaaacccgaaacccgctaccaccgcgaatacctataatccgaaaaattcccgccccgaaaacaaacgaaaactcaaaaacctaaaatccaaaaaattcttcgcataaataaattctcaaactaccccgaaac

SEQ ID NO: 27357 - DNA, 563 bp, Artificial Sequence
  chemically treated genomic DNA (Homo sapiens) CpG-island No: 27357
cgttattttagtcgtaggaaggcgcgcgattaattcggaagttggggttagttttagggtttatttgtcggaattttcggtggcgtcgtatgttacgttttttttggttgggaggcgacgcgtatttaggtatattcgttgtcgtgcgttgggcgacgggattcgtcgtagacgtatttttttttagtggtttttcggcgttttggtcgcgaggttttttgggagttgtagtgcgtaggtttcggtttttgcgggttttgcgcgtcgttacggtttcgaaggtcggcggcgggtcggagggcggggttgcgaggagggttggtattttttcgagggagtgttttttgcgttttatttgcgggagcgaaggtttttaagtttttcggttcggtttttcggttagattttcgaacgtttacgtttttagggagtttcgagagatttattttttcggcggtttcgcgttgcgggcgttaagcgggaggttggagtcgatgtttgggataaaatagtgtttgattgtttgttcgtttattttcggtttaggttcggatgaatgggtt

SEQ ID NO: 27358 - DNA, 563 bp, Artificial Sequence
  chemically treated genomic DNA (Homo sapiens) CpG-island No: 27358
aacccattcatccgaacctaaaccgaaaataaacgaacaaacaatcaaacactattttatcccaaacatcgactccaacctcccgcttaacgcccgcaacgcgaaaccgccgaaaaaataaatctctcgaaactccctaaaaacgtaaacgttcgaaaatctaaccgaaaaaccgaaccgaaaaacttaaaaaccttcgctcccgcaaataaaacgcaaaaaacactccctcgaaaaaataccaaccctcctcgcaaccccgccctccgacccgccgccgaccttcgaaaccgtaacgacgcgcaaaacccgcaaaaaccgaaacctacgcactacaactcccaaaaaacctcgcgaccaaaacgccgaaaaaccactaaaaaaaaatacgtctacgacgaatcccgtcgcccaacgcacgacaacgaatatacctaaatacgcgtcgcctcccaaccaaaaaaaacgtaacatacgacgccaccgaaaattccgacaaataaaccctaaaactaaccccaacttccgaattaatcgcgcgccttcctacgactaaaataacg

SEQ ID NO: 27359 - DNA, 563 bp, Artificial Sequence
  chemically treated genomic DNA (Homo sapiens) CpG-island No: 27359
agtttatttattcgggtttgggtcgggggtgggcgggtagataattagatattgttttattttaggtatcggttttagtttttcgtttggcgttcgtaacgcggggtcgtcggggaaatgagtttttcgggattttttgggagcgtaagcgttcgaggatttgatcggagggtcgggtcggaaagtttgagagttttcgttttcgtaggtgaggcgtagaaaatattttttcggggaagtgttagtttttttcgtagtttcgtttttcggttcgtcgtcggttttcggggtcgtagcggcgcgtagggttcgtagagatcgagatttgcgtattataatttttaggaggtttcgcgattagaacgtcgaggggttattagagaaaggtgcgtttgcggcgaatttcgtcgtttagcgtacggtagcgggtgtgtttgagtgcgcgtcgttttttaattagagaggacgtggtatacggcgttatcggaagtttcggtaagtgggttttgaggttggttttagttttcgggttggtcgcgcgtttttttgcggttaagatggcg

SEQ ID NO: 27360 - DNA, 563 bp, Artificial Sequence
  chemically treated genomic DNA (Homo sapiens) CpG-island No: 27360
cgccatcttaaccgcaaaaaaacgcgcgaccaacccgaaaactaaaaccaacctcaaaacccacttaccgaaacttccgataacgccgtataccacgtcctctctaattaaaaaacgacgcgcactcaaacacacccgctaccgtacgctaaacgacgaaattcgccgcaaacgcacctttctctaataacccctcgacgttctaatcgcgaaacctcctaaaaattataatacgcaaatctcgatctctacgaaccctacgcgccgctacgaccccgaaaaccgacgacgaaccgaaaaacgaaactacgaaaaaaactaacacttccccgaaaaaatattttctacgcctcacctacgaaaacgaaaactctcaaactttccgacccgaccctccgatcaaatcctcgaacgcttacgctcccaaaaaatcccgaaaaactcatttccccgacgaccccgcgttacgaacgccaaacgaaaaactaaaaccgatacctaaaataaaacaatatctaattatctacccgcccacccccgacccaaacccgaataaataaact

SEQ ID NO: 27361 - DNA, 507 bp, Artificial Sequence
  chemically treated genomic DNA (Homo sapiens) CpG-island No: 27361
gagggtcgaagttaaattttttttagtggcggtgtatgcgttttatatggttttttcggtttgggaaaggaatgagaagtttttatgattttttcgcgagaagggaagtttttatgttacgttagagattagagattttggcgtcgagcgataggtgtcggaataaataggcgatgagaaatcgcggacgcggaattattttttgggtaggattttcggcggaaaagcgggttgtttcggaaatttagagtcgggtttttttcgggtttttgtcgggtttttttttgcggtttttgggttgttgagatttttgtgaagatggtttgcgttgtcgcgcggttttcggtcgattaggataggtgggttttgaggcggtgggtttttcgaaaggaaggggtttgttgtggtgttgtaggtgttatatcgcgttttttcgtttcgcggtttttagaatggtttaattagatttaattcgttttgtacgggtttcgcgtttttttttggtag

SEQ ID NO: 27362 - DNA, 507 bp, Artificial Sequence
  chemically treated genomic DNA (Homo sapiens) CpG-island No: 27362
ctaccaaaaaaaaacgcgaaacccgtacaaaacgaattaaatctaattaaaccattctaaaaaccgcgaaacgaaaaaacgcgatataacacctacaacaccacaacaaaccccttcctttcgaaaaacccaccgcctcaaaacccacctatcctaatcgaccgaaaaccgcgcgacaacgcaaaccatcttcacaaaaatctcaacaacccaaaaaccgcaaaaaaaaacccgacaaaaacccgaaaaaaacccgactctaaatttccgaaacaacccgcttttccgccgaaaatcctacccaaaaaataattccgcgtccgcgatttctcatcgcctatttattccgacacctatcgctcgacgccaaaatctctaatctctaacgtaacataaaaacttcccttctcgcgaaaaaatcataaaaacttctcattcctttcccaaaccgaaaaaaccatataaaacgcatacaccgccactaaaaaaaatttaacttcgaccctc

SEQ ID NO: 27363 - DNA, 507 bp, Artificial Sequence
  chemically treated genomic DNA (Homo sapiens) CpG-island No: 27363
ttgttagggagaggcgcggggttcgtatagagcgagttggatttagttagattattttggaggtcgcggagcggagaagcgcggtgtagtatttgtagtattatagtaagtttttttttttcggaggatttatcgttttagaatttatttgttttggtcggtcggggatcgcgcggtagcgtaagttatttttataagagttttaataatttaggagtcgtagggagaaattcggtagaaattcgggaggaattcggttttgagttttcgagatagttcgttttttcgtcggaagttttgtttaagaaatggtttcgcgttcgcgattttttatcgtttgtttgtttcggtatttgtcgttcggcgttaggatttttagtttttgacgtggtatgaagattttttttttcgcgagagaattatgaaagttttttattttttttttaagtcgggaagattatgtggggcgtatgtatcgttattaaaaagggtttaatttcgattttt

SEQ ID NO: 27364 - DNA, 507 bp, Artificial Sequence
  chemically treated genomic DNA (Homo sapiens) CpG-island No: 27364
aaaaatcgaaattaaaccctttttaataacgatacatacgccccacataatcttcccgacttaaaaaaaaaataaaaaactttcataattctctcgcgaaaaaaaaaatcttcataccacgtcaaaaactaaaaatcctaacgccgaacgacaaataccgaaacaaacaaacgataaaaaatcgcgaacgcgaaaccatttcttaaacaaaacttccgacgaaaaaacgaactatctcgaaaactcaaaaccgaattcctcccgaatttctaccgaatttctccctacgactcctaaattattaaaactcttataaaaataacttacgctaccgcgcgatccccgaccgaccaaaacaaataaattctaaaacgataaatcctccgaaaaaaaaaaacttactataatactacaaatactacaccgcgcttctccgctccgcgacctccaaaataatctaactaaatccaactcgctctatacgaaccccgcgcctctccctaacaa

SEQ ID NO: 27365 - DNA, 552 bp, Artificial Sequence
  chemically treated genomic DNA (Homo sapiens) CpG-island No: 27365
agttttcgttaaggaggcgcgtttatagtttcggaagaagggcggagatttacgagggttaagagtgacgggggattaatatatatacgatcgaggtattggtatgtaagttcggattaagttttatgatttatttatacgcgatattataagagttatattcgtttagttagaggttaggggtaagcggtggagtattaacggtcgattatttagtttatagtattatttagagacgtagaagtcgtaggataatttgaattaaagacgataaggcgtttcgcggggtttaggcgttattaatttagtcgcggagttacgtttcgcgtcgttgttagggcgtcggtagaggttcgatttttcgattttaggcggtcgagtttgggcgtacggaggggcggggtttggggcggggttttcgggatttattttttattcgtgatcggcgtttttgcgtgtagggatttgggttgcgttggggcggggttgcgttttggaaaggttaaaatttgaaagtgtggtattaataagtataataattatgggtgtaat

SEQ ID NO: 27366 - DNA, 552 bp, Artificial Sequence
  chemically treated genomic DNA (Homo sapiens) CpG-island No: 27366
attacacccataattattatacttattaataccacactttcaaattttaacctttccaaaacgcaaccccgccccaacgcaacccaaatccctacacgcaaaaacgccgatcacgaataaaaaataaatcccgaaaaccccgccccaaaccccgcccctccgtacgcccaaactcgaccgcctaaaatcgaaaaatcgaacctctaccgacgccctaacaacgacgcgaaacgtaactccgcgactaaattaataacgcctaaaccccgcgaaacgccttatcgtctttaattcaaattatcctacgacttctacgtctctaaataatactataaactaaataatcgaccgttaatactccaccgcttacccctaacctctaactaaacgaatataactcttataatatcgcgtataaataaatcataaaacttaatccgaacttacataccaatacctcgatcgtatatatattaatcccccgtcactcttaaccctcgtaaatctccgcccttcttccgaaactataaacgcgcctccttaacgaaaact

SEQ ID NO: 27367 - DNA, 552 bp, Artificial Sequence
  chemically treated genomic DNA (Homo sapiens) CpG-island No: 27367
attgtatttataattattatatttgttgatgttatatttttaggttttaatttttttaaagcgtagtttcgttttagcgtagtttaagtttttgtacgtagaggcgtcgattacgggtgggaggtggatttcggaggtttcgttttaggtttcgttttttcgtgcgtttaagttcgatcgtttgaaatcggggaatcgggtttttgtcggcgttttggtagcggcgcggggcgtggtttcgcggttggattggtggcgtttgggtttcgcgaagcgttttgtcgtttttggtttaagttgttttgcgatttttgcgtttttgagtggtgttgtggattaggtgatcggtcgttgatgttttatcgtttatttttagtttttggttggacgagtgtagtttttgtagtgtcgcgtgtaggtagattatgaggtttggttcgaatttgtatgttaatatttcggtcgtgtgtgtattagtttttcgttatttttggttttcgtgggttttcgtttttttttcggagttgtgggcgcgtttttttggcggaggtt

SEQ ID NO: 27368 - DNA, 552 bp, Artificial Sequence
  chemically treated genomic DNA (Homo sapiens) CpG-island No: 27368
aacctccgccaaaaaaacgcgcccacaactccgaaaaaaaaacgaaaacccacgaaaaccaaaaataacgaaaaactaatacacacacgaccgaaatattaacatacaaattcgaaccaaacctcataatctacctacacgcgacactacaaaaactacactcgtccaaccaaaaactaaaaataaacgataaaacatcaacgaccgatcacctaatccacaacaccactcaaaaacgcaaaaatcgcaaaacaacttaaaccaaaaacgacaaaacgcttcgcgaaacccaaacgccaccaatccaaccgcgaaaccacgccccgcgccgctaccaaaacgccgacaaaaacccgattccccgatttcaaacgatcgaacttaaacgcacgaaaaaacgaaacctaaaacgaaacctccgaaatccacctcccacccgtaatcgacgcctctacgtacaaaaacttaaactacgctaaaacgaaactacgctttaaaaaaattaaaacctaaaaatataacatcaacaaatataataattataaatacaat

SEQ ID NO: 27369 - DNA, 1061 bp, Artificial Sequence
  chemically treated genomic DNA (Homo sapiens) CpG-island No: 27369
ttcgttacgtatacggttagggttatagtcgttagtagtacggcgtcgaaaaggatggcggttagggtttttttggggtcgtaatttttttcgcgtttttgtaaggatacgatcgaggaggggtcggcgttgatcgtggataggagttcggcgttcgtcgtttgtcgggtttgtacggtttagcggggtacgttgatttttatttttatgttgtcgattatttcgtttatttgaaggatttcgcgttttagttttcgtaggttcgcgacgtcgaagtcgtttttcgtttcgagtcgtaggttgcgggtgtttagcgcgcgcgtcgttacgtcggaggaggcgttagttatatttgtgcgtattagcggtcgtcgcggcgcgtgtagcgggaacgcggcgtttagttttagcgcgcgtcgtatgttcgtttttagtaggtttaggtagttcgagaaggttatttagagtcgttcgaattcggcgcgttcgtcggcggttaggtttcggtcgcgtagtatagtagttagtcgggcgtaggtggatatcgttagtttttgcgttttttggcgcgttttttgtagtttttgtcgtaggttttgcgagttcgtcgagttatcgacggttagtattaggtggtggtagtacgtagtcgttttgttgagttcgtttagtagcgttttgtatttttttttcgttatcgcggtgggtttcggttgggttcggtcgttcgcgttcgttagttttttttttagcgcggtaggatgtggttaatttttatttcggttttgggtcgcgcggtacgaacgttttttatggttcgtgattcgttcggcgttatcgttaacgtttacggagttcgttcgggattttcgacgtgcgtttttgcggacggggcgcgtagagggagtttcgttagcggtttttcgttttttcgtttattttttttaggcgtatttcgagttatacgtcgtgtttttgtatcgttttggtttttacggtggttttttgcgaagttgagggtgcggtttttatttttcgtgggtgttaatttcggggtaagt

SEQ ID NO: 27370 - DNA, 1061 bp, Artificial Sequence
  chemically treated genomic DNA (Homo sapiens) CpG-island No: 27370
acttaccccgaaattaacacccacgaaaaataaaaaccgcaccctcaacttcgcaaaaaaccaccgtaaaaaccaaaacgatacaaaaacacgacgtataactcgaaatacgcctaaaaaaaataaacgaaaaaacgaaaaaccgctaacgaaactccctctacgcgccccgtccgcaaaaacgcacgtcgaaaatcccgaacgaactccgtaaacgttaacgataacgccgaacgaatcacgaaccataaaaaacgttcgtaccgcgcgacccaaaaccgaaataaaaattaaccacatcctaccgcgctaaaaaaaaaactaacgaacgcgaacgaccgaacccaaccgaaacccaccgcgataacgaaaaaaaaatacaaaacgctactaaacgaactcaacaaaacgactacgtactaccaccacctaatactaaccgtcgataactcgacgaactcgcaaaacctacgacaaaaactacaaaaaacgcgccaaaaaacgcaaaaactaacgatatccacctacgcccgactaactactatactacgcgaccgaaacctaaccgccgacgaacgcgccgaattcgaacgactctaaataaccttctcgaactacctaaacctactaaaaacgaacatacgacgcgcgctaaaactaaacgccgcgttcccgctacacgcgccgcgacgaccgctaatacgcacaaatataactaacgcctcctccgacgtaacgacgcgcgcgctaaacacccgcaacctacgactcgaaacgaaaaacgacttcgacgtcgcgaacctacgaaaactaaaacgcgaaatccttcaaataaacgaaataatcgacaacataaaaataaaaatcaacgtaccccgctaaaccgtacaaacccgacaaacgacgaacgccgaactcctatccacgatcaacgccgacccctcctcgatcgtatccttacaaaaacgcgaaaaaaattacgaccccaaaaaaaccctaaccgccatccttttcgacgccgtactactaacgactataaccctaaccgtatacgtaacgaa

SEQ ID NO: 27371 - DNA, 1061 bp, Artificial Sequence
  chemically treated genomic DNA (Homo sapiens) CpG-island No: 27371
gtttgtttcggagttggtatttacggaggatggggatcgtatttttagtttcgtagggagttatcgtggaggttagggcggtgtagagatacgacgtgtgattcggagtgcgtttggggaggatggacgagggagcgggggatcgttaacggggttttttttgcgcgtttcgttcgtagaggcgtacgtcgagggtttcgggcgggtttcgtggacgttggcggtagcgtcgagcgagttacggattatgaagagcgttcgtgtcgcgcggtttaaggtcgggatgggggttagttatattttgtcgcgttgagggggaggttaacgggcgcgggcggtcgggtttagtcggagtttatcgcgatggcgagggaggagtgtaaggcgttgttggacgggtttaataagacgattgcgtgttattattatttggtgttgatcgtcggtggttcggcggattcgtagaatttgcggtaggagttgtaaaagacgcgttagaaggcgtaggagttggcggtgtttatttgcgttcggttgattgttgtgttgcgcgatcggggtttggtcgtcgacgagcgcgtcgagttcgagcggttttgggtggttttttcgggttgtttggatttgttggaagcggatatgcgacgcgcgttggagttgggcgtcgcgttttcgttgtacgcgtcgcggcggtcgttggtgcgtataggtgtggttggcgtttttttcggcgtggcggcgcgcgcgttgagtattcgtagtttgcggttcgaggcggagggcgatttcgacgtcgcggatttgcgggagttggagcgcgaggttttttaggtgggcgagatgatcgataatatggagatgaaggttaacgtgtttcgttggatcgtgtaagttcggtaggcggcgggcgtcgagtttttgtttacggttagcgtcggttttttttcggtcgtgtttttgtaggagcgcggggggggttgcgattttaggaaggttttggtcgttatttttttcggcgtcgtgttgttggcggttgtggttttagtcgtgtgcgtggcgaa

SEQ ID NO: 27372 - DNA, 1061 bp, Artificial Sequence
  chemically treated genomic DNA (Homo sapiens) CpG-island No: 27372
ttcgccacgcacacgactaaaaccacaaccgccaacaacacgacgccgaaaaaaataacgaccaaaaccttcctaaaatcgcaaccccccccgcgctcctacaaaaacacgaccgaaaaaaaaccgacgctaaccgtaaacaaaaactcgacgcccgccgcctaccgaacttacacgatccaacgaaacacgttaaccttcatctccatattatcgatcatctcgcccacctaaaaaacctcgcgctccaactcccgcaaatccgcgacgtcgaaatcgccctccgcctcgaaccgcaaactacgaatactcaacgcgcgcgccgccacgccgaaaaaaacgccaaccacacctatacgcaccaacgaccgccgcgacgcgtacaacgaaaacgcgacgcccaactccaacgcgcgtcgcatatccgcttccaacaaatccaaacaacccgaaaaaaccacccaaaaccgctcgaactcgacgcgctcgtcgacgaccaaaccccgatcgcgcaacacaacaatcaaccgaacgcaaataaacaccgccaactcctacgccttctaacgcgtcttttacaactcctaccgcaaattctacgaatccgccgaaccaccgacgatcaacaccaaataataataacacgcaatcgtcttattaaacccgtccaacaacgccttacactcctccctcgccatcgcgataaactccgactaaacccgaccgcccgcgcccgttaacctccccctcaacgcgacaaaatataactaacccccatcccgaccttaaaccgcgcgacacgaacgctcttcataatccgtaactcgctcgacgctaccgccaacgtccacgaaacccgcccgaaaccctcgacgtacgcctctacgaacgaaacgcgcaaaaaaaaccccgttaacgatcccccgctccctcgtccatcctccccaaacgcactccgaatcacacgtcgtatctctacaccgccctaacctccacgataactccctacgaaactaaaaatacgatccccatcctccgtaaataccaactccgaaacaaac

SEQ ID NO: 27373 - DNA, 1014 bp, Artificial Sequence
  chemically treated genomic DNA (Homo sapiens) CpG-island No: 27373
gtaattcgaggggttgggcgtcgtcggggttaggtgtttttgtcgcgttgcgtttacgttggtcggtgtttttaagcgttaattttatttttagtgttagttcggtttttagtttcgttttttacgttttgggtacgcgtagttgcgggcgtggggcggggttagttggagtaggaagcgtagggagtcgtttgagtttcgttttcggttgggttggattttatgattgttttgcgtatacgttattttgggaaacgacggttttttattgggttagttgtggcgcggtttcgttttacggcggagtaaggggtgggttatagggttagatcgtcgcgcgagggtggtgggtatcgaggttttagtagcggacgagggaggtgtcgtcgtcgtttaggatgggttgggaatgaagcgatgtagttttttaagtaagtgttttcgcgttggtttttttttgcgttttttttttcgcgggatggttgcgtttcggggcgcggcggtcgggcggggttcggagagtgaggggggaggggttttttgtttttcggagttcgttttcgggttcgttaggtggtttcgcgtcgttttagttttcgcgtttttaggtgggtgttcggtgcgtagtcggcgcgttttgtttatttcgtttttcgggtttggaggaggggagcggtcggcgcggagaatgtatttttcgagtttcgttgcgtcgatatcggcgggtgtggtcggggtgtcgggttcggcggttcggatttggcggggcgcggggcggtcgtcgcgcggtttttcggaggtttagggtttgttggaggggagcggcgggtgggggttcgagtcgcgcgcgtagcggttgtggttttcggggggtgatgagggcgcggagcggggaatttttggttgtcggtttttcgtagggcgggggggtttttgtatttttataggtaaagattgttaaaggaaaatttttaagtatcgagagatgtttcggattttgagtttgtttcgttt

SEQ ID NO: 27374 - DNA, 1014 bp, Artificial Sequence
  chemically treated genomic DNA (Homo sapiens) CpG-island No: 27374
aaacgaaacaaactcaaaatccgaaacatctctcgatacttaaaaattttcctttaacaatctttacctataaaaatacaaaaacccccccgccctacgaaaaaccgacaaccaaaaattccccgctccgcgccctcatcaccccccgaaaaccacaaccgctacgcgcgcgactcgaacccccacccgccgctcccctccaacaaaccctaaacctccgaaaaaccgcgcgacgaccgccccgcgccccgccaaatccgaaccgccgaacccgacaccccgaccacacccgccgatatcgacgcaacgaaactcgaaaaatacattctccgcgccgaccgctcccctcctccaaacccgaaaaacgaaataaacaaaacgcgccgactacgcaccgaacacccacctaaaaacgcgaaaactaaaacgacgcgaaaccacctaacgaacccgaaaacgaactccgaaaaacaaaaaacccctcccccctcactctccgaaccccgcccgaccgccgcgccccgaaacgcaaccatcccgcgaaaaaaaaaacgcaaaaaaaaaccaacgcgaaaacacttacttaaaaaactacatcgcttcattcccaacccatcctaaacgacgacgacacctccctcgtccgctactaaaacctcgatacccaccaccctcgcgcgacgatctaaccctataacccaccccttactccgccgtaaaacgaaaccgcgccacaactaacccaataaaaaaccgtcgtttcccaaaataacgtatacgcaaaacaatcataaaatccaacccaaccgaaaacgaaactcaaacgactccctacgcttcctactccaactaaccccgccccacgcccgcaactacgcgtacccaaaacgtaaaaaacgaaactaaaaaccgaactaacactaaaaataaaattaacgcttaaaaacaccgaccaacgtaaacgcaacgcgacaaaaacacctaaccccgacgacgcccaacccctcgaattac

SEQ ID NO: 27375 - DNA, 1014 bp, Artificial Sequence
  chemically treated genomic DNA (Homo sapiens) CpG-island No: 27375
agacggaatagatttagaattcggaatatttttcggtgtttaagagtttttttttaataatttttatttgtgggaatgtagagattttttcgttttgcgagaggtcggtagttagggatttttcgtttcgcgtttttattatttttcggaaattataatcgttgcgcgcgcggttcggatttttattcgtcgtttttttttagtagattttaggttttcgggaaatcgcgcggcgatcgtttcgcgtttcgttagattcgaatcgtcggattcggtatttcggttatattcgtcggtgtcgacgtagcgaggttcggagggtgtatttttcgcgtcgatcgttttttttttttagattcgaggggcggagtgggtagggcgcgtcggttgcgtatcgggtatttatttggggacgcgggggttggggcggcgcggggttatttggcggattcgggagcggatttcggagagtagggagtttttttttttttatttttcgggtttcgttcggtcgtcgcgtttcgaggcgtagttatttcgcgggaggggaggcgtaggaggaggttagcgcgaggatatttatttaaaaggttatatcgttttatttttagtttattttgggcgacggcggtatttttttcgttcgttgttgggatttcgatgtttattattttcgcgcggcgatttggttttatagtttattttttatttcgtcgtggggcggagtcgcgttatagttgatttaatgagaaatcgtcgttttttagagtgacgtgtacgtagagtaattatggagtttagtttagtcgggggcggggtttaggcggttttttacgttttttattttagttggtttcgttttacgttcgtaattgcgcgtgtttagaacgtgaggggcggggttgggagtcgggttgatattagaggtggggttagcgtttggaagtatcgattaacgtgagcgtaacgcggtagggatatttgatttcggcggcgtttagtttttcggattgt

SEQ ID NO: 27376 - DNA, 1014 bp, Artificial Sequence
  chemically treated genomic DNA (Homo sapiens) CpG-island No: 27376
acaatccgaaaaactaaacgccgccgaaatcaaatatccctaccgcgttacgctcacgttaatcgatacttccaaacgctaaccccacctctaatatcaacccgactcccaaccccgcccctcacgttctaaacacgcgcaattacgaacgtaaaacgaaaccaactaaaataaaaaacgtaaaaaaccgcctaaaccccgcccccgactaaactaaactccataattactctacgtacacgtcactctaaaaaacgacgatttctcattaaatcaactataacgcgactccgccccacgacgaaataaaaaataaactataaaaccaaatcgccgcgcgaaaataataaacatcgaaatcccaacaacgaacgaaaaaaataccgccgtcgcccaaaataaactaaaaataaaacgatataaccttttaaataaatatcctcgcgctaacctcctcctacgcctcccctcccgcgaaataactacgcctcgaaacgcgacgaccgaacgaaacccgaaaaataaaaaaaaaaaaactccctactctccgaaatccgctcccgaatccgccaaataaccccgcgccgccccaacccccgcgtccccaaataaatacccgatacgcaaccgacgcgccctacccactccgcccctcgaatctaaaaaaaaaaaacgatcgacgcgaaaaatacaccctccgaacctcgctacgtcgacaccgacgaatataaccgaaataccgaatccgacgattcgaatctaacgaaacgcgaaacgatcgccgcgcgatttcccgaaaacctaaaatctactaaaaaaaaacgacgaataaaaatccgaaccgcgcgcgcaacgattataatttccgaaaaataataaaaacgcgaaacgaaaaatccctaactaccgacctctcgcaaaacgaaaaaatctctacattcccacaaataaaaattattaaaaaaaaactcttaaacaccgaaaaatattccgaattctaaatctattccgtct

SEQ ID NO: 27377 - DNA, 783 bp, Artificial Sequence
  chemically treated genomic DNA (Homo sapiens) CpG-island No: 27377
  unsure (82, 106, 280, 302, 321, 327, 397, 428..429, 437, 499, 526)
  unsure (532, 547, 555, 595, 600, 620, 624, 629..630, 690, 731, 756..757)
  unsure (766)
ttcgttcgcgcgtcgttcgcgtcgtcggggcgcgttcgcggggggtttcggggcggggggggggggggggggggcggggggnttcggcggcgggcgtttcgtcggncgtcgcggtcgtcgcgtcgtcgttcgtcgcgcgttcgtcgtcgcgtcgggggtcgcgggcggcggcgcgggttcggcggcgtcgtcgggtttcggcgcgcgcgcggcgcgtcgcggcgcgtcgtttcgtcgcgtcgttcggcgtcgcgtcgcgcgcgtcgcgggcgtcggcgtncgtcgtcgcgcgcgcgtcgggntcgcggcggcgcgggcggnggggtncgtcgtttcggtttcgcgcgggttcgggcggttcgcgcgcgcgcggcgcggcgcgttcgcgcgcgtcgtncggcgtttcgttcgcggtttattttcgtcgnngggttttngtcggtcggttcgcgcggcggcgcgttcgcgtcgcgttcgtcgtcgtcgcgcggtcgcgcgngcgcgcggtcgcgtttcggcgtcgcgntcgggngcgggtcggtttcgncggttttncgggcgcgtcgtttcggtcgtcgtttcgtcggggcggcgngtcgngtcgcgtcgggggtcgtcgngggncgcgnntcggtcgcgcggcggcgtcggcgcgtcgcgcgtacgcggcgggtcgtcgcgcgttcgcgncggtcgatttcgtcgcggcgcggtcgttcggcgtcgttttncgcggcgcggcgcggttttcgcgtnnggtcgcggngttcgttcgcgcgttcg

SEQ ID NO: 27378 - DNA, 783 bp, Artificial Sequence
  chemically treated genomic DNA (Homo sapiens) CpG-island No: 27378
  unsure (18, 27..28, 53, 94, 154..155, 160, 164, 184, 189, 229, 237)
  unsure (252, 258, 285, 347, 355..356, 387, 457, 463, 482, 504, 678)
  unsure (702)
cgaacgcgcgaacgaacnccgcgaccnnacgcgaaaaccgcgccgcgccgcgnaaaacgacgccgaacgaccgcgccgcgacgaaatcgaccgncgcgaacgcgcgacgacccgccgcgtacgcgcgacgcgccgacgccgccgcgcgaccganncgcgncccncgacgacccccgacgcgacncgacncgccgccccgacgaaacgacgaccgaaacgacgcgcccgnaaaaccgncgaaaccgacccgcncccgancgcgacgccgaaacgcgaccgcgcgcncgcgcgaccgcgcgacgacgacgaacgcgacgcgaacgcgccgccgcgcgaaccgaccgacnaaaacccnncgacgaaaataaaccgcgaacgaaacgccgnacgacgcgcgcgaacgcgccgcgccgcgcgcgcgcgaaccgcccgaacccgcgcgaaaccgaaacgacgnaccccnccgcccgcgccgccgcgancccgacgcgcgcgcgacgacgnacgccgacgcccgcgacgcgcgcgacgcgacgccgaacgacgcgacgaaacgacgcgccgcgacgcgccgcgcgcgcgccgaaacccgacgacgccgccgaacccgcgccgccgcccgcgacccccgacgcgacgacgaacgcgcgacgaacgacgacgcgacgaccgcgacgnccgacgaaacgcccgccgccgaanccccccgccccccccccccccccccccgccccgaaaccccccgcgaacgcgccccgacgacgcgaacgacgcgcgaacgaa

SEQ ID NO: 27379 - DNA, 783 bp, Artificial Sequence
  chemically treated genomic DNA (Homo sapiens) CpG-island No: 27379
  unsure (18, 27..28, 53, 94, 154..155, 160, 164, 184, 189, 229, 237)
  unsure (252, 258, 285, 347, 355..356, 387, 457, 463, 482, 504, 678)
  unsure (702)
cgggcgcgcgggcgggtntcgcggttnngcgcgggggtcgcgtcgcgtcgcgnggggcggcgtcgggcggtcgcgtcgcggcggggtcggtcgncgcgggcgcgcggcggttcgtcgcgtgcgcgcggcgcgtcggcgtcgtcgcgcggtcggnncgcgntttncggcggttttcggcgcggtncggtncgtcgtttcggcggggcggcggtcggggcggcgcgttcgnggggtcgncggggtcggttcgtnttcggncgcggcgtcggggcgcggtcgcgcgtncgcgcggtcgcgcggcggcggcgggcgcggcgcgggcgcgtcgtcgcgcgggtcggtcggtnggggtttnncggcgggggtgggtcgcgggcggggcgtcgngcggcgcgcgcgggcgcgtcgcgtcgcgcgcgcgcgggtcgttcgggttcgcgcggggtcggggcggcgngttttntcgttcgcgtcgtcgcggnttcggcgcgcgcgcggcggcgngcgtcggcgttcgcggcgcgcgcggcgcggcgtcgggcggcgcggcggggcggcgcgtcgcggcgcgtcgcgcgcgcgtcggggttcggcggcgtcgtcgggttcgcgtcgtcgttcgcggttttcggcgcggcggcgggcgcgcggcgggcggcggcgcggcggtcgcggcgntcggcggggcgttcgtcgtcgggntttttcgtttttttttttttttttttcgtttcggggtttttcgcgggcgcgtttcggcggcgcgggcggcgcgcgggcggg

SEQ ID NO: 27380 - DNA, 783 bp, Artificial Sequence
  chemically treated genomic DNA (Homo sapiens) CpG-island No: 27380
  unsure (82, 106, 280, 302, 321, 327, 397, 428..429, 437, 499, 526)
  unsure (532, 547, 555, 595, 600, 620, 624, 629..630, 690, 731, 756..757)
  unsure (766)
cccgcccgcgcgccgcccgcgccgccgaaacgcgcccgcgaaaaaccccgaaacgaaaaaaaaaaaaaaaaaaacgaaaaancccgacgacgaacgccccgccgancgccgcgaccgccgcgccgccgcccgccgcgcgcccgccgccgcgccgaaaaccgcgaacgacgacgcgaacccgacgacgccgccgaaccccgacgcgcgcgcgacgcgccgcgacgcgccgccccgccgcgccgcccgacgccgcgccgcgcgcgccgcgaacgccgacgcncgccgccgcgcgcgcgccgaanccgcgacgacgcgaacganaaaacncgccgccccgaccccgcgcgaacccgaacgacccgcgcgcgcgcgacgcgacgcgcccgcgcgcgccgcncgacgccccgcccgcgacccacccccgccgnnaaaccccnaccgaccgacccgcgcgacgacgcgcccgcgccgcgcccgccgccgccgcgcgaccgcgcgnacgcgcgaccgcgccccgacgccgcgnccgaanacgaaccgaccccgncgaccccncgaacgcgccgccccgaccgccgccccgccgaaacgacgnaccgnaccgcgccgaaaaccgccgnaaancgcgnnccgaccgcgcgacgacgccgacgcgccgcgcgcacgcgacgaaccgccgcgcgcccgcgncgaccgaccccgccgcgacgcgaccgcccgacgccgccccncgcgacgcgacgcgacccccgcgcnnaaccgcganacccgcccgcgcgcccg

SEQ ID NO: 27381 - DNA, 878 bp, Artificial Sequence
  chemically treated genomic DNA (Homo sapiens) CpG-island No: 27381
  unsure (3..4, 10, 14..15, 45..46, 50..51, 58, 98, 105, 107..108, 123)
  unsure (181..182, 185, 208, 215, 237, 283, 303, 323, 326, 378, 391)
  unsure (431, 443, 450, 473, 485, 501, 527, 541..542, 558, 604, 610..611)
  unsure (631, 641, 647, 656, 658, 663, 665, 677, 685..686, 689, 691)
  unsure (693, 695..696, 720..721, 723, 755, 774..775, 786, 794, 831)
  unsure (833, 835, 844..845, 847, 850, 853, 856, 858, 870, 877)
cgnnngcggngcgnngcgcgggggcgcggggggcgcggggcgcgnngcgnnggggcgncggcgcggtcgtcggcgttcggcgcgcggcgggggcgcgntcgtttngnngggcgcggcgggggngcgcgcgtcgcgggggcgggcgcgttcgcgcggggggggcgttttcggcgtttcgcgnnggncgcggtcgttttttttttttcgngcgcgtnggcgcgttttcggtcgggcggncggcgcggggcgtttcgcggtcgtcgtttcgttcgtcgtcgcgcgnggttcgcgttcgcgggcggngcggcgttttttcgcggttncgncgtcggcgcgtcggggcgcgggtcgtcggcgcgtcgtcggtcgcgcgcggtngcgtcggggtcgngtttcggtcgcgcggggggcgcgcgcgcgcgcggcgtcgnttcgcgtttcgngtcgggnaggggcggggtaggggtcgggtntcggcgcgtttncgcgtttcgggcgggnggcggcggcgtcgcgtcgttcgcggngcgcgcgcgcggtnnttcgtttcgttttcgngttttcgtcggtcgcgcggggcggtcgcgcgcgtcgcgcgcgcggngcgcgnngcgcggggtcgtcggggttngtcggttttncggttngcgcggggngnggggngngcggggcggcgncgcgcgtnnngngngngnnggcgcggcgcgcggtcgcgcgcgnntncgcgcgcggcgttcgcgcggtttcgcggcgtngcgcgttcgcgtcgtcgtnngcgtttcgggncgttcgtntcgtttcggcggcgggtcggcgcgggtcgcgcggggntngntcgtcggtnngngtngtnggntnggcgacgcggtnttcggtnt

SEQ ID NO: 27382 - DNA, 878 bp, Artificial Sequence
  chemically treated genomic DNA (Homo sapiens) CpG-island No: 27382
  unsure (2, 9, 21, 23, 26, 29, 32, 34..35, 44, 46, 48, 85, 93, 104..105)
  unsure (124, 156, 158..159, 183..184, 186, 188, 190, 192..193, 202)
  unsure (214, 216, 221, 223, 232, 238, 248, 268..269, 275, 321, 337..338)
  unsure (352, 378, 394, 406, 429, 436, 448, 488, 501, 553, 556, 576)
  unsure (596, 642, 664, 671, 694, 697..698, 756, 771..772, 774, 781)
  unsure (821, 828..829, 833..834, 864..865, 869, 874..)
anaccgaanaccgcgtcgccnanccnacnacncnnaccgacgancnanccccgcgcgacccgcgccgacccgccgccgaaacganacgaacgncccgaaacgcnnacgacgacgcgaacgcgcnacgccgcgaaaccgcgcgaacgccgcgcgcgnanncgcgcgcgaccgcgcgccgcgccnncncncncnnnacgcgcgncgccgccccgcncnccccncnccccgcgcnaaccgnaaaaccgacnaaccccgacgaccccgcgcnncgcgcnccgcgcgcgcgacgcgcgcgaccgccccgcgcgaccgacgaaaacncgaaaacgaaacgaannaccgcgcgcgcgcnccgcgaacgacgcgacgccgccgccncccgcccgaaacgcgnaaacgcgccganacccgacccctaccccgcccctncccgacncgaaacgcgaancgacgccgcgcgcgcgcgcgccccccgcgcgaccgaaacncgaccccgacgcnaccgcgcgcgaccgacgacgcgccgacgacccgcgccccgacgcgccgacgncgnaaccgcgaaaaaacgccgcnccgcccgcgaacgcgaaccncgcgcgacgacgaacgaaacgacgaccgcgaaacgccccgcgccgnccgcccgaccgaaaacgcgccnacgcgcncgaaaaaaaaaaaacgaccgcgnccnncgcgaaacgccgaaaacgccccccccgcgcgaacgcgcccgcccccgcgacgcgcgcncccccgccgcgcccnncnaaacgancgcgcccccgccgcgcgccgaacgccgacgaccgcgccgncgccccnncgcnncgcgccccgcgccccccgcgcccccgcgcnncgcnccgcnnncg

SEQ ID NO: 27383 - DNA, 878 bp, Artificial Sequence
  chemically treated genomic DNA (Homo sapiens) CpG-island No: 27383
  unsure (2, 9, 21, 23, 26, 29, 32, 34..35, 44, 46, 48, 85, 93, 104..105)
  unsure (124, 156, 158..159, 183..184, 186, 188, 190, 192..193, 202)
  unsure (214, 216, 221, 223, 232, 238, 248, 268..269, 275, 321, 337..338)
  unsure (352, 378, 394, 406, 429, 436, 448, 488, 501, 553, 556, 576)
  unsure (596, 642, 664, 671, 694, 697..698, 756, 771..772, 774, 781)
  unsure (821, 828..829, 833..834, 864..865, 869, 874..)
gngtcgggngtcgcgtcgttngnttngtngtntnngtcggcggntngntttcgcgcggttcgcgtcggttcgtcgtcggggcggngcgggcgnttcggggcgtnngcggcggcgcgggcgcgtngcgtcgcggggtcgcgcgggcgtcgcgcgcgngnncgcgcgcggtcgcgcgtcgcgttnntntntntnnngcgcgcgncgtcgtttcgtntnttttntntttcgcgtnggtcgnggggtcggtnggtttcggcggtttcgcgtnncgcgtntcgcgcgcgcggcgcgcgcggtcgtttcgcgcggtcggcgggggtncgggggcggggcgggnngtcgcgcgcgcgtntcgcgggcggcgcggcgtcgtcgttnttcgttcggggcgcgngggcgcgtcggngttcggtttttgtttcgtttttnttcggtncggggcgcgggncggcgtcgcgcgcgcgcgcgtttttcgcgcggtcggggtncggtttcggcgtngtcgcgcgcggtcggcggcgcgtcggcggttcgcgtttcggcgcgtcggcgncgnggtcgcgggggggcgtcgtntcgttcgcgggcgcgggttncgcgcggcggcgggcggggcggcggtcgcggggcgtttcgcgtcgntcgttcggtcgggggcgcgttngcgcgtncgggggggggggggcggtcgcgnttnncgcggggcgtcgggggcgtttttttcgcgcgggcgcgttcgttttcgcggcgcgcgtnttttcgtcgcgtttnntngggcggncgcgttttcgtcgcgcgtcgggcgtcggcggtcgcgtcgncgttttnncgtnncgcgtttcgcgtttttcgcgttttcgcgtnncgtntcgtnnncg

SEQ ID NO: 27384 - DNA, 878 bp, Artificial Sequence
  chemically treated genomic DNA (Homo sapiens) CpG-island No: 27384
  unsure (3..4, 10, 14..15, 45..46, 50..51, 58, 98, 105, 107..108, 123)
  unsure (181..182, 185, 208, 215, 237, 283, 303, 323, 326, 378, 391)
  unsure (431, 443, 450, 473, 485, 501, 527, 541..542, 558, 604, 610..611)
  unsure (631, 641, 647, 656, 658, 663, 665, 677, 685..686, 689, 691)
  unsure (693, 695..696, 720..721, 723, 755, 774..775, 786, 794, 831)
  unsure (833, 835, 844..845, 847, 850, 853, 856, 858, 870, 877)
cgnnnacganacgnnacgcgaaaacgcgaaaaacgcgaaacgcgnnacgnnaaaacgncgacgcgaccgccgacgcccgacgcgcgacgaaaacgcgnccgcccnannaaacgcgacgaaaanacgcgcgccgcgaaaacgaacgcgcccgcgcgaaaaaaacgcccccgacgccccgcgnnaancgcgaccgcccccccccccccgnacgcgcnaacgcgcccccgaccgaacgancgacgcgaaacgccccgcgaccgccgccccgcccgccgccgcgcgnaacccgcgcccgcgaacganacgacgcccccccgcgaccncgncgccgacgcgccgaaacgcgaaccgccgacgcgccgccgaccgcgcgcgacnacgccgaaaccgnaccccgaccgcgcgaaaaacgcgcgcgcgcgcgacgccgncccgcgccccgnaccgaanaaaaacgaaacaaaaaccgaacnccgacgcgcccncgcgccccgaacgaanaacgacgacgccgcgccgcccgcganacgcgcgcgcgacnncccgccccgcccccgnacccccgccgaccgcgcgaaacgaccgcgcgcgccgcgcgcgcganacgcgnnacgcgaaaccgccgaaaccnaccgaccccncgaccnacgcgaaananaaaananacgaaacgacgncgcgcgcnnnanananannaacgcgacgcgcgaccgcgcgcgnncncgcgcgcgacgcccgcgcgaccccgcgacgcnacgcgcccgcgccgccgcnnacgccccgaancgcccgcnccgccccgacgacgaaccgacgcgaaccgcgcgaaancnanccgccgacnnanacnacnaancnaacgacgcgacncccgacnc

SEQ ID NO: 27385 - DNA, 665 bp, Artificial Sequence
  chemically treated genomic DNA (Homo sapiens) CpG-island No: 27385
  unsure (39, 45, 54, 194, 200, 228, 283, 377, 402, 476, 486, 509, 558)
  unsure (561, 590, 592..593, 605, 635)
gtttttttcgtcgcgcgtttcgcgcggggcggcgggcgngcgttngcgcggttnttcgtttcgttcgcgttttcgtttcgcgtcgtttttttcgcgcggcggttttttcgtttcgcgttcgcgtttcgtcgtttttttcgcgggggggtggttcgtttcgcgtagcgttttttttttttttcgtttttttgttnggggtnggcgcgttttttttttttttcgtcgggngggggttcgtttttttttttcggtcgcgcggggtttttcgtttcgttttttcgtncggggcgtttttcgttttttcgtcgcgcgggggggttcgtttttttttttttcgcggcgtcgcgtcgttttttcgcgttcgtcgtggggcgcgngggtttcgcgtcgtcgtcgcggcgngtttttcgcgttcggtcgtcgcgtcggtcggtcgcgcggcgttttcgcgtttcgttcgcgcgcgcgcggcgcgncgcgttcgtntcgtcgtttttcgcgtcggcggngcgcgcgttcgttcggtcgcgttcgcgcgtttcgcgtcggcgtcgtttngtngcgttcgttttcgcgcgcgcggcgcgttntnngcgtcggggttnttgcggcgttttcgcgttttttcgcgcggngtcgtcggcgtttcgtcgtcgttcgtattt

SEQ ID NO: 27386 - DNA, 665 bp, Artificial Sequence
  chemically treated genomic DNA (Homo sapiens) CpG-island No: 27386
  unsure (31, 61, 73..74, 76, 105, 108, 157, 180, 190, 264, 289, 383)
  unsure (438, 466, 472, 612, 621, 627)
aaatacgaacgacgacgaaacgccgacgacnccgcgcgaaaaaacgcgaaaacgccgcaanaaccccgacgcnnanaacgcgccgcgcgcgcgaaaacgaacgcnacnaaacgacgccgacgcgaaacgcgcgaacgcgaccgaacgaacgcgcgcnccgccgacgcgaaaaacgacganacgaacgcgncgcgccgcgcgcgcgcgaacgaaacgcgaaaacgccgcgcgaccgaccgacgcgacgaccgaacgcgaaaaacncgccgcgacgacgacgcgaaacccncgcgccccacgacgaacgcgaaaaaacgacgcgacgccgcgaaaaaaaaaaaaacgaacccccccgcgcgacgaaaaaacgaaaaacgccccgnacgaaaaaacgaaacgaaaaaccccgcgcgaccgaaaaaaaaaaacgaacccccncccgacgaaaaaaaaaaaaaacgcgccnaccccnaacaaaaaaacgaaaaaaaaaaaaaacgctacgcgaaacgaaccacccccccgcgaaaaaaacgacgaaacgcgaacgcgaaacgaaaaaaccgccgcgcgaaaaaaacgacgcgaaacgaaaacgcgaacgaaacgaanaaccgcgcnaacgcncgcccgccgccccgcgcgaaacgcgcgacgaaaaaaac

SEQ ID NO: 27387 - DNA, 665 bp, Artificial Sequence
  chemically treated genomic DNA (Homo sapiens) CpG-island No: 27387
  unsure (31, 61, 73..74, 76, 105, 108, 157, 180, 190, 264, 289, 383)
  unsure (438, 466, 472, 612, 621, 627)
gggtgcgggcggcggcggggcgtcggcggtntcgcgcggggggacgcgggggcgtcgtagnggtttcggcgtnngnggcgcgtcgcgcgcgcgggggcgagcgtngtngggcggcgtcggcgcggggcgcgcgggcgcggtcgggcgggcgcgcgtntcgtcggcgcggggggcggcggngcgggcgcgncgcgtcgcgcgcgcgcgggcggggcgcgggggcgtcgcgcggtcggtcggcgcggcggtcgggcgcggggggtncgtcgcggcggcggcgcggggtttncgcgttttacggcgggcgcgggggggcggcgcggcgtcgcggggggggggggggcgggttttttcgcgcggcgggggggcggggggcgtttcgngcgggggggcggggcggggggtttcgcgcggtcggggggggagggcgggtttttnttcggcgggaggagaggggggcgcgttngttttnaataagagggcggggggggggggaggcgttacgcggagcgggttattttttcgcggaggagacggcggggcgcgggcgcggggcgggggggtcgtcgcgcggggggggcggcgcggggcgggggcgcgggcggggcgggnggtcgcgtnggcgtncgttcgtcgtttcgcgcggggcgcgcggcggggggggt

SEQ ID NO: 27388 - DNA, 665 bp, Artificial Sequence
  chemically treated genomic DNA (Homo sapiens) CpG-island No: 27388
  unsure (39, 45, 54, 194, 200, 228, 283, 377, 402, 476, 486, 509, 558)
  unsure (561, 590, 592..593, 605, 635)
accccccccgccgcgcgccccgcgcgaaacgacgaacgnacgccnacgcgaccncccgccccgcccgcgcccccgccccgcgccgccccccccgcgcgacgacccccccgccccgcgcccgcgccccgccgtctcctccgcgaaaaaataacccgctccgcgtaacgcctccccccccccccgccctcttattnaaaacnaacgcgcccccctctcctcccgccgaanaaaaacccgccctccccccccgaccgcgcgaaaccccccgccccgcccccccgcncgaaacgccccccgcccccccgccgcgcgaaaaaacccgccccccccccccccgcgacgccgcgccgcccccccgcgcccgccgtaaaacgcgnaaaccccgcgccgccgccgcgacgnaccccccgcgcccgaccgccgcgccgaccgaccgcgcgacgcccccgcgccccgcccgcgcgcgcgcgacgcgncgcgcccgcnccgccgccccccgcgccgacganacgcgcgcccgcccgaccgcgcccgcgcgccccgcgccgacgccgcccnacnacgctcgcccccgcgcgcgcgacgcgccncnnacgccgaaaccnctacgacgcccccgcgtccccccgcgcganaccgccgacgccccgccgccgcccgcaccc

SEQ ID NO: 27389 - DNA, 754 bp, Artificial Sequence
  chemically treated genomic DNA (Homo sapiens) CpG-island No: 27389
  unsure (70, 77, 288, 369, 378, 396..397, 465, 522, 556..557, 561)
  unsure (566, 623, 625, 627, 642, 651, 655, 673, 720, 724, 731, 733)
  unsure (749)
gtcgttttcggtcgcggggggcggggggggtcgtcgttttcggtcgcgtttttcgcgcgcggttcgcgtngcgcggnggcgggggcgcgcgttcgttcggtttcgcggttttcgttttcgcggcgcggttcgttttttcgttttcgcgtttcgtttttcgtttcgcgcgcgcggtttttcgcgttttttttcgcgtcgtcgcgttcgttttttcgcgcgcgttcgttcgttcgcggtttcgcgtttttcgcgtttcggcgtcgcgtttcgttttcgtcgttttcgggncgcgcgcgttcgcgtcgtcgcggtcgtcgttcgcgcgtcgcgcggttcgtcgcggtcgtcgcggttcgcgcggttcgtttngtttcgttntttcgttttttcggcggnncgcgcgcgttcggcgcgtttcgtttcgcgtcgtcggggcgttcgcgttcgcgcggcgtcgtttcgttngtcgggcgttttttcgcggttttcgtcgtttcgtcgtcgtttcgcgcgtcgggtcgncgcgttcgggttcgcgcggcgggcgcgcgtcggnngcgngggtngtcgttcgtcgtcggtcgtcgcgtcgacgtcgcgtcgcgcgttcggttcgcggtttngngngcggcgttcgttcgncggcgtttncgtnttggggttttcgcgtttngcgcgtcgcgttttcgcgtttcgtcgtttttcgttttcgtttcgcgncgtngcgcggntnggcgggcgttcggttngtttt

SEQ ID NO: 27390 - DNA, 754 bp, Artificial Sequence
  chemically treated genomic DNA (Homo sapiens) CpG-island No: 27390
  unsure (6, 22, 24, 31, 35, 82, 100, 104, 113, 128, 130, 132, 189)
  unsure (194, 198..199, 233, 290, 358..359, 377, 386, 467, 678, 685)
aaaacnaaccgaacgcccgccnanccgcgcnacgncgcgaaacgaaaacgaaaaacgacgaaacgcgaaaacgcgacgcgcnaaacgcgaaaaccccaanacgnaaacgccgncgaacgaacgccgcncncnaaaccgcgaaccgaacgcgcgacgcgacgtcgacgcgacgaccgacgacgaacgacnacccncgcnnccgacgcgcgcccgccgcgcgaacccgaacgcgncgacccgacgcgcgaaacgacgacgaaacgacgaaaaccgcgaaaaaacgcccgacnaacgaaacgacgccgcgcgaacgcgaacgccccgacgacgcgaaacgaaacgcgccgaacgcgcgcgnnccgccgaaaaaacgaaanaacgaaacnaaacgaaccgcgcgaaccgcgacgaccgcgacgaaccgcgcgacgcgcgaacgacgaccgcgacgacgcgaacgcgcgcgncccgaaaacgacgaaaacgaaacgcgacgccgaaacgcgaaaaacgcgaaaccgcgaacgaacgaacgcgcgcgaaaaaacgaacgcgacgacgcgaaaaaaaacgcgaaaaaccgcgcgcgcgaaacgaaaaacgaaacgcgaaaacgaaaaaacgaaccgcgccgcgaaaacgaaaaccgcgaaaccgaacgaacgcgcgcccccgccnccgcgcnacgcgaaccgcgcgcgaaaaacgcgaccgaaaacgacgaccccccccgccccccgcgaccgaaaacgac

SEQ ID NO: 27391 - DNA, 754 bp, Artificial Sequence
  chemically treated genomic DNA (Homo sapiens) CpG-island No: 27391
  unsure (6, 22, 24, 31, 35, 82, 100, 104, 113, 128, 130, 132, 189)
  unsure (194, 198..199, 233, 290, 358..359, 377, 386, 467, 678, 685)
ggggtnggtcgggcgttcgttngntcgcgtngcgncgcgggacgggggcgaggggcggcggggcgcgggggcgcggcgcgtngggcgcgggggttttagngcgngggcgtcgncgagcgggcgtcgtntntngggtcgcgggtcgggcgcgcggcgcggcgtcggcgcggcggtcggcggcgggcggtngtttncgtnntcggcgcgcgttcgtcgcgcgggttcgagcgcgncggttcggcgcgcggggcggcggcggagcggcgagggtcgcggaggggcgttcggtnggcggggcggcgtcgcgcgggcgcgggcgtttcggcggcgcggggcggggcgcgtcgggcgcgcgcgnntcgtcgggggggcggggnggcggggtngggcgagtcgcgcgggtcgcggcggtcgcggcgggtcgcgcggcgcgcgggcggcggtcgcggcggcgcgggcgcgcgcgnttcgggggcggcgggggcggggcgcggcgtcgaggcgcggggggcgcggggtcgcgggcgggcgggcgcgcgcgggggggcgggcgcggcggcgcgggggggggcgcggggggtcgcgcgcgcggggcggggggcggggcgcgggggcgggggggcgggtcgcgtcgcgggggcgggggtcgcggggtcgggcgggcgcgcgttttcgttntcgcgtngcgcgggtcgcgcgcggggggcgcggtcgggggcggcggtttttttcgtttttcgcggtcgggggcggt

SEQ ID NO: 27392 - DNA, 754 bp, Artificial Sequence
  chemically treated genomic DNA (Homo sapiens) CpG-island No: 27392
  unsure (70, 77, 288, 369, 378, 396..397, 465, 522, 556..557, 561)
  unsure (566, 623, 625, 627, 642, 651, 655, 673, 720, 724, 731, 733)
  unsure (749)
accgcccccgaccgcgaaaaacgaaaaaaaccgccgcccccgaccgcgccccccgcgcgcgacccgcgcnacgcganaacgaaaacgcgcgcccgcccgaccccgcgacccccgcccccgcgacgcgacccgcccccccgcccccgcgccccgccccccgccccgcgcgcgcgaccccccgcgcccccccccgcgccgccgcgcccgcccccccgcgcgcgcccgcccgcccgcgaccccgcgccccccgcgcctcgacgccgcgccccgcccccgccgcccccgaancgcgcgcgcccgcgccgccgcgaccgccgcccgcgcgccgcgcgacccgccgcgaccgccgcgacccgcgcgactcgcccnaccccgccnccccgcccccccgacganncgcgcgcgcccgacgcgccccgccccgcgccgccgaaacgcccgcgcccgcgcgacgccgccccgccnaccgaacgcccctccgcgaccctcgccgctccgccgccgccccgcgcgccgaaccgncgcgctcgaacccgcgcgacgaacgcgcgccgannacgnaaacnaccgcccgccgccgaccgccgcgccgacgccgcgccgcgcgcccgacccgcgacccnananacgacgcccgctcgncgacgcccncgcnctaaaacccccgcgcccnacgcgccgcgcccccgcgccccgccgcccctcgcccccgtcccgcgncgcnacgcgancnaacgaacgcccgaccnacccc

SEQ ID NO: 27393 - DNA, 691 bp, Artificial Sequence
  chemically treated genomic DNA (Homo sapiens) CpG-island No: 27393
  unsure (62, 65, 91, 145, 323, 376, 378, 381, 388, 397..398, 408, 444)
  unsure (463, 513, 515, 521, 557, 562, 583, 587, 603, 605, 608..609)
  unsure (635, 640, 672, 676)
gcgggcgcggcgggggttcggtcgttcgttcggcgtcggcggcgcggcggcgcgcggcgggnggntttcggcgcgggggcgtcggcgcgtncggtcgcgtcggttcggcgtcggtcgtcgcgcggtcgcgggcgcggggttcgtngcggggcgggcggttcggggggcggggcgttttcgcgtttcgttcgtcggtcgcgcggcgcgcgggcgggcggggtcgcgcgcgtcgcggcgcgtcgcgcgtcgcgtcggcgtcgcgcgcgcgcgcggcgcggcgttcgcggcgggcgcgcgggggcgcggtcgcgcgtcggtcggtntcgtcgcgcgggcggggcgcgggtcggtcgcggcgcgcgggcgcgtttcgggngnggngcgcgtncggcggggnnnggcgcggtnggcggtcgcgtcgcgcggcggttcgcggtttcggtngcgcgggcgtcgcggggtntttcggggcggcggcgcgcggcggcggtcgcgcgtcggatcgtcgcgttngnggcgtncggggcggcggcgtcgcggggcggcgcgcggttcgncgcgngggtcggggtcgcgttcgcgncgtncgcggggcggcgtttngncgnntttcgcgcgcggcgtcgacgcgcgtntcgtnggcgtcggttcgcgcgggcggggcggcgcggntcgncgcgcgcgcgggcgt

SEQ ID NO: 27394 - DNA, 691 bp, Artificial Sequence
  chemically treated genomic DNA (Homo sapiens) CpG-island No: 27394
  unsure (16, 20, 52, 57, 83..84, 87, 89, 105, 109, 130, 135, 171, 177)
  unsure (179, 229, 248, 284, 293..294, 304, 311, 314, 316, 369, 547)
  unsure (601, 627, 630)
acgcccgcgcgcgcgncganccgcgccgccccgcccgcgcgaaccgacgccnacganacgcgcgtcgacgccgcgcgcgaaanncgncnaaacgccgccccgcgnacgncgcgaacgcgaccccgacccncgcgncgaaccgcgcgccgccccgcgacgccgccgccccgnacgccncnaacgcgacgatccgacgcgcgaccgccgccgcgcgccgccgccccgaaanaccccgcgacgcccgcgcnaccgaaaccgcgaaccgccgcgcgacgcgaccgccnaccgcgccnnnccccgccgnacgcgcnccncncccgaaacgcgcccgcgcgccgcgaccgacccgcgccccgcccgcgcgacganaccgaccgacgcgcgaccgcgcccccgcgcgcccgccgcgaacgccgcgccgcgcgcgcgcgcgacgccgacgcgacgcgcgacgcgccgcgacgcgcgcgaccccgcccgcccgcgcgccgcgcgaccgacgaacgaaacgcgaaaacgccccgccccccgaaccgcccgccccgcnacgaaccccgcgcccgcgaccgcgcgacgaccgacgccgaaccgacgcgaccgnacgcgccgacgcccccgcgccgaaanccncccgccgcgcgccgccgcgccgccgacgccgaacgaacgaccgaacccccgccgcgcccgc

SEQ ID NO: 27395 - DNA, 691 bp, Artificial Sequence
  chemically treated genomic DNA (Homo sapiens) CpG-island No: 27395
  unsure (16, 20, 52, 57, 83..84, 87, 89, 105, 109, 130, 135, 171, 177)
  unsure (179, 229, 248, 284, 293..294, 304, 311, 314, 316, 369, 547)
  unsure (601, 627, 630)
gcgttcgcgcgcgcgncggntcgcgtcgtttcgttcgcgcgggtcggcgttngcggngcgcgcgtcggcgtcgcgcgcggggnncgntngggcgtcgtttcgcgngcgncgcgggcgcggtttcggtttncgcgncgggtcgcgcgtcgtttcgcggcgtcgtcgtttcgngcgttntnggcgcggcggttcggcgcgcggtcgtcgtcgcgcgtcgtcgtttcggggngtttcgcggcgttcgcgtngtcggggtcgcgggtcgtcgcgcggcgcggtcgttngtcgcgttnnntttcgtcgngcgcgtnttntnttcggggcgcgttcgcgcgtcgcggtcggttcgcgtttcgttcgcgcggcggngtcggtcggcgcgcggtcgcgttttcgcgcgttcgtcgcgggcgtcgcgtcgcgcgcgcgcgcggcgtcggcgcggcgcgcggcgcgtcgcggcgcgcgcggtttcgttcgttcgcgcgtcgcgcggtcggcgggcggggcgcgggggcgtttcgtttttcgggtcgttcgtttcgtngcgggtttcgcgttcgcggtcgcgcggcggtcggcgtcgggtcggcgcggtcgngcgcgtcggcgttttcgcgtcggggnttnttcgtcgcgcgtcgtcgcgtcgtcggcgtcgggcgggcggtcgggttttcgtcgcgttcgt

SEQ ID NO: 27396 - DNA, 691 bp, Artificial Sequence
  chemically treated genomic DNA (Homo sapiens) CpG-island No: 27396
  unsure (62, 65, 91, 145, 323, 376, 378, 381, 388, 397..398, 408, 444)
  unsure (463, 513, 515, 521, 557, 562, 583, 587, 603, 605, 608..609)
  unsure (635, 640, 672, 676)
acgaacgcgacgaaaacccgaccgcccgcccgacgccgacgacgcgacgacgcgcgacgaanaanccccgacgcgaaaacgccgacgcgcncgaccgcgccgacccgacgccgaccgccgcgcgaccgcgaacgcgaaacccgcnacgaaacgaacgacccgaaaaacgaaacgcccccgcgccccgcccgccgaccgcgcgacgcgcgaacgaacgaaaccgcgcgcgccgcgacgcgccgcgcgccgcgccgacgccgcgcgcgcgcgcgacgcgacgcccgcgacgaacgcgcgaaaacgcgaccgcgcgccgaccgacnccgccgcgcgaacgaaacgcgaaccgaccgcgacgcgcgaacgcgccccgaananaanacgcgcncgacgaaannnaacgcgacnaacgaccgcgccgcgcgacgacccgcgaccccgacnacgcgaacgccgcgaaacnccccgaaacgacgacgcgcgacgacgaccgcgcgccgaaccgccgcgccnanaacgcncgaaacgacgacgccgcgaaacgacgcgcgacccgncgcgnaaaccgaaaccgcgcccgcgncgcncgcgaaacgacgcccnancgnnccccgcgcgcgacgccgacgcgcgcnccgcnaacgccgacccgcgcgaacgaaacgacgcganccgncgcgcgcgcgaacgc

SEQ ID NO: 27397 - DNA, 761 bp, Artificial Sequence
  chemically treated genomic DNA (Homo sapiens) CpG-island No: 27397
  unsure (38, 40, 78, 121, 127, 133, 182, 213, 266, 333, 343, 360, 362)
  unsure (374, 389, 434..435, 437, 457, 492, 496, 505, 512, 521, 523)
  unsure (527, 530, 566, 585, 592, 605, 618, 692, 706, 710, 714..715)
  unsure (740..741, 747, 759)
gcggtcggggcgcggggggggggggggggcggtcgcgntngcgcgcgcggcgcgcgcgggggcggggggcggtcgcgngcggggggggcgtcgcggcggtcggcggcggcgggggcggggncggttncgtcgntcggcgcggcggtcgcgcgcgcgtcgtcgggcgggtcggcgcgggggtnggcgcgggggcgcgttcgggcggttcggttncgcggttcggggggggcgggcgcgcgcgcggggcgggggggcgcggggtcgtngcggcgcgcggtcggtcgcgggggggggggggcggggcgtcggggtcgggcggcgcgtttcgggggngggcgcgggngcggcgggggcggcggngngggggggggggncgggtcgcggtcgtngcgcgggagggagaaaagagggaaacggaatagaagagatcgcgnnnncggcgggggggcgggcggtngcgcggcgcggcggggcgcgcgcgtttcgcgggtnggtncgcgggggnggggggnggcggggtngnggtncgntttcgcggcggtttcggcgcgcggtcgtcgggcgtngcggttcggggcggggcgncggcggncgggcgggcgggngggggcggcgggnggggcggtcgcgggcgtcgcgggcgtcgcgcgcgcgtcgcgatacggcggcggacgtcggcgtcggtcggcgtngcgtcgggcgggancggncggnnggggcgcggtcggggcggcgcgcgnngggcgncggcgcgcgcgngg

SEQ ID NO: 27398 - DNA, 761 bp, Artificial Sequence
  chemically treated genomic DNA (Homo sapiens) CpG-island No: 27398
  unsure (3, 15, 21..22, 47..48, 52, 56, 70, 144, 157, 170, 177, 196)
  unsure (232, 235, 239, 241, 250, 257, 266, 270, 305, 325..326, 328)
  unsure (373, 388, 400, 402, 419, 429, 496, 549, 580, 629, 635, 641)
  unsure (684, 722, 724)
ccncgcgcgcgccgncgcccnncgcgcgccgccccgaccgcgccccnnccgnccgntcccgcccgacgcnacgccgaccgacgccgacgtccgccgccgtatcgcgacgcgcgcgcgacgcccgcgacgcccgcgaccgccccncccgccgcccccncccgcccgcccgnccgccgncgccccgccccgaaccgcnacgcccgacgaccgcgcgccgaaaccgccgcgaaancgnaccncnaccccgccnccccccncccccgcgnaccnacccgcgaaacgcgcgcgccccgccgcgccgcgcnaccgcccgcccccccgccgnnnncgcgatctcttctattccgtttccctcttttctccctcccgcgcnacgaccgcgacccgncccccccccccncnccgccgcccccgccgcncccgcgcccncccccgaaacgcgccgcccgaccccgacgccccgcccccccccccccgcgaccgaccgcgcgccgcnacgaccccgcgcccccccgccccgcgcgcgcgcccgccccccccgaaccgcgnaaccgaaccgcccgaacgcgcccccgcgccnacccccgcgccgacccgcccgacgacgcgcgcgcgaccgccgcgccgancgacgnaaccgnccccgcccccgccgccgccgaccgccgcgacgccccccccgcncgcgaccgccccccgcccccgcgcgcgccgcgcgcgcnancgcgaccgccccccccccccccccgcgccccgaccgc

SEQ ID NO: 27399 - DNA, 761 bp, Artificial Sequence
  chemically treated genomic DNA (Homo sapiens) CpG-island No: 27399
  unsure (3, 15, 21..22, 47..48, 52, 56, 70, 144, 157, 170, 177, 196)
  unsure (232, 235, 239, 241, 250, 257, 266, 270, 305, 325..326, 328)
  unsure (373, 388, 400, 402, 419, 429, 496, 549, 580, 629, 635, 641)
  unsure (684, 722, 724)
ttncgcgcgcgtcgncgtttnncgcgcgtcgtttcggtcgcgttttnntcgntcgntttcgttcggcgtngcgtcggtcggcgtcggcgttcgtcgtcgtgtcgcggcgcgcgcgcggcgttcgcggcgttcgcggtcgttttnttcgtcgtttttnttcgttcgttcgntcgtcgncgtttcgtttcgggtcgtngcgttcggcggtcgcgcgtcggggtcgtcgcggggncgngttntngtttcgttnttttttnttttcgcgngttngttcgcggggcgcgcgcgtttcgtcgcgtcgcgtngtcgttcgttttttcgtcgnnnncgcggttttttttgtttcgttttttttttttttttttttcgcgtngcggtcgcggttcgntttttttttttntntcgtcgttttcgtcgtnttcgcgtttnttttcggggcgcgtcgttcggtttcggcgtttcgttttttttttttcgcggtcggtcgcgcgtcgtngcggtttcgcgttttttcgtttcgcgcgcgcgttcgtttttttcgggtcgcgnggtcgggtcgttcgggcgcgttttcgcgttngttttcgcgtcggttcgttcggcggcgcgcgcgcggtcgtcgcgtcggncggcgnggtcgntttcgttttcgtcgtcgtcggtcgtcgcggcgtttttttcgtncgcggtcgtttttcgttttcgcgcgcgtcgcgcgcgtngncgcggtcgtttttttttttttttcgcgtttcggtcgt

SEQ ID NO: 27400 - DNA, 761 bp, Artificial Sequence
  chemically treated genomic DNA (Homo sapiens) CpG-island No: 27400
  unsure (38, 40, 78, 121, 127, 133, 182, 213, 266, 333, 343, 360, 362)
  unsure (374, 389, 434..435, 437, 457, 492, 496, 505, 512, 521, 523)
  unsure (527, 530, 566, 585, 592, 605, 618, 692, 706, 710, 714..715)
  unsure (740..741, 747, 759)
acgaccgaaacgcgaaaaaaaaaaaaaaacgaccgcgncnacgcgcgcgacgcgcgcgaaaacgaaaaacgaccgcgnacgaaaaaaacgccgcgacgaccgacgacgacgaaaacgaaancgaccncgccgnccgacgcgacgaccgcgcgcgcgccgccgaacgaaccgacgcgaaaacnaacgcgaaaacgcgcccgaacgacccgaccncgcgacccgaaaaaaacgaacgcgcgcgcgaaacgaaaaaacgcgaaaccgcnacgacgcgcgaccgaccgcgaaaaaaaaaaaacgaaacgccgaaaccgaacgacgcgccccgaaaanaaacgcgaanacgacgaaaacgacgananaaaaaaaaaaancgaaccgcgaccgcnacgcgaaaaaaaaaaaaaaaaaaaacgaaacaaaaaaaaccgcgnnnncgacgaaaaaacgaacgacnacgcgacgcgacgaaacgcgcgcgccccgcgaacnaacncgcgaaaanaaaaaanaacgaaacnanaacncgnccccgcgacgaccccgacgcgcgaccgccgaacgcnacgacccgaaacgaaacgncgacgancgaacgaacgaanaaaaacgacgaanaaaacgaccgcgaacgccgcgaacgccgcgcgcgcgccgcgacacgacgacgaacgccgacgccgaccgacgcnacgccgaacgaaancgancgannaaaacgcgaccgaaacgacgcgcgnnaaacgncgacgcgcgcgnaa

SEQ ID NO: 27401 - DNA, 691 bp, Artificial Sequence
  chemically treated genomic DNA (Homo sapiens) CpG-island No: 27401
  unsure (44, 90, 145..146, 341, 368, 393, 428, 538, 578, 653, 667)
gggacgcgggggcggcgtcggggcgggggggggggggcgggggnggcgggcggggcggtcggggggggggggggcgcgggggggcgcgtngttcggcgcgcgcgcggcggtcgcgcgggcgggggcggggtcggggttcgtcgtnnggttcgcgtttcgcgcgcggcgggggggggtcgttcgcgggggggcgggcggcggggcggcggcggttcgcgcggcggtcgcgcgggcgggcgggggggcggtcgcggtcggttcggcgtcggcggcgcggggggcgtcgcgggcgggcgttcggcggggcgggcggggggggcggcgcgcgcggttcgtcggtngggggcgcggcgtcgggaggcggcgtnggggtcgcgttcgcgcggggggggngcgcgcgggtcgcgggcgggggcgcgggcggcgtncgttcggttcgcgtcggtcggggttcgcgcgggcgcggcgcggggcgcgcgcggcgcggtcgcgcgcggcggcggcgggcgcgcggcggcgcggggcgcgggcggcgcgncggcggcggtcgggtcgtcgtcgtcgtcgcgcgggcgcgngcggcgcgcggggcgggcgcggggcgcgcggcgcggcgggcgcggcgggcgcgcgcgcggcgcgggtttcggttngggcggcgggcggncgcgcggcgtcgcgcgggggcggg

SEQ ID NO: 27402 - DNA, 691 bp, Artificial Sequence
  chemically treated genomic DNA (Homo sapiens) CpG-island No: 27402
  unsure (25, 39, 114, 154, 264, 299, 324, 351, 546..547, 602, 648)
cccgcccccgcgcgacgccgcgcgnccgcccgccgcccnaaccgaaacccgcgccgcgcgcgcgcccgccgcgcccgccgcgccgcgcgccccgcgcccgccccgcgcgccgcncgcgcccgcgcgacgacgacgacgacccgaccgccgccgncgcgccgcccgcgccccgcgccgccgcgcgcccgccgccgccgcgcgcgaccgcgccgcgcgcgccccgcgccgcgcccgcgcgaaccccgaccgacgcgaaccgaacgnacgccgcccgcgcccccgcccgcgacccgcgcgcnccccccccgcgcgaacgcgaccccnacgccgcctcccgacgccgcgcccccnaccgacgaaccgcgcgcgccgccccccccgcccgccccgccgaacgcccgcccgcgacgccccccgcgccgccgacgccgaaccgaccgcgaccgcccccccgcccgcccgcgcgaccgccgcgcgaaccgccgccgccccgccgcccgcccccccgcgaacgacccccccccgccgcgcgcgaaacgcgaaccnnacgacgaaccccgaccccgcccccgcccgcgcgaccgccgcgcgcgcgccgaacnacgcgcccccccgcgccccccccccccccgaccgccccgcccgccncccccgcccccccccccccgccccgacgccgcccccgcgtccc

SEQ ID NO: 27403 - DNA, 691 bp, Artificial Sequence
  chemically treated genomic DNA (Homo sapiens) CpG-island No: 27403
  unsure (25, 39, 114, 154, 264, 299, 324, 351, 546..547, 602, 648)
ttcgttttcgcgcggcgtcgcgcgntcgttcgtcgtttnggtcggggttcgcgtcgcgcgcgcgttcgtcgcgttcgtcgcgtcgcgcgtttcgcgttcgtttcgcgcgtcgtncgcgttcgcgcggcggcggcggcggttcggtcgtcgtcgncgcgtcgttcgcgtttcgcgtcgtcgcgcgttcgtcgtcgtcgcgcgcggtcgcgtcgcgcgcgtttcgcgtcgcgttcgcgcgggtttcggtcggcgcgggtcgggcgngcgtcgttcgcgttttcgttcgcggttcgcgcgtntttttttcgcgcgggcgcggttttngcgtcgtttttcggcgtcgcgtttttngtcggcgggtcgcgcgcgtcgtttttttcgttcgtttcgtcgggcgttcgttcgcggcgtttttcgcgtcgtcggcgtcgggtcggtcgcggtcgttttttcgttcgttcgcgcggtcgtcgcgcgggtcgtcgtcgtttcgtcgttcgttttttcgcgggcggttttttttcgtcgcgcgcggggcgcgggttnngcggcgggtttcggtttcgttttcgttcgcgcggtcgtcgcgcgcgcgtcgggtngcgcgttttttcgcgtttttttttttttcggtcgtttcgttcgttnttttcgttttttttttttcgtttcggcgtcgttttcgcgtttt

SEQ ID NO: 27404 - DNA, 691 bp, Artificial Sequence
  chemically treated genomic DNA (Homo sapiens) CpG-island No: 27404
  unsure (44, 90, 145..146, 341, 368, 393, 428, 538, 578, 653, 667)
aaaacgcgaaaacgacgccgaaacgaaaaaaaaaaaacgaaaanaacgaacgaaacgaccgaaaaaaaaaaaaacgcgaaaaaacgcgcnacccgacgcgcgcgcgacgaccgcgcgaacgaaaacgaaaccgaaacccgccgcnnaacccgcgccccgcgcgcgacgaaaaaaaaccgcccgcgaaaaaacgaacgacgaaacgacgacgacccgcgcgacgaccgcgcgaacgaacgaaaaaacgaccgcgaccgacccgacgccgacgacgcgaaaaacgccgcgaacgaacgcccgacgaaacgaacgaaaaaaacgacgcgcgcgacccgccgacnaaaaacgcgacgccgaaaaacgacgcnaaaaccgcgcccgcgcgaaaaaaanacgcgcgaaccgcgaacgaaaacgcgaacgacgcncgcccgacccgcgccgaccgaaacccgcgcgaacgcgacgcgaaacgcgcgcgacgcgaccgcgcgcgacgacgacgaacgcgcgacgacgcgaaacgcgaacgacgcgncgacgacgaccgaaccgccgccgccgccgcgcgaacgcgnacgacgcgcgaaacgaacgcgaaacgcgcgacgcgacgaacgcgacgaacgcgcgcgcgacgcgaaccccgaccnaaacgacgaacgancgcgcgacgccgcgcgaaaacgaa

SEQ ID NO: 27405 - DNA, 706 bp, Artificial Sequence
  chemically treated genomic DNA (Homo sapiens) CpG-island No: 27405
  unsure (52, 348, 384, 400, 435, 452, 573, 645, 687)
tcgtcgcggggggggaggggtaagatttcgcgggggtagcgagggtagtaanacgatagtagtagagtcggtatcgggcgaggacgagaggagcgagagtacgacgcgcgtcgtaaggagtagcgcgacgacgcggtcggtaggattacgcggtaggatagattcgtacgcggacgcgcgtagagcgcgtttcgacggtaaaaaggagcgagcgagcgaggataggagatacggcggagtcgtcgtcgcgaggatcgcgagagacgcgagtagtagcgatatacgtaatcgtattaattagaggaggtaagtttaggagagataacgcgagtacggggagattcgtantataataggatagtacgcgcgagcgcgtaggcgagncgtcgagtacgagggnagagagtaaagttagatacggaggagttttagcgngaaagagagcgcgtatnacgttcgcggcgatatacgggcgataggcgatacggatcgattagcgcgagcgcgaagacgcgaacgcgtcgcgaaatcgtcgcgtaaaatcgtcgcgaatattcgtagacgaatcgttanagaagagacgcgcggcgcgtatacgacgtaagatagagacgatttagcgagcgtataatacgagggtaagtngtatagtagcgttagagagcgaagggacgggcgggtatcgangacggcgatacgattaagt

SEQ ID NO: 27406 - DNA, 706 bp, Artificial Sequence
  chemically treated genomic DNA (Homo sapiens) CpG-island No: 27406
  unsure (20, 62, 134, 255, 272, 307, 323, 359, 655)
acttaatcgtatcgccgtcntcgatacccgcccgtcccttcgctctctaacgctactatacnacttaccctcgtattatacgctcgctaaatcgtctctatcttacgtcgtatacgcgccgcgcgtctcttctntaacgattcgtctacgaatattcgcgacgattttacgcgacgatttcgcgacgcgttcgcgtcttcgcgctcgcgctaatcgatccgtatcgcctatcgcccgtatatcgccgcgaacgtnatacgcgctctctttcncgctaaaactcctccgtatctaactttactctctnccctcgtactcgacgnctcgcctacgcgctcgcgcgtactatcctattatantacgaatctccccgtactcgcgttatctctcctaaacttacctcctctaattaatacgattacgtatatcgctactactcgcgtctctcgcgatcctcgcgacgacgactccgccgtatctcctatcctcgctcgctcgctcctttttaccgtcgaaacgcgctctacgcgcgtccgcgtacgaatctatcctaccgcgtaatcctaccgaccgcgtcgtcgcgctactccttacgacgcgcgtcgtactctcgctcctctcgtcctcgcccgataccgactctactactatcgtnttactaccctcgctacccccgcgaaatcttacccctccccccccgcgacga

SEQ ID NO: 27407 - DNA, 706 bp, Artificial Sequence
  chemically treated genomic DNA (Homo sapiens) CpG-island No: 27407
  unsure (20, 62, 134, 255, 272, 307, 323, 359, 655)
gtttggtcgtgtcgtcgttntcggtgttcgttcgttttttcgttttttggcgttgttgtgtngtttgttttcgtgttgtgcgttcgttgggtcgtttttgttttgcgtcgtgtgcgcgtcgcgcgttttttttntggcggttcgtttgcgggtgttcgcggcggttttgcgcggcggtttcgcggcgcgttcgcgttttcgcgttcgcgttggtcggttcgtgtcgtttgtcgttcgtgtgtcgtcgcgggcgtngtgcgcgtttttttttncgttggggttttttcgtgtttggttttgttttttnttttcgtgttcggcgnttcgtttgcgcgttcgcgcgtgttgttttgttgtgntgcgggttttttcgtgttcgcgttgttttttttgggtttgttttttttggttggtgcggttgcgtgtgtcgttgttgttcgcgtttttcgcggttttcgcggcggcggtttcgtcgtgttttttgttttcgttcgttcgtttttttttgtcgtcggggcgcgttttgcgcgcgttcgcgtgcgggtttgttttgtcgcgtggttttgtcggtcgcgtcgtcgcgttgttttttgcggcgcgcgtcgtgttttcgtttttttcgttttcgttcggtgtcggttttgttgttgtcgtnttgttgttttcgttgttttcgcggggttttgttttttttttttcgcggcgg

SEQ ID NO: 27408 - DNA, 706 bp, Artificial Sequence
  chemically treated genomic DNA (Homo sapiens) CpG-island No: 27408
  unsure (52, 348, 384, 400, 435, 452, 573, 645, 687)
ccgccgcgaaaaaaaaaaaacaaaaccccgcgaaaacaacgaaaacaacaanacgacaacaacaaaaccgacaccgaacgaaaacgaaaaaaacgaaaacacgacgcgcgccgcaaaaaacaacgcgacgacgcgaccgacaaaaccacgcgacaaaacaaacccgcacgcgaacgcgcgcaaaacgcgccccgacgacaaaaaaaaacgaacgaacgaaaacaaaaaacacgacgaaaccgccgccgcgaaaaccgcgaaaaacgcgaacaacaacgacacacgcaaccgcaccaaccaaaaaaaacaaacccaaaaaaaacaacgcgaacacgaaaaaacccgcancacaacaaaacaacacgcgcgaacgcgcaaacgaancgccgaacacgaaaanaaaaaacaaaaccaaacacgaaaaaaccccaacgnaaaaaaaaacgcgcacnacgcccgcgacgacacacgaacgacaaacgacacgaaccgaccaacgcgaacgcgaaaacgcgaacgcgccgcgaaaccgccgcgcaaaaccgccgcgaacacccgcaaacgaaccgccanaaaaaaaacgcgcgacgcgcacacgacgcaaaacaaaaacgacccaacgaacgcacaacacgaaaacaaacnacacaacaacgccaaaaaacgaaaaaacgaacgaacaccganaacgacgacacgaccaaac

SEQ ID NO: 27409 - DNA, 663 bp, Artificial Sequence
  chemically treated genomic DNA (Homo sapiens) CpG-island No: 27409
cgagtcgacggcgagatataacgtagtaacgaattacgcgataattattatttataaaacgaatttttttttacgcgaatagacgtttaattttcgaattttaaatcgtttaatcgtacgaacgaaggggggcgagaaagaaggggagagtaataaatatatagaagattagtatcgcggaatcggagagagaaagggtagggataaaagagcgaaagcgagcggatataagtcgcgggcgagagagcgcgtaaaacgacggagtaaaggaagaagaaaagtagtatagtcgcgaaagagacgataggggtagaaacgtagatttttattcgtacggtagagtcgtagaggtataataatcgttcgcggattaatcgtaattagacgttttcgtcgatattatattataaagagcgtataataataaaaacgaatagattcggatagacgcgcggagcgtatttataatataagttattacgcgggacgggatatatataaacgcgagattaataaagagatcgattagcgcgcgaaatcgatatagttaataatacgaataaagagggaggaaggtagttcgcgacggaatacgagagaagaagagagcgacgtaaatacgagacggcgtcgagcggagtaaggataggcgggtaagaacgt

SEQ ID NO: 27410 - DNA, 663 bp, Artificial Sequence
  chemically treated genomic DNA (Homo sapiens) CpG-island No: 27410
acgttcttacccgcctatccttactccgctcgacgccgtctcgtatttacgtcgctctcttcttctctcgtattccgtcgcgaactaccttcctccctctttattcgtattattaactatatcgatttcgcgcgctaatcgatctctttattaatctcgcgtttatatatatcccgtcccgcgtaataacttatattataaatacgctccgcgcgtctatccgaatctattcgtttttattattatacgctctttataatataatatcgacgaaaacgtctaattacgattaatccgcgaacgattattatacctctacgactctaccgtacgaataaaaatctacgtttctacccctatcgtctctttcgcgactatactacttttcttcttcctttactccgtcgttttacgcgctctctcgcccgcgacttatatccgctcgctttcgctcttttatccctaccctttctctctccgattccgcgatactaatcttctatatatttattactctccccttctttctcgccccccttcgttcgtacgattaaacgatttaaaattcgaaaattaaacgtctattcgcgtaaaaaaaaattcgttttataaataataattatcgcgtaattcgttactacgttatatctcgccgtcgactcg

SEQ ID NO: 27411 - DNA, 663 bp, Artificial Sequence
  chemically treated genomic DNA (Homo sapiens) CpG-island No: 27411
gcgtttttgttcgtttgtttttgtttcgttcggcgtcgtttcgtgtttgcgtcgttttttttttttttcgtgtttcgtcgcgggttgtttttttttttttttgttcgtgttgttggttgtgtcggtttcgcgcgttggtcggtttttttgttggtttcgcgtttgtgtgtgtttcgtttcgcgtggtggtttgtgttgtgggtgcgtttcgcgcgtttgttcgggtttgttcgtttttgttgttgtgcgttttttgtggtgtggtgtcggcgggggcgtttggttgcggttggttcgcgggcggttgttgtgtttttgcggttttgtcgtgcgggtgggggtttgcgtttttgtttttgtcgtttttttcgcggttgtgttgttttttttttttttttgtttcgtcgttttgcgcgttttttcgttcgcggtttgtgttcgttcgttttcgtttttttgtttttgtttttttttttttcggtttcgcggtgttggttttttgtgtgtttgttgttttttttttttttttcgttttttttcgttcgtgcggttgggcggtttggggttcgggggttgggcgtttgttcgcgtgggggggggttcgttttgtgggtggtggttgtcgcgtggttcgttgttgcgttgtgtttcgtcgtcggttcg

SEQ ID NO: 27412 - DNA, 663 bp, Artificial Sequence
  chemically treated genomic DNA (Homo sapiens) CpG-island No: 27412
cgaaccgacgacgaaacacaacgcaacaacgaaccacgcgacaaccaccacccacaaaacgaacccccccccacgcgaacaaacgcccaacccccgaaccccaaaccgcccaaccgcacgaacgaaaaaaaacgaaaaaaaaaaaaaaaacaacaaacacacaaaaaaccaacaccgcgaaaccgaaaaaaaaaaaaacaaaaacaaaaaaacgaaaacgaacgaacacaaaccgcgaacgaaaaaacgcgcaaaacgacgaaacaaaaaaaaaaaaaaaacaacacaaccgcgaaaaaaacgacaaaaacaaaaacgcaaacccccacccgcacgacaaaaccgcaaaaacacaacaaccgcccgcgaaccaaccgcaaccaaacgcccccgccgacaccacaccacaaaaaacgcacaacaacaaaaacgaacaaacccgaacaaacgcgcgaaacgcacccacaacacaaaccaccacgcgaaacgaaacacacacaaacgcgaaaccaacaaaaaaaccgaccaacgcgcgaaaccgacacaaccaacaacacgaacaaaaaaaaaaaaaaacaacccgcgacgaaacacgaaaaaaaaaaaaaacgacgcaaacacgaaacgacgccgaacgaaacaaaaacaaacgaacaaaaacgc

SEQ ID NO: 27413 - DNA, 612 bp, Artificial Sequence
  chemically treated genomic DNA (Homo sapiens) CpG-island No: 27413
  unsure (318, 603)
aggtcggcggaaacgatagtattcgcgcgtatcgttcgcgggggcggggagcgttatttcgcgtttcgtcgagttacgaatcgcggttcgttatcggttttttatcgggagattattcgatatataaacgttcggtcgttcgtaaatcgcgtaatcggaatacgtataacgagatttagcgaggcgcgttattcgtcgttcgatcgatacgagtcgacgagatcgaagcgcgcgcgattcgtatttaacgataaaaataaaaggagaaggaatcgatatattcgttcgaagaatagattcgcgtaatcggcgacgatncgtagaacgcgaaagatacgcgaatatacggtagcggtaaacgcgagtattatcgcgttaatttcgatttaagcgataatcgacgagataaaaattatcgttcgtcgacgtcgatacggcgattagagagggcgaaattagaagtacgcggttattagatacggaagttatcgtttattcgatcgcggcgagcgaagaagtatcgataagatattagatagtatatacgcgatttaaagaagttagagcgacggaatagagacgtacgagtatcgtagtacgaangtaatatat

SEQ ID NO: 27414 - DNA, 612 bp, Artificial Sequence
  chemically treated genomic DNA (Homo sapiens) CpG-island No: 27414
  unsure (10, 295)
atatattacnttcgtactacgatactcgtacgtctctattccgtcgctctaacttctttaaatcgcgtatatactatctaatatcttatcgatacttcttcgctcgccgcgatcgaataaacgataacttccgtatctaataaccgcgtacttctaatttcgccctctctaatcgccgtatcgacgtcgacgaacgataatttttatctcgtcgattatcgcttaaatcgaaattaacgcgataatactcgcgtttaccgctaccgtatattcgcgtatctttcgcgttctacgnatcgtcgccgattacgcgaatctattcttcgaacgaatatatcgattccttctccttttatttttatcgttaaatacgaatcgcgcgcgcttcgatctcgtcgactcgtatcgatcgaacgacgaataacgcgcctcgctaaatctcgttatacgtattccgattacgcgatttacgaacgaccgaacgtttatatatcgaataatctcccgataaaaaaccgataacgaaccgcgattcgtaactcgacgaaacgcgaaataacgctccccgcccccgcgaacgatacgcgcgaatactatcgtttccgccgacct

SEQ ID NO: 27415 - DNA, 612 bp, Artificial Sequence
  chemically treated genomic DNA (Homo sapiens) CpG-island No: 27415
  unsure (10, 295)
gtgtgttgtnttcgtgttgcggtgttcgtgcgtttttgtttcgtcgttttggtttttttgggtcgcgtgtgtgttgtttggtgttttgtcggtgttttttcgttcgtcgcggtcgggtgggcggtggttttcgtgtttggtggtcgcgtgtttttggtttcgttttttttggtcgtcgtgtcggcgtcggcgggcggtggtttttgtttcgtcggttgtcgtttgggtcggggttggcgcggtggtgttcgcgtttgtcgttgtcgtgtgttcgcgtgtttttcgcgttttgcgngtcgtcgtcggttgcgcgggtttgtttttcgggcgggtgtgtcggttttttttttttttgtttttgtcgttgggtgcgggtcgcgcgcgtttcggtttcgtcggttcgtgtcggtcgggcggcgggtggcgcgtttcgttgggtttcgttgtgcgtgtttcggttgcgcggtttgcgggcggtcgggcgtttgtgtgtcgggtggtttttcggtggggggtcggtggcgggtcgcggttcgtggttcggcggggcgcggggtggcgtttttcgttttcgcgggcggtgcgcgcgggtgttgtcgttttcgtcggttt

SEQ ID NO: 27416 - DNA, 612 bp, Artificial Sequence
  chemically treated genomic DNA (Homo sapiens) CpG-island No: 27416
  unsure (318, 603)
aaaccgacgaaaacgacaacacccgcgcgcaccgcccgcgaaaacgaaaaacgccaccccgcgccccgccgaaccacgaaccgcgacccgccaccgaccccccaccgaaaaaccacccgacacacaaacgcccgaccgcccgcaaaccgcgcaaccgaaacacgcacaacgaaacccaacgaaacgcgccacccgccgcccgaccgacacgaaccgacgaaaccgaaacgcgcgcgacccgcacccaacgacaaaaacaaaaaaaaaaaaaaccgacacacccgcccgaaaaacaaacccgcgcaaccgacgacgacncgcaaaacgcgaaaaacacgcgaacacacgacaacgacaaacgcgaacaccaccgcgccaaccccgacccaaacgacaaccgacgaaacaaaaaccaccgcccgccgacgccgacacgacgaccaaaaaaaacgaaaccaaaaacacgcgaccaccaaacacgaaaaccaccgcccacccgaccgcgacgaacgaaaaaacaccgacaaaacaccaaacaacacacacgcgacccaaaaaaaccaaaacgacgaaacaaaaacgcacgaacaccgcaacacgaanacaacacac

SEQ ID NO: 27417 - DNA, 599 bp, Artificial Sequence
  chemically treated genomic DNA (Homo sapiens) CpG-island No: 27417
  unsure (127, 235, 426)
atcgcgcgggggggagagagatatatatatttttaaataataacgatcggggggagaaataaatatatagcgggtcgacgaagaagatacgacgcggaggcggttaaaagagcggcggcgaggaggnaaggaagaagaaagtttagaggaagagtagaggcgaagataaacgcgagcggaacgaggaacgggtatacgatataaaagataataaggaagcgaagatatacggagnggagagtagcgaaggagagagtaatatagcgtaaagtaacgatagtaaataagtatcgatagggcgcgttagtcgaatagaagtagggagtatagtagttagcgttaagatacgagtagaatatatagcgcgcggcgggagagataagatatatcgagacgagggagagtaaataacgatacgacgatagnagagagaagagtaataataacgagtaatacggacgttaacgcgcgagagagtcgatagagaagaattcgtagagaatacgtcgcgagattagagcggtataggagtagagcggagagcgggtagaagtatataggagagcggaattagtagatcggtagacgcgacggttacg

SEQ ID NO: 27418 - DNA, 599 bp, Artificial Sequence
  chemically treated genomic DNA (Homo sapiens) CpG-island No: 27418
  unsure (174, 365, 473)
cgtaaccgtcgcgtctaccgatctactaattccgctctcctatatacttctacccgctctccgctctactcctataccgctctaatctcgcgacgtattctctacgaattcttctctatcgactctctcgcgcgttaacgtccgtattactcgttattattactcttctctctnctatcgtcgtatcgttatttactctccctcgtctcgatatatcttatctctcccgccgcgcgctatatattctactcgtatcttaacgctaactactatactccctacttctattcgactaacgcgccctatcgatacttatttactatcgttactttacgctatattactctctccttcgctactctccnctccgtatatcttcgcttccttattatcttttatatcgtatacccgttcctcgttccgctcgcgtttatcttcgcctctactcttcctctaaactttcttcttccttncctcctcgccgccgctcttttaaccgcctccgcgtcgtatcttcttcgtcgacccgctatatatttatttctccccccgatcgttattatttaaaaatatatatatctctctcccccccgcgcgat

SEQ ID NO: 27419 - DNA, 599 bp, Artificial Sequence
  chemically treated genomic DNA (Homo sapiens) CpG-island No: 27419
  unsure (174, 365, 473)
cgtggtcgtcgcgtttgtcggtttgttggtttcgtttttttgtgtgtttttgttcgtttttcgttttgtttttgtgtcgttttggtttcgcggcgtgttttttgcgggtttttttttgtcggttttttcgcgcgttggcgttcgtgttgttcgttgttgttgtttttttttttnttgtcgtcgtgtcgttgtttgttttttttcgtttcggtgtgttttgtttttttcgtcgcgcgttgtgtgttttgttcgtgttttggcgttggttgttgtgttttttgtttttgttcggttggcgcgttttgtcggtgtttgtttgttgtcgttgttttgcgttgtgttgttttttttttcgttgttttttntttcgtgtgttttcgtttttttgttgttttttgtgtcgtgtgttcgtttttcgtttcgttcgcgtttgttttcgtttttgttttttttttgggttttttttttttttnttttttcgtcgtcgtttttttggtcgttttcgcgtcgtgtttttttcgtcggttcgttgtgtgtttgttttttttttcggtcgttgttgtttgggggtgtgtgtgtttttttttttttcgcgcggt

SEQ ID NO: 27420 - DNA, 599 bp, Artificial Sequence
  chemically treated genomic DNA (Homo sapiens) CpG-island No: 27420
  unsure (127, 235, 426)
accgcgcgaaaaaaaaaaaaacacacacacccccaaacaacaacgaccgaaaaaaaaaacaaacacacaacgaaccgacgaaaaaaacacgacgcgaaaacgaccaaaaaaacgacgacgaaaaaanaaaaaaaaaaaaaacccaaaaaaaaaacaaaaacgaaaacaaacgcgaacgaaacgaaaaacgaacacacgacacaaaaaacaacaaaaaaacgaaaacacacgaaanaaaaaacaacgaaaaaaaaaacaacacaacgcaaaacaacgacaacaaacaaacaccgacaaaacgcgccaaccgaacaaaaacaaaaaacacaacaaccaacgccaaaacacgaacaaaacacacaacgcgcgacgaaaaaaacaaaacacaccgaaacgaaaaaaaacaaacaacgacacgacgacaanaaaaaaaaaaacaacaacaacgaacaacacgaacgccaacgcgcgaaaaaaccgacaaaaaaaaacccgcaaaaaacacgccgcgaaaccaaaacgacacaaaaacaaaacgaaaaacgaacaaaaacacacaaaaaaacgaaaccaacaaaccgacaaacgcgacgaccacg

SEQ ID NO: 27421 - DNA, 530 bp, Artificial Sequence
  chemically treated genomic DNA (Homo sapiens) CpG-island No: 27421
  unsure (210, 274, 345, 421)
gtagacgagcggacggttagaggagatcgagtaacgataaggggcggtaaaaagaaagcgaggggaatagaaagggcgacgagaagtagggggaggggtaggagacgtaggtaaagtaagggagaaagaaggtaagaagagaaggaaaaggagagcggagggagcgagatagggcgaagacgagaggaagtagaggataagaggagtatnacggcggagagacgagaggaaggagaggaggaatatataattagagagagggaagagaagacgnagtacgatatatagaagaaagagcgaaggcgagaggaaagaagtaaggggaggagataaacgggagagggngagagatagcgggagagggaagtaggggaaggaataaaagaaaagagaacgataaagtagaaaggagaataagagnagcgataggaaggaggggcggagggagaagagaaaggaggacgtaggaaacggaacgatagagaggggcgtaggattcgtagagaggcgaaggaaaagaagtcggaaag

SEQ ID NO: 27422 - DNA, 530 bp, Artificial Sequence
  chemically treated genomic DNA (Homo sapiens) CpG-island No: 27422
  unsure (110, 186, 257, 321)
ctttccgacttcttttccttcgcctctctacgaatcctacgcccctctctatcgttccgtttcctacgtcctcctttctcttctccctccgcccctccttcctatcgctnctcttattctcctttctactttatcgttctcttttcttttattccttcccctacttccctctcccgctatctctcnccctctcccgtttatctcctccccttacttctttcctctcgccttcgctctttcttctatatatcgtactncgtcttctcttccctctctctaattatatattcctcctctccttcctctcgtctctccgccgtnatactcctcttatcctctacttcctctcgtcttcgccctatctcgctccctccgctctccttttccttctcttcttaccttctttctcccttactttacctacgtctcctacccctccccctacttctcgtcgccctttctattcccctcgctttctttttaccgccccttatcgttactcgatctcctctaaccgtccgctcgtctac

SEQ ID NO: 27423 - DNA, 530 bp, Artificial Sequence
  chemically treated genomic DNA (Homo sapiens) CpG-island No: 27423
  unsure (110, 186, 257, 321)
tttttcggttttttttttttcgtttttttgcgggttttgcgtttttttttgtcgtttcgttttttgcgtttttttttttttttttttttcgttttttttttttgtcgttntttttgtttttttttttgttttgtcgttttttttttttttgtttttttttttgtttttttttttcgttgttttttnttttttttcgtttgttttttttttttgttttttttttttcgttttcgtttttttttttgtgtgtcgtgttncgtttttttttttttttttttggttgtgtgtttttttttttttttttttcgttttttcgtcgtngtgttttttttgttttttgttttttttcgttttcgttttgtttcgtttttttcgttttttttttttttttttttttgtttttttttttttttgttttgtttgcgttttttgtttttttttttgtttttcgtcgttttttttgtttttttcgttttttttttgtcgttttttgtcgttgttcggttttttttggtcgttcgttcgtttgt

SEQ ID NO: 27424 - DNA, 530 bp, Artificial Sequence
  chemically treated genomic DNA (Homo sapiens) CpG-island No: 27424
  unsure (210, 274, 345, 421)
acaaacgaacgaacgaccaaaaaaaaccgaacaacgacaaaaaacgacaaaaaaaaaacgaaaaaaacaaaaaaaacgacgaaaaacaaaaaaaaaaacaaaaaacgcaaacaaaacaaaaaaaaaaaaaaacaaaaaaaaaaaaaaaaaaaaaacgaaaaaaacgaaacaaaacgaaaacgaaaaaaaacaaaaaacaaaaaaaacacnacgacgaaaaaacgaaaaaaaaaaaaaaaaaaacacacaaccaaaaaaaaaaaaaaaaaaacgnaacacgacacacaaaaaaaaaaacgaaaacgaaaaaaaaaaaacaaaaaaaaaaaacaaacgaaaaaaaanaaaaaacaacgaaaaaaaaaaacaaaaaaaaaaacaaaaaaaaaaaaaacgacaaaacaaaaaaaaaaacaaaaanaacgacaaaaaaaaaaaacgaaaaaaaaaaaaaaaaaaaaacgcaaaaaacgaaacgacaaaaaaaaacgcaaaacccgcaaaaaaacgaaaaaaaaaaaaccgaaaaa

SEQ ID NO: 27425 - DNA, 626 bp, Artificial Sequence
  chemically treated genomic DNA (Homo sapiens) CpG-island No: 27425
  unsure (22, 295)
cgtcgtcggagcgataaatttntcgggtcgggcggggggcggggggggttttttttcgtcgttaacgtttaggtcgttcgttacggtcgttaagttaaaattcgtacgttattagttttacgttttttcgcgacgtatatcgtttaattcgtcgttacgatcgcgtatttagcgtttttcgtttcgcgcgacgagtcgaacgcgcgagtaagggtttttatttatcgttagtttacgaggatcgcgttattatcgtcgattttattataatacgacgggcggtatcgtacgatanatttttatacgttttcggggcgcgagcgtacgtatataattcgtacgtagtatcgcgtaagttttcgtcgttttacggcgggatacgataagataagagcgcgggtagcgtcggcgtatattcgtcgtcgttcgtaatattcgtataattagcggacgatacgcgagagcgcgtagaatcgagcgcgttacgcgttcgtttagaacgtagttcgttttaacgtaaatattcgcgtatcggattataatatttatcgggcggttttatcgattattaagtcgacgcgatacgggaggcggtttttcgatagaacgcgtatcggagtcggttt

SEQ ID NO: 27426 - DNA, 626 bp, Artificial Sequence
  chemically treated genomic DNA (Homo sapiens) CpG-island No: 27426
  unsure (332, 605)
aaaccgactccgatacgcgttctatcgaaaaaccgcctcccgtatcgcgtcgacttaataatcgataaaaccgcccgataaatattataatccgatacgcgaatatttacgttaaaacgaactacgttctaaacgaacgcgtaacgcgctcgattctacgcgctctcgcgtatcgtccgctaattatacgaatattacgaacgacgacgaatatacgccgacgctacccgcgctcttatcttatcgtatcccgccgtaaaacgacgaaaacttacgcgatactacgtacgaattatatacgtacgctcgcgccccgaaaacgtataaaaatntatcgtacgataccgcccgtcgtattataataaaatcgacgataataacgcgatcctcgtaaactaacgataaataaaaacccttactcgcgcgttcgactcgtcgcgcgaaacgaaaaacgctaaatacgcgatcgtaacgacgaattaaacgatatacgtcgcgaaaaaacgtaaaactaataacgtacgaattttaacttaacgaccgtaacgaacgacctaaacgttaacgacgaaaaaaaaccccccccgccccccgcccgacccganaaatttatcgctccgacgacg

SEQ ID NO: 27427 - DNA, 626 bp, Artificial Sequence
  chemically treated genomic DNA (Homo sapiens) CpG-island No: 27427
  unsure (332, 605)
gggtcggtttcggtgcgcgttttgtcggggggtcgtttttcgtgtcgcgtcggtttggtggtcggtggggtcgttcggtgggtgttgtggttcggtgcgcgggtgtttgcgttggggcgggttgcgttttgggcgggcgcgtggcgcgttcggttttgcgcgttttcgcgtgtcgttcgttggttgtgcgggtgttgcgggcggcggcgggtgtgcgtcggcgttgttcgcgtttttgttttgtcgtgtttcgtcgtggggcggcgggggtttgcgcggtgttgcgtgcgggttgtgtgcgtgcgttcgcgtttcgggggcgtgtgggggtntgtcgtgcggtgtcgttcgtcgtgttgtggtggggtcggcggtggtggcgcggttttcgtgggttggcggtgggtgggggtttttgttcgcgcgttcggttcgtcgcgcggggcggggggcgttgggtgcgcggtcgtggcggcgggttgggcggtgtgcgtcgcgggggggcgtggggttggtggcgtgcgggttttggtttggcggtcgtggcgggcggtttgggcgttggcggcgggggggggtttttttcgtttttcgttcggttcggngggtttgtcgtttcggcggcg

SEQ ID NO: 27428 - DNA, 626 bp, Artificial Sequence
  chemically treated genomic DNA (Homo sapiens) CpG-island No: 27428
  unsure (22, 295)
cgccgccgaaacgacaaacccnccgaaccgaacgaaaaacgaaaaaaacccccccccgccgccaacgcccaaaccgcccgccacgaccgccaaaccaaaacccgcacgccaccaaccccacgcccccccgcgacgcacaccgcccaacccgccgccacgaccgcgcacccaacgccccccgccccgcgcgacgaaccgaacgcgcgaacaaaaacccccacccaccgccaacccacgaaaaccgcgccaccaccgccgaccccaccacaacacgacgaacgacaccgcacgacanacccccacacgcccccgaaacgcgaacgcacgcacacaacccgcacgcaacaccgcgcaaacccccgccgccccacgacgaaacacgacaaaacaaaaacgcgaacaacgccgacgcacacccgccgccgcccgcaacacccgcacaaccaacgaacgacacgcgaaaacgcgcaaaaccgaacgcgccacgcgcccgcccaaaacgcaacccgccccaacgcaaacacccgcgcaccgaaccacaacacccaccgaacgaccccaccgaccaccaaaccgacgcgacacgaaaaacgaccccccgacaaaacgcgcaccgaaaccgaccc

SEQ ID NO: 27429 - DNA, 564 bp, Artificial Sequence
  chemically treated genomic DNA (Homo sapiens) CpG-island No: 27429
  unsure (340)
ggggcgggaggaggaaaatcgtcgcgataggggcgggggggcgggcggggggtcgcgcgggcggggaggcgaagataaggcgcgttaacgcggagcgttagagcgcggacgggcgtatcgaaaggtcggcggataggcgatagcgaggcgcggcgtcgaggcgggcgcgggtagcgcggacgaggtaagacgtcggagggcggcgcggggagagagcgcgcgggaaggggagggagcgggagggggagtagcggcgcgtcgaggaggttaaggggcgtcgcgcgggtcggggagcggtcgcgacgcggtagagcgagcggcgcgcggcggagcggtcgtncggcgacgcgaggaggcgggaggcggaggagcgtaagcgcgcgcggagggggagcgaggagggagcgagaggtaggatagcgagcggacgcgcgagcggaggtagttacgatacgagggatcggcggcgaggcggcgaggagggaggcgaggggaggagcggcggagtaggcgggcgggaggtacgggtcggggacgaggggaggcggtagaggcgcggcgcgt

SEQ ID NO: 27430 - DNA, 564 bp, Artificial Sequence
  chemically treated genomic DNA (Homo sapiens) CpG-island No: 27430
  unsure (225)
acgcgccgcgcctctaccgcctcccctcgtccccgacccgtacctcccgcccgcctactccgccgctcctcccctcgcctccctcctcgccgcctcgccgccgatccctcgtatcgtaactacctccgctcgcgcgtccgctcgctatcctacctctcgctccctcctcgctccccctccgcgcgcgcttacgctcctccgcctcccgcctcctcgcgtcgccgnacgaccgctccgccgcgcgccgctcgctctaccgcgtcgcgaccgctccccgacccgcgcgacgccccttaacctcctcgacgcgccgctactccccctcccgctccctccccttcccgcgcgctctctccccgcgccgccctccgacgtcttacctcgtccgcgctacccgcgcccgcctcgacgccgcgcctcgctatcgcctatccgccgacctttcgatacgcccgtccgcgctctaacgctccgcgttaacgcgccttatcttcgcctccccgcccgcgcgaccccccgcccgcccccccgcccctatcgcgacgattttcctcctcccgcccc

SEQ ID NO: 27431 - DNA, 564 bp, Artificial Sequence
  chemically treated genomic DNA (Homo sapiens) CpG-island No: 27431
  unsure (225)
gcgcgtcgcgtttttgtcgttttttttcgttttcggttcgtgtttttcgttcgtttgtttcgtcgttttttttttcgttttttttttcgtcgtttcgtcgtcggtttttcgtgtcgtggttgttttcgttcgcgcgttcgttcgttgttttgtttttcgtttttttttcgtttttttttcgcgcgcgtttgcgttttttcgtttttcgttttttcgcgtcgtcgngcggtcgtttcgtcgcgcgtcgttcgttttgtcgcgtcgcggtcgtttttcggttcgcgcggcgttttttggttttttcggcgcgtcgttgttttttttttcgttttttttttttttcgcgcgtttttttttcgcgtcgtttttcggcgttttgtttcgttcgcgttgttcgcgttcgtttcggcgtcgcgtttcgttgtcgtttgttcgtcggtttttcggtgcgttcgttcgcgttttggcgtttcgcgttggcgcgttttgttttcgttttttcgttcgcgcggtttttcgttcgttttttcgtttttgtcgcggcggttttttttttttcgtttt

SEQ ID NO: 27432 - DNA, 564 bp, Artificial Sequence
  chemically treated genomic DNA (Homo sapiens) CpG-island No: 27432
  unsure (340)
aaaacgaaaaaaaaaaaaccgccgcgacaaaaacgaaaaaacgaacgaaaaaccgcgcgaacgaaaaaacgaaaacaaaacgcgccaacgcgaaacgccaaaacgcgaacgaacgcaccgaaaaaccgacgaacaaacgacaacgaaacgcgacgccgaaacgaacgcgaacaacgcgaacgaaacaaaacgccgaaaaacgacgcgaaaaaaaaacgcgcgaaaaaaaaaaaaaacgaaaaaaaaaacaacgacgcgccgaaaaaaccaaaaaacgccgcgcgaaccgaaaaacgaccgcgacgcgacaaaacgaacgacgcgcgacgaaacgaccgcncgacgacgcgaaaaaacgaaaaacgaaaaaacgcaaacgcgcgcgaaaaaaaaacgaaaaaaaaacgaaaaacaaaacaacgaacgaacgcgcgaacgaaaacaaccacgacacgaaaaaccgacgacgaaacgacgaaaaaaaaaacgaaaaaaaaaacgacgaaacaaacgaacgaaaaacacgaaccgaaaacgaaaaaaaacgacaaaaacgcgacgcgc

SEQ ID NO: 27433 - DNA, 558 bp, Artificial Sequence
  chemically treated genomic DNA (Homo sapiens) CpG-island No: 27433
  unsure (30, 508)
cgaaagcgcgtcggtagtttatttagattngaattttatcgttagcgcggcgcgtcgcgtagcgcgtcgcgagtcggaagggttcgatcgagcgaatcgacgcgaacggtagttatatttagttatcggcgtttcgtcggtacgtcggcgggtcgcggaggacgaatcgatcgatcgagatagcgtcgatagaagggaagggacgggaagtcgaagtacgcggcggtatattagagataaaatagattaaacgttttttcgcgttcggtaggtcgagggcggcgttagagttcggggaagtagcgtagcggtatagtagcgtcgattcgttatttaacgttagtagaagagggggcggagaaggagggagaagtacgggtcgcgggcggagcgcgaaggggttaatacgcgtagttcgagtttcgagtagtatagagatttaggtagcggttaggaaggatcgaatagaaaagcgcgcggagtataggagcggatagtagagagtttntagataagatatagcgacgtcgttaggaagtagattacgtataggcgacg

SEQ ID NO: 27434 - DNA, 558 bp, Artificial Sequence
  chemically treated genomic DNA (Homo sapiens) CpG-island No: 27434
  unsure (51, 529)
cgtcgcctatacgtaatctacttcctaacgacgtcgctatatcttatctanaaactctctactatccgctcctatactccgcgcgcttttctattcgatccttcctaaccgctacctaaatctctatactactcgaaactcgaactacgcgtattaaccccttcgcgctccgcccgcgacccgtacttctccctccttctccgccccctcttctactaacgttaaataacgaatcgacgctactataccgctacgctacttccccgaactctaacgccgccctcgacctaccgaacgcgaaaaaacgtttaatctattttatctctaatataccgccgcgtacttcgacttcccgtcccttcccttctatcgacgctatctcgatcgatcgattcgtcctccgcgacccgccgacgtaccgacgaaacgccgataactaaatataactaccgttcgcgtcgattcgctcgatcgaacccttccgactcgcgacgcgctacgcgacgcgccgcgctaacgataaaattcnaatctaaataaactaccgacgcgctttcg

SEQ ID NO: 27435 - DNA, 558 bp, Artificial Sequence
  chemically treated genomic DNA (Homo sapiens) CpG-island No: 27435
  unsure (51, 529)
cgtcgtttgtgcgtggtttgttttttggcggcgtcgttgtgttttgtttgngggttttttgttgttcgtttttgtgtttcgcgcgtttttttgttcggttttttttggtcgttgtttgggtttttgtgttgttcggggttcgggttgcgcgtgttggttttttcgcgtttcgttcgcggttcgtgttttttttttttttttcgtttttttttttgttggcgttgggtggcgggtcggcgttgttgtgtcgttgcgttgttttttcgggttttggcgtcgttttcggtttgtcgggcgcgggggggcgtttggtttgttttgtttttggtgtgtcgtcgcgtgtttcggtttttcgtttttttttttttgtcggcgttgtttcggtcggtcggttcgtttttcgcggttcgtcggcgtgtcggcggggcgtcggtggttgggtgtggttgtcgttcgcgtcggttcgttcggtcgggttttttcggttcgcggcgcgttgcgcggcgcgtcgcgttggcggtggggtttnggtttgggtgggttgtcggcgcgttttcg

SEQ ID NO: 27436 - DNA, 558 bp, Artificial Sequence
  chemically treated genomic DNA (Homo sapiens) CpG-island No: 27436
  unsure (30, 508)
cgaaaacgcgccgacaacccacccaaaccnaaaccccaccgccaacgcgacgcgccgcgcaacgcgccgcgaaccgaaaaaacccgaccgaacgaaccgacgcgaacgacaaccacacccaaccaccgacgccccgccgacacgccgacgaaccgcgaaaaacgaaccgaccgaccgaaacaacgccgacaaaaaaaaaaaaacgaaaaaccgaaacacgcgacgacacaccaaaaacaaaacaaaccaaacgcccccccgcgcccgacaaaccgaaaacgacgccaaaacccgaaaaaacaacgcaacgacacaacaacgccgacccgccacccaacgccaacaaaaaaaaaaacgaaaaaaaaaaaaaaaacacgaaccgcgaacgaaacgcgaaaaaaccaacacgcgcaacccgaaccccgaacaacacaaaaacccaaacaacgaccaaaaaaaaccgaacaaaaaaacgcgcgaaacacaaaaacgaacaacaaaaaacccncaaacaaaacacaacgacgccgccaaaaaacaaaccacgcacaaacgacg

SEQ ID NO: 27437 - DNA, 526 bp, Artificial Sequence
  chemically treated genomic DNA (Homo sapiens) CpG-island No: 27437
cgtaagtcggagacgttcgttttttttttcgcgcggaggaaattttacgggtaagaagtcggggtggcgggaaaggagtacgcggtatcgcggggaggtagagaaggtttgttagggattagtcgggttcggggagagtagggatacgcgggtcgtcggatcgaggaggtcgaggtgacgaggaaaatttttcggcgcggagtcgggattgggcgttttcggcgggttacggttgtttttggtttagtatagtttgcgtttcggttttaatcgggttaggtagggagttaggagagagggtaaatcgcggttcgtatttgtttgagatcgggtgattagtaattggtaatagtttttgttaggcggcgggttttgttttatagttttaaagagagttttcggtagttacgacgttattttgggacgttatcgtcgtcgttaagataattaggaaggggcggggtttggttggggttaaggggttaaaattttagtttaaattgaattacgtttatgagttggtaga

SEQ ID NO: 27438 - DNA, 526 bp, Artificial Sequence
  chemically treated genomic DNA (Homo sapiens) CpG-island No: 27438
tctaccaactcataaacgtaattcaatttaaactaaaattttaaccccttaaccccaaccaaaccccgccccttcctaattatcttaacgacgacgataacgtcccaaaataacgtcgtaactaccgaaaactctctttaaaactataaaacaaaacccgccgcctaacaaaaactattaccaattactaatcacccgatctcaaacaaatacgaaccgcgatttaccctctctcctaactccctacctaacccgattaaaaccgaaacgcaaactatactaaaccaaaaacaaccgtaacccgccgaaaacgcccaatcccgactccgcgccgaaaaattttcctcgtcacctcgacctcctcgatccgacgacccgcgtatccctactctccccgaacccgactaatccctaacaaaccttctctacctccccgcgataccgcgtactcctttcccgccaccccgacttcttacccgtaaaatttcctccgcgcgaaaaaaaaaacgaacgtctccgacttacg

SEQ ID NO: 27439 - DNA, 526 bp, Artificial Sequence
  chemically treated genomic DNA (Homo sapiens) CpG-island No: 27439
tttgttagtttataagcgtggtttaatttaaattagggttttggttttttgattttaattaagtttcgtttttttttggttgttttagcgacggcggtggcgttttaagatggcgtcgtggttgtcggagattttttttgaaattgtaggataaggttcgtcgtttagtaaagattattattagttattggttattcggttttaggtaagtgcgagtcgcggtttatttttttttttaattttttatttggttcggttggggtcgggacgtaggttgtgttaggttaagagtaatcgtagttcgtcggaagcgtttagtttcggtttcgcgtcgggagatttttttcgttatttcggttttttcggttcgacggttcgcgtgtttttgtttttttcgagttcggttagtttttggtaagttttttttgttttttcgcggtgtcgcgtgtttttttttcgttatttcggttttttattcgtagagtttttttcgcgcgaagaggaaaacgggcgttttcggtttgcg

SEQ ID NO: 27440 - DNA, 526 bp, Artificial Sequence
  chemically treated genomic DNA (Homo sapiens) CpG-island No: 27440
cgcaaaccgaaaacgcccgttttcctcttcgcgcgaaaaaaactctacgaataaaaaaccgaaataacgaaaaaaaaacacgcgacaccgcgaaaaaacaaaaaaaacttaccaaaaactaaccgaactcgaaaaaaacaaaaacacgcgaaccgtcgaaccgaaaaaaccgaaataacgaaaaaaatctcccgacgcgaaaccgaaactaaacgcttccgacgaactacgattactcttaacctaacacaacctacgtcccgaccccaaccgaaccaaataaaaaattaaaaaaaaaaataaaccgcgactcgcacttacctaaaaccgaataaccaataactaataataatctttactaaacgacgaaccttatcctacaatttcaaaaaaaatctccgacaaccacgacgccatcttaaaacgccaccgccgtcgctaaaacaaccaaaaaaaaacgaaacttaattaaaatcaaaaaaccaaaaccctaatttaaattaaaccacgcttataaactaacaaa

SEQ ID NO: 27441 - DNA, 525 bp, Artificial Sequence
  chemically treated genomic DNA (Homo sapiens) CpG-island No: 27441
  unsure (7, 37, 68, 75, 91, 96, 99, 101, 118, 121, 129, 139, 144, 191..192)
  unsure (215..216, 223..224, 226, 235, 247..248, 297..298, 338, 357)
  unsure (359, 375, 426..427, 455..)
gggtgtnggggtcgcggtgggggggtgtcggtggttnggtcgcgcgcgtttttcgcggggcgagcggngcgcgtnggtgtcggtgtcgcgntcgtnttngnggcggggggtggggtgnggncgcggggngttcgcggtntcggnttgtgtttttcgcgggggggtcggggggtggtgggtgggggtgtggnnngggggcggggggcggtgcgttnnggcggtnntngtgcgtggngggtggggtggnnggtgtgtcgcgcgtcgcgcgtcgtggtttgcggttttggtggcgcgttnnggtggtggggtcggcgtcgcgcgttcgcgcgcggggggtngggtcgtggggcgggtggngnggcgcgggggtggggngtgtagttgtgggcgcgcggttttcggtgcgagtcgcgcggtcgcgttttnncggtttgttgttttttcgtttcgttcgnncgtttcgggcgtcgtttgtttggagcgcgtcgttcgcggagtatgtttcgttcgtatataattataata

SEQ ID NO: 27442 - DNA, 525 bp, Artificial Sequence
  chemically treated genomic DNA (Homo sapiens) CpG-island No: 27442
  unsure (70..71, 99..100, 151, 167, 169, 188, 228..229, 278..279, 291)
  unsure (300, 302..303, 310..311, 333..334, 382, 387, 397, 405, 408)
  unsure (425, 427, 430, 435, 451, 458, 489, 519)
tattataattatatacgaacgaaacatactccgcgaacgacgcgctccaaacaaacgacgcccgaaacgnncgaacgaaacgaaaaaacaacaaaccgnnaaaacgcgaccgcgcgactcgcaccgaaaaccgcgcgcccacaactacacnccccacccccgcgccncnccacccgccccacgacccnaccccccgcgcgcgaacgcgcgacgccgaccccaccaccnnaacgcgccaccaaaaccgcaaaccacgacgcgcgacgcgcgacacaccnnccaccccacccnccacgcacnannaccgccnnaacgcaccgccccccgcccccnnnccacacccccacccaccaccccccgacccccccgcgaaaaacacaanccganaccgcgaacnccccgcgnccncaccccaccccccgccncnaanacgancgcgacaccgacaccnacgcgcnccgctcgccccgcgaaaaacgcgcgcgaccnaaccaccgacacccccccaccgcgaccccnacaccc

SEQ ID NO: 27443 - DNA, 525 bp, Artificial Sequence
  chemically treated genomic DNA (Homo sapiens) CpG-island No: 27443
  unsure (70..71, 99..100, 151, 167, 169, 188, 228..229, 278..279, 291)
  unsure (300, 302..303, 310..311, 333..334, 382, 387, 397, 405, 408)
  unsure (425, 427, 430, 435, 451, 458, 489, 519)
tgttatggttatgtgcgagcggagtatgtttcgcgggcgacgcgttttaagtaggcggcgttcggggcgnncgggcggggcggaaggataataagtcgnnggggcgcgatcgcgcgattcgtatcgaaggtcgcgcgtttataattgtatnttttattttcgcgttntnttattcgttttacggtttngtttttcgcgcgcgagcgcgcggcgtcggttttattattnnagcgcgttattagaatcgtaaattacggcgcgcggcgcgcgatatattnnttattttatttnttacgtatnannatcgttnnggcgtatcgtttttcgtttttnnnttatatttttatttattatttttcgattttttcgcgggaggtatagntcggngtcgcgggtntttcgcgnttntattttatttttcgttntnaangcgancgcggtatcggtattngcgcgtntcgttcgtttcgcggggagcgcgcgcggttnggttatcgatatttttttatcgcggttttnatattt

SEQ ID NO: 27444 - DNA, 525 bp, Artificial Sequence
  chemically treated genomic DNA (Homo sapiens) CpG-island No: 27444
  unsure (7, 37, 68, 75, 91, 96, 99, 101, 118, 121, 129, 139, 144, 191..192)
  unsure (215..216, 223..224, 226, 235, 247..248, 297..298, 338, 357)
  unsure (359, 375, 426..427, 455..)
aaatatnaaaaccgcgataaaaaaatatcgataaccnaaccgcgcgcgctccccgcgaaacgaacganacgcgcnaataccgataccgcgntcgcnttnanaacgaaaaataaaatanaancgcgaaanacccgcgacnccganctatacctcccgcgaaaaaatcgaaaaataataaataaaaatataannnaaaaacgaaaaacgatacgccnnaacgatnntnatacgtaanaaataaaataannaatatatcgcgcgccgcgcgccgtaatttacgattctaataacgcgctnnaataataaaaccgacgccgcgcgctcgcgcgcgaaaaacnaaaccgtaaaacgaataananaacgcgaaaataaaanatacaattataaacgcgcgaccttcgatacgaatcgcgcgatcgcgccccnncgacttattatccttccgccccgcccgnncgccccgaacgccgcctacttaaaacgcgtcgcccgcgaaacatactccgctcgcacataaccataaca

SEQ ID NO: 27445 - DNA, 757 bp, Artificial Sequence
  chemically treated genomic DNA (Homo sapiens) CpG-island No: 27445
  unsure (6, 27, 30, 37, 43, 57, 61, 112..113, 143, 157, 178, 233, 245)
  unsure (271, 290, 293..294, 355, 357, 366, 377, 394, 431..432, 450)
  unsure (456, 508, 513, 626, 630, 703, 745, 751..)
gaaagncgggggcgggtgggtggttgntgngagtcgncggtangaggcgaggggcgngagnggtaagagggggggtgaagggtcgggggggggggggttggtggtgggggtnngagttgaggcgtgggtttgggggggggagnggggtgggtttcgncgcgtgggggcggtcgggggngggtggggggggggcgagggatatgatataagtatggtaggtgagggtgagtggngggtcggtgagngggagatttagtaaacgttcgtatgngggcgagcggggggggggntgnngggcggtcgcgggtttcgaatcgcggaggagcgggaggggggcggggtcggtgtggcgatngntgacggcgntgtgagaggangggggaggtgaggtggnttgcgcgggcgtgggggtgagagtgtgtggtgagggnngtggggggtgaggttaangtagtntgtgcgcgatagtcgtacgagcgggtaggtagagggaagaggtagggggagncggtngagtggtgttggggggtggtgggggtggtggtggggggagggggtcgacgacgcgaggcgggggggggagagagggggaggcgggggcggtgaaaaggaagggagattaggtntggntggtagtgagggagggaggtgggtggtgcgttatcgtgcgattacgatgtttggcggcggggcgtgtgttcgnaagaggaggcgggtggtgggggggcgagtcgggggggcgggnggaagnnacggt

SEQ ID NO: 27446 - DNA, 757 bp, Artificial Sequence
  chemically treated genomic DNA (Homo sapiens) CpG-island No: 27446
  unsure (6..7, 13, 55, 128, 132, 245, 250, 302, 308, 326..327, 364)
  unsure (381, 392, 401, 403, 464..465, 468, 487, 513, 525, 580, 601)
  unsure (615, 645..646, 697, 701, 715, 721, 728, 731, 752)
accgtnncttccncccgcccccccgactcgcccccccaccacccgcctcctcttncgaacacacgccccgccgccaaacatcgtaatcgcacgataacgcaccacccacctccctccctcactaccanccanacctaatctcccttccttttcaccgcccccgcctccccctctctcccccccccgcctcgcgtcgtcgaccccctccccccaccaccacccccaccaccccccaacaccactcnaccgnctccccctacctcttccctctacctacccgctcgtacgactatcgcgcacanactacnttaacctcaccccccacnnccctcaccacacactctcacccccacgcccgcgcaanccacctcacctcccccntcctctcacancgccgtcancnatcgccacaccgaccccgcccccctcccgctcctccgcgattcgaaacccgcgaccgcccnncanccccccccccgctcgcccncatacgaacgtttactaaatctcccnctcaccgacccnccactcaccctcacctaccatacttatatcatatccctcgccccccccccacccncccccgaccgcccccacgcgncgaaacccaccccnctcccccccccaaacccacgcctcaactcnnacccccaccaccaacccccccccccccgacccttcaccccccctcttaccnctcncgcccctcgcctcntaccgncgactcncancaaccacccacccgcccccgnctttc

SEQ ID NO: 27447 - DNA, 757 bp, Artificial Sequence
  chemically treated genomic DNA (Homo sapiens) CpG-island No: 27447
  unsure (6..7, 13, 55, 128, 132, 245, 250, 302, 308, 326..327, 364)
  unsure (381, 392, 401, 403, 464..465, 468, 487, 513, 525, 580, 601)
  unsure (615, 645..646, 697, 701, 715, 721, 728, 731, 752)
gtcgtnntttttnttcgttttttcggttcgtttttttattattcgtttttttttncgggtatacgtttcgtcgttagatatcgtagtcgtacgataacgtattatttattttttttttttattattanttanatttaatttttttttttttttatcgttttcgtttttttttttttttttttttcgtttcgcgtcgtcggttttttttttttattattatttttattattttttagtattatttnatcgnttttttttattttttttttttgtttgttcgttcgtgcggttgtcgcgtatanattgtnttaattttattttttatnntttttattatatatttttatttttacgttcgcgtagnttattttattttttttntttttttatancgtcgttantnatcgttatatcggtttcgtttttttttcgttttttcgcggttcggagttcgcggtcgtttnntantttttttttcgttcgtttntatgcgagcgtttattgggttttttntttatcggtttnttatttatttttatttattatatttgtattatgtttttcgttttttttttatttnttttcggtcgtttttacgcgncggggtttattttntttttttttttaaatttacgttttaatttnnatttttattattagttttttttttttcgattttttatttttttttttattntttncgtttttcgttttntgtcgncgatttntantagttatttattcgttttcgnttttt

SEQ ID NO: 27448 - DNA, 757 bp, Artificial Sequence
  chemically treated genomic DNA (Homo sapiens) CpG-island No: 27448
  unsure (6, 27, 30, 37, 43, 57, 61, 112..113, 143, 157, 178, 233, 245)
  unsure (271, 290, 293..294, 355, 357, 366, 377, 394, 431..432, 450)
  unsure (456, 508, 513, 626, 630, 703, 745, 751..)
aaaaancgaaaacgaataaataactantanaaatcgncgacanaaaacgaaaaacgnaaanaataaaaaaaaaaataaaaaatcgaaaaaaaaaaaactaataataaaaatnnaaattaaaacgtaaatttaaaaaaaaaaanaaaataaaccccgncgcgtaaaaacgaccgaaaanaaataaaaaaaaaacgaaaaacataatacaaatataataaataaaaataaataanaaaccgataaanaaaaaacccaataaacgctcgcatanaaacgaacgaaaaaaaaantannaaacgaccgcgaactccgaaccgcgaaaaaacgaaaaaaaaacgaaaccgatataacgatnantaacgacgntataaaaaaanaaaaaaaataaaataanctacgcgaacgtaaaaataaaaatatataataaaaannataaaaaataaaattaanacaatntatacgcgacaaccgcacgaacgaacaaacaaaaaaaaaaaataaaaaaaancgatnaaataatactaaaaaataataaaaataataataaaaaaaaaaaaccgacgacgcgaaacgaaaaaaaaaaaaaaaaaaaaacgaaaacgataaaaaaaaaaaaaaattaaatntaantaataataaaaaaaaaaaataaataatacgttatcgtacgactacgatatctaacgacgaaacgtatacccgnaaaaaaaaacgaataataaaaaaacgaaccgaaaaaacgaanaaaaannacgac

SEQ ID NO: 27449 - DNA, 712 bp, Artificial Sequence
  chemically treated genomic DNA (Homo sapiens) CpG-island No: 27449
  unsure (12, 33..34, 214, 241, 408, 411, 455, 501, 527, 529, 543, 577)
  unsure (598, 678, 698)
gcgggggcgggngggcgggggggcggggtcggnncggggggggggcggcggggtcgcgggtcggggggtcgcgcgttcgggcggttcggcgggggtttcgtcgcggggcggggtttcgggggcgtcgtcggcgcggcgggggggcggcgggcgcggcgcggcgggggcgtcgcgggggcgggcgcgcgcggggcgtcggtcgcggggcgggggntcggcgcgcggcgcgggggcgcggcgngtcggggcggggcggcggcggttcggcgttcggggcgcggggcggggcgtcggcggggcgcgcggcggcgggggttcgcggcgcgcgcgggggggggggttcggcgcgcggtcgcgggggggggttcggggcggcggggcgggacggcgcgcggggggcggggcggncgngcgggcgggcggttcgggcggggggcgagggcggggcggagcgncggcgcggagcggcgcgggcggcgggtcggcggggcgcgcgcggtngcggcggcggcgcgcggagcgggcgngngcggggcgggcggnggcgtcgcggagcggtcgggcgcggcgggcgggnggtataggggggagcgcgttncggcggcgcgggggcgcgcgcgcgcgcgcgcgcgcgggcggcggtcggggggtcgcgcggaggacggcggcggcgggcgncggcgcgggcggggcgggtngcgggcgcgcgcga

SEQ ID NO: 27450 - DNA, 712 bp, Artificial Sequence
  chemically treated genomic DNA (Homo sapiens) CpG-island No: 27450
  unsure (15, 35, 115, 136, 170, 184, 186, 212, 258, 302, 305, 472)
  unsure (499, 679..680, 701)
tcgcgcgcgcccgcnacccgccccgcccgcgccgncgcccgccgccgccgtcctccgcgcgaccccccgaccgccgcccgcgcgcgcgcgcgcgcgcgcgcccccgcgccgccgnaacgcgctcccccctataccncccgcccgccgcgcccgaccgctccgcgacgccnccgcccgccccgcncncgcccgctccgcgcgccgccgccgcnaccgcgcgcgccccgccgacccgccgcccgcgccgctccgcgccgncgctccgccccgccctcgccccccgcccgaaccgcccgcccgcncgnccgccccgccccccgcgcgccgtcccgccccgccgccccgaacccccccccgcgaccgcgcgccgaacccccccccccgcgcgcgccgcgaacccccgccgccgcgcgccccgccgacgccccgccccgcgccccgaacgccgaaccgccgccgccccgccccgacncgccgcgcccccgcgccgcgcgccgancccccgccccgcgaccgacgccccgcgcgcgcccgcccccgcgacgcccccgccgcgccgcgcccgccgcccccccgccgcgccgacgacgcccccgaaaccccgccccgcgacgaaacccccgccgaaccgcccgaacgcgcgaccccccgacccgcgaccccgccgccccccccccgnnccgaccccgcccccccgcccncccgcccccgc

SEQ ID NO: 27451 - DNA, 712 bp, Artificial Sequence
  chemically treated genomic DNA (Homo sapiens) CpG-island No: 27451
  unsure (15, 35, 115, 136, 170, 184, 186, 212, 258, 302, 305, 472)
  unsure (499, 679..680, 701)
tcgcgcgcgttcgtngttcgtttcgttcgcgtcgncgttcgtcgtcgtcgtttttcgcgcggtttttcggtcgtcgttcgcgcgcgcgcgcgcgcgcgcgttttcgcgtcgtcgnggcgcgtttttttttgtgttnttcgttcgtcgcgttcggtcgtttcgcggcgttntcgttcgtttcgtntncgttcgtttcgcgcgtcgtcgtcgtngtcgcgcgcgtttcgtcggttcgtcgttcgcgtcgtttcgcgtcgncgtttcgtttcgttttcgtttttcgttcgggtcgttcgttcgtncgntcgtttcgtttttcgcgcgtcgtttcgtttcgtcgtttcgggttttttttcgcggtcgcgcgtcgggttttttttttcgcgcgcgtcgcgggttttcgtcgtcgcgcgtttcgtcggcgtttcgtttcgcgtttcgggcgtcgggtcgtcgtcgtttcgtttcggtncgtcgcgttttcgcgtcgcgcgtcggnttttcgtttcgcggtcggcgtttcgcgcgcgttcgttttcgcggcgttttcgtcgcgtcgcgttcgtcgttttttcgtcgcgtcggcggcgttttcggggtttcgtttcgcggcggggttttcgtcgggtcgttcgggcgcgcggtttttcggttcgcggtttcgtcgtttttttttcgnntcggtttcgttttttcgtttnttcgttttcgt

SEQ ID NO: 27452 - DNA, 712 bp, Artificial Sequence
  chemically treated genomic DNA (Homo sapiens) CpG-island No: 27452
  unsure (12, 33..34, 214, 241, 408, 411, 455, 501, 527, 529, 543, 577)
  unsure (598, 678, 698)
acgaaaacgaanaaacgaaaaaacgaaaccganncgaaaaaaaaacgacgaaaccgcgaaccgaaaaaccgcgcgcccgaacgacccgacgaaaaccccgccgcgaaacgaaaccccgaaaacgccgccgacgcgacgaaaaaacgacgaacgcgacgcgacgaaaacgccgcgaaaacgaacgcgcgcgaaacgccgaccgcgaaacgaaaanccgacgcgcgacgcgaaaacgcgacgnaccgaaacgaaacgacgacgacccgacgcccgaaacgcgaaacgaaacgccgacgaaacgcgcgacgacgaaaacccgcgacgcgcgcgaaaaaaaaaacccgacgcgcgaccgcgaaaaaaaacccgaaacgacgaaacgaaacgacgcgcgaaaaacgaaacgancgnacgaacgaacgacccgaacgaaaaacgaaaacgaaacgaaacgncgacgcgaaacgacgcgaacgacgaaccgacgaaacgcgcgcgacnacgacgacgacgcgcgaaacgaacgnanacgaaacgaacganaacgccgcgaaacgaccgaacgcgacgaacgaanaacacaaaaaaaaacgcgccncgacgacgcgaaaacgcgcgcgcgcgcgcgcgcgcgaacgacgaccgaaaaaccgcgcgaaaaacgacgacgacgaacgncgacgcgaacgaaacgaacnacgaacgcgcgcga

SEQ ID NO: 27453 - DNA, 668 bp, Artificial Sequence
  chemically treated genomic DNA (Homo sapiens) CpG-island No: 27453
  unsure (29, 71, 74, 80, 120, 131, 219, 232, 260, 318, 429, 463..464)
  unsure (471..472, 493..494, 547..548, 557)
gcgtttcggcgcggcgcggggggcgcgtngtcgggggcgggtcggggttcgcgcggcggcgcgcggcgcgncgncgggtngggggggcggggggggcgggggcggttcgcgggcggtcgnggggggggggncgcgcgtcgtttcgcgttttcgggggggcgcgcgggcgtcgcggcgcgcggtcgggcgcgcgtcgcggggggtcgtcgcggtcggggncggcgcgggtttncgtcgggtcgcggcggggcgcgggcgtncggcgggcgcgcgtcggggcggcggggcgggtcggcgcggcgggcgcggcgcggcgtnggcggtcgcgcggggggtcgggcgcggcgggggttcggggcgcgggtcgggcgggcgtcgggacgaagaatagagaagaaagaatattttttttggggggggggggggatnaattttcgggggagaggagaaagaatattttttnngggcggnnggggcggttaagaatataatnncgcggggcggcggcgcggggggtcgcgcgggcgcggggggcgtaggcgggcgnngcgggcgtngcggcggcgcgcgtggggtgggcggcggcggggcggcgcggggtcggcgcggtcgggcgcgttcgtcgcggggcggggcggggcggggggtcgcgcgcggcggggcggcgt

SEQ ID NO: 27454 - DNA, 668 bp, Artificial Sequence
  chemically treated genomic DNA (Homo sapiens) CpG-island No: 27454
  unsure (112, 121..122, 175..176, 197..198, 205..206, 240, 351, 409)
  unsure (437, 450, 538, 549, 589, 595, 598, 640)
acgccgccccgccgcgcgcgaccccccgccccgccccgccccgcgacgaacgcgcccgaccgcgccgaccccgcgccgccccgccgccgcccaccccacgcgcgccgccgcnacgcccgcnncgcccgcctacgccccccgcgcccgcgcgaccccccgcgccgccgccccgcgnnattatattcttaaccgccccnnccgcccnnaaaaaatattctttctcctctcccccgaaaattnatccccccccccccccaaaaaaaatattctttcttctctattcttcgtcccgacgcccgcccgacccgcgccccgaacccccgccgcgcccgaccccccgcgcgaccgccnacgccgcgccgcgcccgccgcgccgacccgccccgccgccccgacgcgcgcccgccgnacgcccgcgccccgccgcgacccgacgnaaacccgcgccgnccccgaccgcgacgaccccccgcgacgcgcgcccgaccgcgcgccgcgacgcccgcgcgcccccccgaaaacgcgaaacgacgcgcgnccccccccccncgaccgcccgcgaaccgcccccgccccccccgcccccccnacccgncgncgcgccgcgcgccgccgcgcgaaccccgacccgcccccgacnacgcgccccccgcgccgcgccgaaacgc

SEQ ID NO: 27455 - DNA, 668 bp, Artificial Sequence
  chemically treated genomic DNA (Homo sapiens) CpG-island No: 27455
  unsure (112, 121..122, 175..176, 197..198, 205..206, 240, 351, 409)
  unsure (437, 450, 538, 549, 589, 595, 598, 640)
gcgtcgtttcgtcgcgcgcggtttttcgtttcgtttcgtttcgcggcgggcgcgttcggtcgcgtcggtttcgcgtcgtttcgtcgtcgtttattttacgcgcgtcgtcgtngcgttcgtnncgttcgtttgcgtttttcgcgttcgcgcggtttttcgcgtcgtcgtttcgcgnngttgtgtttttggtcgttttnntcgtttnnaaaaaatatttttttttttttttttcgggggttngtttttttttttttttaaaaaaaatatttttttttttttgtttttcgtttcggcgttcgttcggttcgcgtttcgggttttcgtcgcgttcggtttttcgcgcggtcgttngcgtcgcgtcgcgttcgtcgcgtcggttcgtttcgtcgtttcggcgcgcgttcgtcgngcgttcgcgtttcgtcgcggttcggcgngggttcgcgtcgntttcggtcgcggcggtttttcgcggcgcgcgttcggtcgcgcgtcgcggcgttcgcgcgttttttcgggggcgcggggcggcgcgcgnttttttttttncggtcgttcgcgggtcgttttcgtttttttcgtttttttngttcgncgncgcgtcgcgcgtcgtcgcgcgggtttcggttcgttttcggtngcgcgtttttcgcgtcgcgtcggggcgt

SEQ ID NO: 27456 - DNA, 668 bp, Artificial Sequence
  chemically treated genomic DNA (Homo sapiens) CpG-island No: 27456
  unsure (29, 71, 74, 80, 120, 131, 219, 232, 260, 318, 429, 463..464)
  unsure (471..472, 493..494, 547..548, 557)
acgccccgacgcgacgcgaaaaacgcgcnaccgaaaacgaaccgaaacccgcgcgacgacgcgcgacgcgncgncgaacnaaaaaaacgaaaaaaacgaaaacgacccgcgaacgaccgnaaaaaaaaaancgcgcgccgccccgcgcccccgaaaaaacgcgcgaacgccgcgacgcgcgaccgaacgcgcgccgcgaaaaaccgccgcgaccgaaancgacgcgaacccncgccgaaccgcgacgaaacgcgaacgcncgacgaacgcgcgccgaaacgacgaaacgaaccgacgcgacgaacgcgacgcgacgcnaacgaccgcgcgaaaaaccgaacgcgacgaaaacccgaaacgcgaaccgaacgaacgccgaaacgaaaaacaaaaaaaaaaaaatattttttttaaaaaaaaaaaaaaacnaacccccgaaaaaaaaaaaaaaaaatattttttnnaaacgannaaaacgaccaaaaacacaacnncgcgaaacgacgacgcgaaaaaccgcgcgaacgcgaaaaacgcaaacgaacgnnacgaacgcnacgacgacgcgcgtaaaataaacgacgacgaaacgacgcgaaaccgacgcgaccgaacgcgcccgccgcgaaacgaaacgaaacgaaaaaccgcgcgcgacgaaacgacgc

SEQ ID NO: 27457 - DNA, 630 bp, Artificial Sequence
  chemically treated genomic DNA (Homo sapiens) CpG-island No: 27457
  unsure (98, 152, 160, 238, 243, 277, 294, 312, 372, 455, 575, 609)
  unsure (612, 626)
cgcggcgtttttcgtcgttcgcgttcgcgcgcgcgggggttcgtcggtttcgtcgttcgttttcgcgcggcgggcgcgcgtcgtttttcgttcgcgtnttcgttcggcgcggcgtcgggcgttcgcggtcgggtttcgttcgttcgttcggntttttcgncggtttttcgttttcggcgtcggtcgtcgtttcgtttcgcgggttttcggttcggtttttcgtcggtcgttcgttcgntcggntcgcgcggggcgcgcgcgggcgcgtcggtttcgnttttttcgtttcgcgtngcgtcgcgcgcgcgtttncgtcgcgcgcgttcgcgcgcgcgcgttcgtagtttcgtcgcgcggcggtcgggtcggggngtcgtcgggcggcggtcgcggcgcgcgtcggggggaggggagcggcgcgcggcgcggcggcggcgcggttcggcgggtcgttngggggcgcggggcgcggttcgcggtcggggcggggttcggcggggcgtttttcgtcgggtacgtcgcgcgttttcgcgggcggcgcgcgcgggcgcggcgcgcggtcgtcgcgtcgcggngtcgggcgcgttcgcgcggtcgggcgcgcgtttnggntcggtcgggcgcgncggg

SEQ ID NO: 27458 - DNA, 630 bp, Artificial Sequence
  chemically treated genomic DNA (Homo sapiens) CpG-island No: 27458
  unsure (5, 19, 22, 56, 176, 259, 319, 337, 354, 388, 393, 471, 479)
  unsure (533)
cccgncgcgcccgaccganccnaaacgcgcgcccgaccgcgcgaacgcgcccgacnccgcgacgcgacgaccgcgcgccgcgcccgcgcgcgccgcccgcgaaaacgcgcgacgtacccgacgaaaaacgccccgccgaaccccgccccgaccgcgaaccgcgccccgcgcccccnaacgacccgccgaaccgcgccgccgccgcgccgcgcgccgctcccctccccccgacgcgcgccgcgaccgccgcccgacgacnccccgacccgaccgccgcgcgacgaaactacgaacgcgcgcgcgcgaacgcgcgcgacgnaaacgcgcgcgcgacgcnacgcgaaacgaaaaaancgaaaccgacgcgcccgcgcgcgccccgcgcganccgancgaacgaacgaccgacgaaaaaccgaaccgaaaacccgcgaaacgaaacgacgaccgacgccgaaaacgaaaaaccgncgaaaaanccgaacgaacgaacgaaacccgaccgcgaacgcccgacgccgcgccgaacgaanacgcgaacgaaaaacgacgcgcgcccgccgcgcgaaaacgaacgacgaaaccgacgaacccccgcgcgcgcgaacgcgaacgacgaaaaacgccgcg

SEQ ID NO: 27459 - DNA, 630 bp, Artificial Sequence
  chemically treated genomic DNA (Homo sapiens) CpG-island No: 27459
  unsure (5, 19, 22, 56, 176, 259, 319, 337, 354, 388, 393, 471, 479)
  unsure (533)
ttcgncgcgttcggtcggnttngggcgcgcgttcggtcgcgcgggcgcgttcggtntcgcggcgcggcggtcgcgcgtcgcgttcgcgcgcgtcgttcgcgggggcgcgcggcgtgttcggcggggggcgtttcgtcgggtttcgtttcggtcgcgggtcgcgtttcgcgtttttnggcggttcgtcgggtcgcgtcgtcgtcgcgtcgcgcgtcgttttttttttttcggcgcgcgtcgcggtcgtcgttcggcggtntttcggttcggtcgtcgcgcggcggggttgcgggcgcgcgcgcgcgggcgcgcgcggcgngggcgcgcgcgcggcgtngcgcggggcgggggggncggggtcggcgcgttcgcgcgcgtttcgcgcggntcggncgggcgggcggtcggcggggggtcgggtcgggggttcgcggggcggggcggcggtcggcgtcgggggcggggggtcgncggggggntcgggcgggcgggcggggttcggtcgcgggcgttcggcgtcgcgtcgggcgggngcgcgggcggggggcggcgcgcgttcgtcgcgcgggggcgggcggcggggtcggcgggttttcgcgcgcgcgggcgcgggcggcggggggcgtcgcg

SEQ ID NO: 27460 - DNA, 630 bp, Artificial Sequence
  chemically treated genomic DNA (Homo sapiens) CpG-island No: 27460
  unsure (98, 152, 160, 238, 243, 277, 294, 312, 372, 455, 575, 609)
  unsure (612, 626)
cgcgacgccccccgccgcccgcgcccgcgcgcgcgaaaacccgccgaccccgccgcccgcccccgcgcgacgaacgcgcgccgccccccgcccgcgcncccgcccgacgcgacgccgaacgcccgcgaccgaaccccgcccgcccgcccganccccccgncgaccccccgcccccgacgccgaccgccgccccgccccgcgaacccccgacccgaccccccgccgaccgcccgcccgnccganccgcgcgaaacgcgcgcgaacgcgccgaccccgncccccccgccccgcgcnacgccgcgcgcgcgcccncgccgcgcgcgcccgcgcgcgcgcgcccgcaaccccgccgcgcgacgaccgaaccgaaanaccgccgaacgacgaccgcgacgcgcgccgaaaaaaaaaaaacgacgcgcgacgcgacgacgacgcgacccgacgaaccgccnaaaaacgcgaaacgcgacccgcgaccgaaacgaaacccgacgaaacgccccccgccgaacacgccgcgcgcccccgcgaacgacgcgcgcgaacgcgacgcgcgaccgccgcgccgcganaccgaacgcgcccgcgcgaccgaacgcgcgcccnaanccgaccgaacgcgncgaa

SEQ ID NO: 27461 - DNA, 626 bp, Artificial Sequence
  chemically treated genomic DNA (Homo sapiens) CpG-island No: 27461
  unsure (1, 6..7, 128, 270, 349, 376, 569, 619)
ncgcgnngggtcgtcgcgttcgtttcgcgggggggcgcgcggcgcgtcgcgcgtcggcggggtcgcgtcggggggcggcgggggtggtggcggtgtgcgtggtcgggcggtttcgcgttcgttcgcgngcgggcggggtcgcggttcggcggtcggcgggtcggtcgggcgtcggcgttcgcgcgcgcgcgcgggcgggcggcgcgtcgcgtcgggcggcggttcgtcgtcgcgcgtcggggtcgcgggcggtgtcgggtttcgtcgcgngcgggggtcggtcgtcggcgtcgcgtcgtcgcgtcggcgttcgcgggttcgcggcgtcgcggcgtcgggggcgtcggtncggggcgtcggtcgcgcggggcggggnggtcgcgggggcggggggcgggcgcgcggcgcgcgggggcgcggtcgggggtcgttcggggcggcggcggggcgggggcgcgggcgtcggcgcgggttcgcgtcggggggggcgcgtcggtcgtcgtcgcggggcggggggcgcggcgcggcgtcgcggtcggggcggcggggggtcggcgcgggcggcgggngggcgcggcggcggggcgttcggtcgtcgcgcgcgggggtcgggtagcgngaggtcg

SEQ ID NO: 27462 - DNA, 626 bp, Artificial Sequence
  chemically treated genomic DNA (Homo sapiens) CpG-island No: 27462
  unsure (8, 58, 251, 278, 357, 499, 620..621, 626)
cgacctcncgctacccgacccccgcgcgcgacgaccgaacgccccgccgccgcgcccncccgccgcccgcgccgaccccccgccgccccgaccgcgacgccgcgccgcgccccccgccccgcgacgacgaccgacgcgccccccccgacgcgaacccgcgccgacgcccgcgcccccgccccgccgccgccccgaacgacccccgaccgcgcccccgcgcgccgcgcgcccgccccccgcccccgcgaccnccccgccccgcgcgaccgacgccccgnaccgacgcccccgacgccgcgacgccgcgaacccgcgaacgccgacgcgacgacgcgacgccgacgaccgacccccgcncgcgacgaaacccgacaccgcccgcgaccccgacgcgcgacgacgaaccgccgcccgacgcgacgcgccgcccgcccgcgcgcgcgcgcgaacgccgacgcccgaccgacccgccgaccgccgaaccgcgaccccgcccgcncgcgaacgaacgcgaaaccgcccgaccacgcacaccgccaccacccccgccgccccccgacgcgaccccgccgacgcgcgacgcgccgcgcgcccccccgcgaaacgaacgcgacgacccnncgcgn

SEQ ID NO: 27463 - DNA, 626 bp, Artificial Sequence
  chemically treated genomic DNA (Homo sapiens) CpG-island No: 27463
  unsure (8, 58, 251, 278, 357, 499, 620..621, 626)
cgattttncgttgttcgattttcgcgcgcggcgatcgggcgtttcgtcgtcgcgtttnttcgtcgttcgcgtcggtttttcgtcgtttcggtcgcggcgtcgcgtcgcgtttttcgtttcgcggcggcgatcggcgcgtttttttcgacgcgggttcgcgtcggcgttcgcgttttcgtttcgtcgtcgtttcgagcggttttcggtcgcgttttcgcgcgtcgcgcgttcgtttttcgttttcgcggttntttcgtttcgcgcggtcggcgtttcgngtcggcgttttcggcgtcgcggcgtcgcgggttcgcgggcgtcggcgcggcggcgcggcgtcggcggtcggttttcgtncgcggcggggttcggtatcgttcgcggtttcggcgcgcggcggcgagtcgtcgttcggcgcggcgcgtcgttcgttcgcgcgcgcgcgcgggcgtcggcgttcggtcggttcgtcggtcgtcgggtcgcggtttcgttcgtncgcgggcgggcgcggggtcgttcggttacgtatatcgttattattttcgtcgtttttcggcgcggtttcgtcggcgcgcggcgcgtcgcgcgttttttcgcggggcgggcgcggcggtttnncgcgn

SEQ ID NO: 27464 - DNA, 626 bp, Artificial Sequence
  chemically treated genomic DNA (Homo sapiens) CpG-island No: 27464
  unsure (1, 6..7, 128, 270, 349, 376, 569, 619)
ncgcgnnaaaccgccgcgcccgccccgcgaaaaaacgcgcgacgcgccgcgcgccgacgaaaccgcgccgaaaaacgacgaaaataataacgatatacgtaaccgaacgaccccgcgcccgcccgcgnacgaacgaaaccgcgacccgacgaccgacgaaccgaccgaacgccgacgcccgcgcgcgcgcgcgaacgaacgacgcgccgcgccgaacgacgactcgccgccgcgcgccgaaaccgcgaacgataccgaaccccgccgcgnacgaaaaccgaccgccgacgccgcgccgccgcgccgacgcccgcgaacccgcgacgccgcgacgccgaaaacgccgacncgaaacgccgaccgcgcgaaacgaaanaaccgcgaaaacgaaaaacgaacgcgcgacgcgcgaaaacgcgaccgaaaaccgctcgaaacgacgacgaaacgaaaacgcgaacgccgacgcgaacccgcgtcgaaaaaaacgcgccgatcgccgccgcgaaacgaaaaacgcgacgcgacgccgcgaccgaaacgacgaaaaaccgacgcgaacgacgaanaaacgcgacgacgaaacgcccgatcgccgcgcgcgaaaatcgaacaacgnaaaatcg

SEQ ID NO: 27465 - DNA, 527 bp, Artificial Sequence
  chemically treated genomic DNA (Homo sapiens) CpG-island No: 27465
gagttcgggtttttatatgaatcgtttagggtgtttttttcggagtagttgagggttttgtggtcgtcgtcgttggtttggcgtcgtttggtcggaggggcgattttcggggtttcgttggggggtaatacgcgtttttatgtatcgtaggagtcggtcgtcggtgtattggtcggggttgcgggtacgggcgttggttttcgtttgtttacgggaaaggggaatattacggcgggatttacgtattcggcggtcgggtgtgcgagttttgcgggtatggcggtttggcgcggtcgtatttcgtaggcgcgtcgtggcggggattcgtagtttggcgcggcggttttcgtgtattgggcggtggaatcgcggttggcggtttcggtcgtgttgtagtttttcgtttacggcgcgttttagtttttcgcgggcggagaagtcgttttatatgtagttttggaggatgatcgggttggggtgaggttatttagtttttttaggtcgaacgcgtttttttcggtcgggtt

SEQ ID NO: 27466 - DNA, 527 bp, Artificial Sequence
  chemically treated genomic DNA (Homo sapiens) CpG-island No: 27466
aacccgaccgaaaaaaacgcgttcgacctaaaaaaactaaataacctcaccccaacccgatcatcctccaaaactacatataaaacgacttctccgcccgcgaaaaactaaaacgcgccgtaaacgaaaaactacaacacgaccgaaaccgccaaccgcgattccaccgcccaatacacgaaaaccgccgcgccaaactacgaatccccgccacgacgcgcctacgaaatacgaccgcgccaaaccgccatacccgcaaaactcgcacacccgaccgccgaatacgtaaatcccgccgtaatattcccctttcccgtaaacaaacgaaaaccaacgcccgtacccgcaaccccgaccaatacaccgacgaccgactcctacgatacataaaaacgcgtattaccccccaacgaaaccccgaaaatcgcccctccgaccaaacgacgccaaaccaacgacgacgaccacaaaaccctcaactactccgaaaaaaacaccctaaacgattcatataaaaacccgaactc

SEQ ID NO: 27467 - DNA, 527 bp, Artificial Sequence
  chemically treated genomic DNA (Homo sapiens) CpG-island No: 27467
agttcggtcgaggaggacgcgttcggtttggggggattgggtggttttattttaattcggttattttttaggattgtatgtggagcggttttttcgttcgcgagaagttggagcgcgtcgtgagcgagaagttgtagtacggtcggggtcgttaatcgcggttttatcgtttagtatacgggagtcgtcgcgttagattgcgggttttcgttacggcgcgtttgcgggatgcggtcgcgttaggtcgttatgttcgtagagttcgtatattcggtcgtcgagtgcgtggatttcgtcgtggtatttttttttttcgtgaataagcgagagttagcgttcgtgttcgtagtttcggttagtgtatcggcggtcggtttttgcggtgtataggggcgcgtattgttttttagcggggtttcgggggtcgttttttcggttaggcggcgttagattagcggcggcgattataaggtttttagttatttcggagaggatattttgagcgatttatgtaaagattcgaattt

SEQ ID NO: 27468 - DNA, 527 bp, Artificial Sequence
  chemically treated genomic DNA (Homo sapiens) CpG-island No: 27468
aaattcgaatctttacataaatcgctcaaaatatcctctccgaaataactaaaaaccttataatcgccgccgctaatctaacgccgcctaaccgaaaaaacgacccccgaaaccccgctaaaaaacaatacgcgcccctatacaccgcaaaaaccgaccgccgatacactaaccgaaactacgaacacgaacgctaactctcgcttattcacgaaaaaaaaaaataccacgacgaaatccacgcactcgacgaccgaatatacgaactctacgaacataacgacctaacgcgaccgcatcccgcaaacgcgccgtaacgaaaacccgcaatctaacgcgacgactcccgtatactaaacgataaaaccgcgattaacgaccccgaccgtactacaacttctcgctcacgacgcgctccaacttctcgcgaacgaaaaaaccgctccacatacaatcctaaaaaataaccgaattaaaataaaaccacccaatccccccaaaccgaacgcgtcctcctcgaccgaact

SEQ ID NO: 27469 - DNA, 913 bp, Artificial Sequence
  chemically treated genomic DNA (Homo sapiens) CpG-island No: 27469
  unsure (202)
atgtcgggcggtaaggtttcgttattttggtcggtttcgggcggaggaagaagaggaggcgtttagattggatattcgtttggattcggagtcgcggtattatttttagttcgttttacgttcgttagttttagacggttcgggtttcggtttcgtttttttttttcgaaagttcggttttcggtgcggggattaaattttntttcgcgggttttaagtttcggtttttggtttcgtttttcgcgttttcgttttcgttttcgttttcgtttcgtttaggcgcgggattattttttcgtttcgaggcggggtttagcgcgttcggtattttcggcggttcgggtttttcgttattatcgtcgtcgtcgtcgtcgtgagtttcgcggagtcgcgcgcgttttcgttgggtcgagcgttggtcgacgagcggagttttaggagtttgcggagacgttatgcgagttaggtaggtaggcggcggcggggaggtttcgggcggtagagtttgggggtcggcgggggcgcggggtcgtgttcgggggttttgtaattttttgcgggcgtagatcgtgtcgcgggcgtcgatcgtgttatcgtcgtttgagttcgggttgcgcgggtgtttgggcgtggggcgtttcggggaagttttcgcgcgttttttcgtcggtttttttcgggcgttcgggtttttttggtgttggtgggtagggattcggttcggggtttcgggcgtcgagtcgtacgttcgcgtgcgttcgggtcgttttttaatttcggttttggttatttttcggcgggcggtttgcggggtggtttttttgggtaatcggacgcgttttcgggcgtaaatcggggggcgcgttcggtttacgggggcgtgggggttacgggagggcgtggaggggtcggg

SEQ ID NO: 27470 - DNA, 913 bp, Artificial Sequence
  chemically treated genomic DNA (Homo sapiens) CpG-island No: 27470
  unsure (712)
cccgacccctccacgccctcccgtaacccccacgcccccgtaaaccgaacgcgccccccgatttacgcccgaaaacgcgtccgattacccaaaaaaaccaccccgcaaaccgcccgccgaaaaataaccaaaaccgaaattaaaaaacgacccgaacgcacgcgaacgtacgactcgacgcccgaaaccccgaaccgaatccctacccaccaacaccaaaaaaacccgaacgcccgaaaaaaaccgacgaaaaaacgcgcgaaaacttccccgaaacgccccacgcccaaacacccgcgcaacccgaactcaaacgacgataacacgatcgacgcccgcgacacgatctacgcccgcaaaaaattacaaaacccccgaacacgaccccgcgcccccgccgacccccaaactctaccgcccgaaacctccccgccgccgcctacctacctaactcgcataacgtctccgcaaactcctaaaactccgctcgtcgaccaacgctcgacccaacgaaaacgcgcgcgactccgcgaaactcacgacgacgacgacgacgataataacgaaaaacccgaaccgccgaaaataccgaacgcgctaaaccccgcctcgaaacgaaaaaataatcccgcgcctaaacgaaacgaaaacgaaaacgaaaacgaaaacgcgaaaaacgaaaccaaaaaccgaaacttaaaacccgcgaaanaaaatttaatccccgcaccgaaaaccgaactttcgaaaaaaaaaaacgaaaccgaaacccgaaccgtctaaaactaacgaacgtaaaacgaactaaaaataataccgcgactccgaatccaaacgaatatccaatctaaacgcctcctcttcttcctccgcccgaaaccgaccaaaataacgaaaccttaccgcccgacat

SEQ ID NO: 27471 - DNA, 913 bp, Artificial Sequence
  chemically treated genomic DNA (Homo sapiens) CpG-island No: 27471
  unsure (712)
ttcgatttttttacgttttttcgtggtttttacgttttcgtgagtcgagcgcgtttttcgatttgcgttcgaggacgcgttcggttgtttagggaggttatttcgtaggtcgttcgtcgggaagtggttagagtcggggttggggggcggttcgagcgtacgcgagcgtgcggttcggcgttcggaatttcgggtcgggtttttgtttattagtattagggagattcgagcgttcgggaggagtcggcgagggggcgcgcgaaggttttttcgaagcgttttacgtttaggtattcgcgtagttcgaatttaggcggcggtggtacgatcggcgttcgcggtacgatttgcgttcgtaaggagttgtaaagttttcgagtacgatttcgcgttttcgtcggtttttaggttttgtcgttcgaggttttttcgtcgtcgtttgtttatttggttcgtatggcgttttcgtaggtttttgaggtttcgttcgtcggttagcgttcggtttagcgggggcgcgcgcggtttcgcgggatttacggcggcggcggcggcggtagtggcgaggggttcggatcgtcgagagtgtcgggcgcgttgggtttcgtttcgggacggaagggtggtttcgcgtttgggcggggcgggggcgggggcgggggcgggggcgcggggggcggggttaggaatcggaatttaaggttcgcggaanggggtttggttttcgtatcgggggtcgggttttcggggagaaggggcgggatcggggttcgggtcgtttgaggttggcgagcgtggggcgggttgggggtggtgtcgcggtttcgggtttaggcgggtatttagtttgggcgttttttttttttttttcgttcggagtcggttagggtagcggggttttgtcgttcggtat

SEQ ID NO: 27472 - DNA, 913 bp, Artificial Sequence
  chemically treated genomic DNA (Homo sapiens) CpG-island No: 27472
  unsure (202)
ataccgaacgacaaaaccccgctaccctaaccgactccgaacgaaaaaaaaaaaaaaaacgcccaaactaaatacccgcctaaacccgaaaccgcgacaccacccccaacccgccccacgctcgccaacctcaaacgacccgaaccccgatcccgccccttctccccgaaaacccgacccccgatacgaaaaccaaaccccnttccgcgaaccttaaattccgattcctaaccccgccccccgcgcccccgcccccgcccccgcccccgccccgcccaaacgcgaaaccacccttccgtcccgaaacgaaacccaacgcgcccgacactctcgacgatccgaacccctcgccactaccgccgccgccgccgccgtaaatcccgcgaaaccgcgcgcgcccccgctaaaccgaacgctaaccgacgaacgaaacctcaaaaacctacgaaaacgccatacgaaccaaataaacaaacgacgacgaaaaaacctcgaacgacaaaacctaaaaaccgacgaaaacgcgaaatcgtactcgaaaactttacaactccttacgaacgcaaatcgtaccgcgaacgccgatcgtaccaccgccgcctaaattcgaactacgcgaatacctaaacgtaaaacgcttcgaaaaaaccttcgcgcgccccctcgccgactcctcccgaacgctcgaatctccctaatactaataaacaaaaacccgacccgaaattccgaacgccgaaccgcacgctcgcgtacgctcgaaccgccccccaaccccgactctaaccacttcccgacgaacgacctacgaaataacctccctaaacaaccgaacgcgtcctcgaacgcaaatcgaaaaacgcgctcgactcacgaaaacgtaaaaaccacgaaaaaacgtaaaaaaatcgaa

SEQ ID NO: 27473 - DNA, 924 bp, Artificial Sequence
  chemically treated genomic DNA (Homo sapiens) CpG-island No: 27473
cgagcggttacggagagttttgtaggtatcgatttttattttttttatagtcgtttcgggtacgtagaagtcgtttttgtaaggtttcgggggaggttgatttgcggaaaacgtatcgatcgcggttttcgggagtttcgtttcgtttcggggatgttaagtcgtttttttatttcgtagcggcgtcggtcgtttagatttgtttattttcgtcgggttagtcgttttttttcgtcgcgtcgatcgaggtcgtcgtagttcgattttatttttttaggtagtcgaggtcgtcgttgtcgtagttcgggttcgttttttaaagtttgggggaggtaggagcgttgcggaggtggatcggcgttatttcgtattcgcgttttttttttttgtttttttttttttttttttcggttttcgttcgcggtttttgcggcgttagagatttagtcgatttagtcgttcgcgtttaggttcgtttatcgcgtcgcgcgtggtttttgtaggtcgcgtttcgtttcggttcgtttcgttttcggtcgtttcgttatcgttttttttcggtgttttttttcggttgtagttggtcgttagcgtttgtcgggtgttagtttcgggtttagtttgggttggtggtaggtcgggagagggcgcggttttttagtttttgcgtagattgcggggtattaggtggggtcgaggcgacgtcgaacgtcggtaggtcggaaatcgcgtagtttcgttggatttcgttgattgtcggcggtatcggtggtttcgcgattttgaataggtgattttaatagttttaggagggtagcgagtttttcgcggaattattagataagttatgtttgaggttgtcgtagtttagtgggtagtcgtgaaatgtagatgcgtttttgttttttagatagtattttttat

SEQ ID NO: 27474 - DNA, 924 bp, Artificial Sequence
  chemically treated genomic DNA (Homo sapiens) CpG-island No: 27474
ataaaaaatactatctaaaaaacaaaaacgcatctacatttcacgactacccactaaactacgacaacctcaaacataacttatctaataattccgcgaaaaactcgctaccctcctaaaactattaaaatcacctattcaaaatcgcgaaaccaccgataccgccgacaatcaacgaaatccaacgaaactacgcgatttccgacctaccgacgttcgacgtcgcctcgaccccacctaataccccgcaatctacgcaaaaactaaaaaaccgcgccctctcccgacctaccaccaacccaaactaaacccgaaactaacacccgacaaacgctaacgaccaactacaaccgaaaaaaaacaccgaaaaaaaacgataacgaaacgaccgaaaacgaaacgaaccgaaacgaaacgcgacctacaaaaaccacgcgcgacgcgataaacgaacctaaacgcgaacgactaaatcgactaaatctctaacgccgcaaaaaccgcgaacgaaaaccgaaaaaaaaaaaaaaaaaaacaaaaaaaaaaaacgcgaatacgaaataacgccgatccacctccgcaacgctcctacctcccccaaactttaaaaaacgaacccgaactacgacaacgacgacctcgactacctaaaaaaataaaatcgaactacgacgacctcgatcgacgcgacgaaaaaaaacgactaacccgacgaaaataaacaaatctaaacgaccgacgccgctacgaaataaaaaaacgacttaacatccccgaaacgaaacgaaactcccgaaaaccgcgatcgatacgttttccgcaaatcaacctcccccgaaaccttacaaaaacgacttctacgtacccgaaacgactataaaaaaaataaaaatcgatacctacaaaactctccgtaaccgctcg

SEQ ID NO: 27475 - DNA, 924 bp, Artificial Sequence
  chemically treated genomic DNA (Homo sapiens) CpG-island No: 27475
atgaaagatgttatttgaggggtaaaggcgtatttgtattttacgattatttattaggttacgatagttttaagtatggtttatttggtagtttcgcgaagggttcgttgtttttttggagttattggagttatttgtttaaggtcgcgaaattatcggtgtcgtcggtaattagcgaggtttagcggggttgcgcggttttcggtttgtcggcgttcggcgtcgtttcggttttatttggtgtttcgtaatttgcgtaaaggttgggagatcgcgttttttttcgatttattattagtttaagttgggttcggaattaatattcgataagcgttggcggttagttgtagtcgggaaggagtatcggaaggaggcggtggcggggcggtcgagggcggagcgggtcggggcggggcgcggtttataaaagttacgcgcggcgcggtgggcgggtttgggcgcgagcggttgagtcggttgggtttttggcgtcgtagaggtcgcgggcgaggatcgggaggggagagggaggagataggaggaggagacgcgagtgcggggtggcgtcggtttattttcgtagcgtttttgttttttttaggttttggaaggcgggttcgggttgcggtagcggcggtttcggttgtttggggaggtgaagtcgggttgcggcggtttcggtcggcgcggcggagggaggcggttgattcggcgagggtgggtaggtttgggcggtcggcgtcgttgcgaggtggaggggcggtttggtattttcggggcggggcggggttttcgagggtcgcggtcggtgcgtttttcgtaggttagtttttttcggggttttgtagaagcggtttttgcgtattcggggcggttgtgggaagggtgggggtcggtgtttgtagggtttttcgtggtcgttcg

SEQ ID NO: 27476 - DNA, 924 bp, Artificial Sequence
  chemically treated genomic DNA (Homo sapiens) CpG-island No: 27476
cgaacgaccacgaaaaaccctacaaacaccgacccccacccttcccacaaccgccccgaatacgcaaaaaccgcttctacaaaaccccgaaaaaaactaacctacgaaaaacgcaccgaccgcgaccctcgaaaaccccgccccgccccgaaaataccaaaccgcccctccacctcgcaacgacgccgaccgcccaaacctacccaccctcgccgaatcaaccgcctccctccgccgcgccgaccgaaaccgccgcaacccgacttcacctccccaaacaaccgaaaccgccgctaccgcaacccgaacccgccttccaaaacctaaaaaaaacaaaaacgctacgaaaataaaccgacgccaccccgcactcgcgtctcctcctcctatctcctccctctcccctcccgatcctcgcccgcgacctctacgacgccaaaaacccaaccgactcaaccgctcgcgcccaaacccgcccaccgcgccgcgcgtaacttttataaaccgcgccccgccccgacccgctccgccctcgaccgccccgccaccgcctccttccgatactccttcccgactacaactaaccgccaacgcttatcgaatattaattccgaacccaacttaaactaataataaatcgaaaaaaaacgcgatctcccaacctttacgcaaattacgaaacaccaaataaaaccgaaacgacgccgaacgccgacaaaccgaaaaccgcgcaaccccgctaaacctcgctaattaccgacgacaccgataatttcgcgaccttaaacaaataactccaataactccaaaaaaacaacgaacccttcgcgaaactaccaaataaaccatacttaaaactatcgtaacctaataaataatcgtaaaatacaaatacgcctttacccctcaaataacatctttcat

SEQ ID NO: 27477 - DNA, 1291 bp, Artificial Sequence
  chemically treated genomic DNA (Homo sapiens) CpG-island No: 27477
  unsure (312, 333, 730, 840, 1131, 1168, 1206, 1285)
cgagagcgagagagaaatagggagggagagagggagggaggaaggaacggacggtatttttttttttaaaaaaaacgattcgttcgtcgtattttttaaaaataatagattacggcgtttcgtttttattatattaataatatatcgcgggcgtttttttgtcggattttattaaaaagaaatagtatgcggcggcgtcgttacgtttcgtattataatatatttacgtatacggcgcgcgtttcgttcgttttatttgtattaattataataaattatcgtattgtcgttcgttttttttgcgtttttttnatattaaatatcgttatttanattcgtacgtttatacgtaatttattttttttttgttgattatattaattaatcgcgattacgaatattacgttaatcgtttcgtttattattatacgttttatttttacgacggcgacgcgttacgcgtttattagttacgtttttacgttatttatttttatattacgacgtacgcgttttacggcgtcgtatattttttttttcgcgtttttatttttttaatattatattattgtattatatcgtttacgtcgtcggtatattttcgtttttttatttttatataagaattacgatatatattaacgttaattattcgatcgtttttttattattatacgttcgttattttttatattatcgtacgataagaatatttgcgtcgcgtcgtcgngttttttattttatggtatcgtttttattatattatatattaaaaatatatattattacgttgcgtacgtatatcgcgcgcggggttcgtattttgtatatatatatganagatatatttatcgataggtgttacggattcgcgtatcgattttatacgttttatttatatataaattataatatacgagaattcgacgcgtatcgcgatttcgcggcgtcgtcgattatatttattttatttttatttatatcgtttatttatttttatagttcgttttcgtatattgcgtatcgcgtttttattatattttttatttatgtatatgatttacgttttataatcgacgtttacgcgcgggagatttacgttcgcgtatcggttacgttatttttttatantggattattatttataaaatattattttcgcggtgangcgtttcgtttttgttttatgtattacgatttttttantttatttttaatatttttaatattgttttttcgcgtatattacgtattacgtttcgtattacgatcgtcgttttatatntatttt

SEQ ID NO: 27478 - DNA, 1291 bp, Artificial Sequence
  chemically treated genomic DNA (Homo sapiens) CpG-island No: 27478
  unsure (7, 86, 124, 161, 452, 562, 959, 980)
aaaatanatataaaacgacgatcgtaatacgaaacgtaatacgtaatatacgcgaaaaaacaatattaaaaatattaaaaataaantaaaaaaatcgtaatacataaaacaaaaacgaaacgcntcaccgcgaaaataatattttataaataataatccantataaaaaaataacgtaaccgatacgcgaacgtaaatctcccgcgcgtaaacgtcgattataaaacgtaaatcatatacataaataaaaaatataataaaaacgcgatacgcaatatacgaaaacgaactataaaaataaataaacgatataaataaaaataaaataaatataatcgacgacgccgcgaaatcgcgatacgcgtcgaattctcgtatattataatttatatataaataaaacgtataaaatcgatacgcgaatccgtaacacctatcgataaatatatctntcatatatatatacaaaatacgaaccccgcgcgcgatatacgtacgcaacgtaataatatatatttttaatatataatataataaaaacgataccataaaataaaaaacncgacgacgcgacgcaaatattcttatcgtacgataatataaaaaataacgaacgtataataataaaaaaacgatcgaataattaacgttaatatatatcgtaattcttatataaaaataaaaaaacgaaaatataccgacgacgtaaacgatataatacaataatataatattaaaaaaataaaaacgcgaaaaaaaaaatatacgacgccgtaaaacgcgtacgtcgtaatataaaaataaataacgtaaaaacgtaactaataaacgcgtaacgcgtcgccgtcgtaaaaataaaacgtataataataaacgaaacgattaacgtaatattcgtaatcgcgattaattaatataatcaacaaaaaaaaaataaattacgtataaacgtacgaatntaaataacgatatttaatatnaaaaaaacgcaaaaaaaacgaacgacaatacgataatttattataattaatacaaataaaacgaacgaaacgcgcgccgtatacgtaaatatattataatacgaaacgtaacgacgccgccgcatactatttctttttaataaaatccgacaaaaaaacgcccgcgatatattattaatataataaaaacgaaacgccgtaatctattatttttaaaaaatacgacgaacgaatcgttttttttaaaaaaaaaaataccgtccgttccttcctccctccctctctccctccctatttctctctcgctctcg

SEQ ID NO: 27479 - DNA, 1291 bp, Artificial Sequence
  chemically treated genomic DNA (Homo sapiens) CpG-island No: 27479
  unsure (7, 86, 124, 161, 452, 562, 959, 980)
aaagtanatgtgaaacgacggtcgtggtgcggggcgtagtgcgtagtatacgcggaggagtagtgttagaggtgttgaggatgagntagaggaatcgtagtgtatgagataggggcggggcgtnttatcgcgaggatagtgttttatggatggtagtttantgtagagagatgacgtggtcgatgcgcgggcgtggatttttcgcgcgtgagcgtcgattatagggcgtaagttatatgtatgggtagggagtgtggtgagaacgcggtacgtaatgtgcgagggcgagttgtggggatgagtgagcggtgtggatagggatggagtgggtgtggtcggcgacgtcgcggagtcgcgatgcgcgtcgggttttcgtgtgttgtagtttgtatgtgggtggagcgtgtggagtcggtgcgcgagttcgtggtatttgtcggtgagtgtatttnttatgtgtatgtgtagagtgcggatttcgcgcgcggtgtgcgtgcgtagcgtggtagtgtgtgtttttagtatgtgatgtgatgaggacgatgttataggatggagagtncggcggcgcggcgtaggtgtttttgtcgtgcgatagtataagaggtagcgagcgtatagtggtggaggagcggtcgagtagttagcgttggtgtgtgtcgtggtttttgtgtggggataagaggacgggagtgtgtcggcgacgtgagcgatgtggtgtagtagtgtaatattgggaggatagggacgcgaggaagagagtgtgcgacgtcgtagagcgcgtgcgtcgtggtgtggagataggtgacgtgagagcgtggttagtgggcgcgtggcgcgtcgtcgtcgtggaagtgagacgtatgatagtgagcgaggcggttggcgtggtgttcgtggtcgcgattggttgatatggttagtagggggagagtgagttgcgtgtgggcgtgcggatntagatgacggtatttagtatnggggggacgtaggaggagcgagcggtagtacggtgatttgttgtggttggtataggtggagcggacggagcgcgcgtcgtgtgcgtaggtgtgttatagtgcgggacgtggcggcgtcgtcgtatgttgtttttttttagtagaattcggtaggggggcgttcgcggtgtgttgttgatgtggtgggggcggggcgtcgtggtttgttgtttttggggggtgcggcgggcggatcgttttttttgggggggggggtgtcgttcgtttttttttttttttttttttttttttttgtttttttttcgttttcg

SEQ ID NO: 27480 - DNA, 1291 bp, Artificial Sequence
  chemically treated genomic DNA (Homo sapiens) CpG-island No: 27480
  unsure (312, 333, 730, 840, 1131, 1168, 1206, 1285)
cgaaaacgaaaaaaaaacaaaaaaaaaaaaaaaaaaaaaaaaaaaaacgaacgacacccccccccccaaaaaaaacgatccgcccgccgcaccccccaaaaacaacaaaccacgacgccccgcccccaccacatcaacaacacaccgcgaacgcccccctaccgaattctactaaaaaaaaacaacatacgacgacgccgccacgtcccgcactataacacacctacgcacacgacgcgcgctccgtccgctccacctataccaaccacaacaaatcaccgtactaccgctcgctcctcctacgtccccccnatactaaataccgtcatctanatccgcacgcccacacgcaactcactctccccctactaaccatatcaaccaatcgcgaccacgaacaccacgccaaccgcctcgctcactatcatacgtctcacttccacgacgacgacgcgccacgcgcccactaaccacgctctcacgtcacctatctccacaccacgacgcacgcgctctacgacgtcgcacactctcttcctcgcgtccctatcctcccaatattacactactacaccacatcgctcacgtcgccgacacactcccgtcctcttatccccacacaaaaaccacgacacacaccaacgctaactactcgaccgctcctccaccactatacgctcgctacctcttatactatcgcacgacaaaaacacctacgccgcgccgccgnactctccatcctataacatcgtcctcatcacatcacatactaaaaacacacactaccacgctacgcacgcacaccgcgcgcgaaatccgcactctacacatacacataanaaatacactcaccgacaaataccacgaactcgcgcaccgactccacacgctccacccacatacaaactacaacacacgaaaacccgacgcgcatcgcgactccgcgacgtcgccgaccacacccactccatccctatccacaccgctcactcatccccacaactcgccctcgcacattacgtaccgcgttctcaccacactccctacccatacatataacttacgccctataatcgacgctcacgcgcgaaaaatccacgcccgcgcatcgaccacgtcatctctctacantaaactaccatccataaaacactatcctcgcgataanacgccccgcccctatctcatacactacgattcctctanctcatcctcaacacctctaacactactcctccgcgtatactacgcactacgccccgcaccacgaccgtcgtttcacatntacttt

SEQ ID NO: 27481 - DNA, 933 bp, Artificial Sequence
  chemically treated genomic DNA (Homo sapiens) CpG-island No: 27481
gaacgattatggggtcgtattgtttttttttttataggcgagaaaacgaagttatttttttaaggttacggaggttgttaggttttaggcgtcgcgtttttacgtatttttggtcgattgacgttgggcgggcgcggtcgaaagaggtttcgtttcgtacgcgtggtgcggtttaggtagttttattcgcgcggggtcggggcgggggttttggaagttgcgtagtcggtgtgggtttcgcgcgttcgggtggtgaggttcgcggacggtttttttgtatcgggtcggagaggggtcgcggtaggcggcgcgcgggtcgtagtcgtatcgcgagtttgggttgtagcgggagcgacgcgtcggtcgtcgggtgggggtggagtttcgtcgcggttttaggtaacgtcgggttcggattttgcgtcgagcgtttcgggcgtagggtcggcgagtacgcggcggtagggggcggtcgcgggtcggcggaggaacgtacgcggggttttttcgttaggtttttgtcggcgttcgtacggcgggagttcgtagtttcgggttcggtagcgggagttgcgtcgttttttttttcgttcgttaggtttaaacgttttaattcggggagtttcggggaatttcgagttttcgcgtgttttgcgtttcgcgtacgtttcgatcgttattttcggcgagttttagttgcggttgggatttaggcgttcggtatcgcgagtcggagacgcgttgtagttttttggtttcgttatgttcgttttaaatattttttcgacgttttttgtgtcggtcgtcggggagttagagcggtttaagttttgttttggagcggttgtaggttcggggaatagatcgttgtattttagcgtcgtttttattgtattttggatgtcggaacgttgcggggttcggagagagttt

SEQ ID NO: 27482 - DNA, 933 bp, Artificial Sequence
  chemically treated genomic DNA (Homo sapiens) CpG-island No: 27482
aaactctctccgaaccccgcaacgttccgacatccaaaatacaataaaaacgacgctaaaatacaacgatctattccccgaacctacaaccgctccaaaacaaaacttaaaccgctctaactccccgacgaccgacacaaaaaacgtcgaaaaaatatttaaaacgaacataacgaaaccaaaaaactacaacgcgtctccgactcgcgataccgaacgcctaaatcccaaccgcaactaaaactcgccgaaaataacgatcgaaacgtacgcgaaacgcaaaacacgcgaaaactcgaaattccccgaaactccccgaattaaaacgtttaaacctaacgaacgaaaaaaaaaacgacgcaactcccgctaccgaacccgaaactacgaactcccgccgtacgaacgccgacaaaaacctaacgaaaaaaccccgcgtacgttcctccgccgacccgcgaccgccccctaccgccgcgtactcgccgaccctacgcccgaaacgctcgacgcaaaatccgaacccgacgttacctaaaaccgcgacgaaactccacccccacccgacgaccgacgcgtcgctcccgctacaacccaaactcgcgatacgactacgacccgcgcgccgcctaccgcgacccctctccgacccgatacaaaaaaaccgtccgcgaacctcaccacccgaacgcgcgaaacccacaccgactacgcaacttccaaaacccccgccccgaccccgcgcgaataaaactacctaaaccgcaccacgcgtacgaaacgaaacctctttcgaccgcgcccgcccaacgtcaatcgaccaaaaatacgtaaaaacgcgacgcctaaaacctaacaacctccgtaaccttaaaaaaataacttcgttttctcgcctataaaaaaaaaaacaatacgaccccataatcgttc

SEQ ID NO: 27483 - DNA, 933 bp, Artificial Sequence
  chemically treated genomic DNA (Homo sapiens) CpG-island No: 27483
ggatttttttcggatttcgtagcgtttcgatatttagaatgtagtaaggacggcgttgaagtgtagcggtttgtttttcggatttgtagtcgttttagggtagggtttaggtcgttttggtttttcggcggtcggtatagggggcgtcggggaaatgtttaggacggatatggcgaggttaaagaattgtagcgcgttttcggttcgcggtgtcggacgtttgggttttagtcgtagttgggattcgtcgggggtggcggtcgggacgtgcgcggggcgtagggtacgcgggggttcggagtttttcggggtttttcgagttggggcgtttggatttagcggacggggagaagagcggcgtagttttcgttgtcgggttcgggattgcgagttttcgtcgtgcgggcgtcggtagaggtttggcgggaagatttcgcgtgcgttttttcgtcggttcgcggtcgttttttatcgtcgcgtgttcgtcggttttgcgttcggggcgttcggcgtagggttcgggttcggcgttatttggggtcgcggcggggttttatttttattcggcggtcggcgcgtcgttttcgttgtagtttaggttcgcggtgcggttgcggttcgcgcgtcgtttgtcgcggttttttttcggttcggtgtaggggaatcgttcgcggattttattattcgggcgcgcggggtttatatcggttgcgtagtttttaggattttcgtttcggtttcgcgcgaatggagttgtttggatcgtattacgcgtgcggggcggagtttttttcggtcgcgttcgtttagcgttagtcggttaggggtgcgtaagggcgcggcgtttggggtttggtagttttcgtgattttggaggagtgatttcgttttttcgtttgtgaaaagggaaataatacgattttatggtcgttt

SEQ ID NO: 27484 - DNA, 933 bp, Artificial Sequence
  chemically treated genomic DNA (Homo sapiens) CpG-island No: 27484
aaacgaccataaaatcgtattatttcccttttcacaaacgaaaaaacgaaatcactcctccaaaatcacgaaaactaccaaaccccaaacgccgcgcccttacgcacccctaaccgactaacgctaaacgaacgcgaccgaaaaaaactccgccccgcacgcgtaatacgatccaaacaactccattcgcgcgaaaccgaaacgaaaatcctaaaaactacgcaaccgatataaaccccgcgcgcccgaataataaaatccgcgaacgattcccctacaccgaaccgaaaaaaaaccgcgacaaacgacgcgcgaaccgcaaccgcaccgcgaacctaaactacaacgaaaacgacgcgccgaccgccgaataaaaataaaaccccgccgcgaccccaaataacgccgaacccgaaccctacgccgaacgccccgaacgcaaaaccgacgaacacgcgacgataaaaaacgaccgcgaaccgacgaaaaaacgcacgcgaaatcttcccgccaaacctctaccgacgcccgcacgacgaaaactcgcaatcccgaacccgacaacgaaaactacgccgctcttctccccgtccgctaaatccaaacgccccaactcgaaaaaccccgaaaaactccgaacccccgcgtaccctacgccccgcgcacgtcccgaccgccacccccgacgaatcccaactacgactaaaacccaaacgtccgacaccgcgaaccgaaaacgcgctacaattctttaacctcgccatatccgtcctaaacatttccccgacgccccctataccgaccgccgaaaaaccaaaacgacctaaaccctaccctaaaacgactacaaatccgaaaaacaaaccgctacacttcaacgccgtccttactacattctaaatatcgaaacgctacgaaatccgaaaaaaatcc

SEQ ID NO: 27485 - DNA, 502 bp, Artificial Sequence
  chemically treated genomic DNA (Homo sapiens) CpG-island No: 27485
aattcgcgttttgttgtttggatatacgttaacgttattagaagcgttggtgtaaaattttcgtttgttacgaagtttggtcgtcgttttgatcggcgtaagtttggcgttcgcgggtacgttgttgtaaattttgatttataatttaatggttttttttttattgttcggtattaatagcggcgcggcgttggttatggcgtttattagcgcgttgagttcgacgtcgattgtaggttattttttgttatttatcgcggtatgcgggggcggcgtgagttggttgttggttatgatcgtaggaggcggatttcgttatatttatgatagaaataaattgattttcgcgggtatcgcgttgtcggttttttgtatgggttttattcgtattattttgttgttggtcgaagattatgtttacggtattttttattggttggtaggcggagtgttttacgttcgttggtaggatgtttgatagtttttgtcggtggtggttatt

SEQ ID NO: 27486 - DNA, 502 bp, Artificial Sequence
  chemically treated genomic DNA (Homo sapiens) CpG-island No: 27486
aataaccaccaccgacaaaaactatcaaacatcctaccaacgaacgtaaaacactccgcctaccaaccaataaaaaataccgtaaacataatcttcgaccaacaacaaaataatacgaataaaacccatacaaaaaaccgacaacgcgatacccgcgaaaatcaatttatttctatcataaatataacgaaatccgcctcctacgatcataaccaacaaccaactcacgccgcccccgcataccgcgataaataacaaaaaataacctacaatcgacgtcgaactcaacgcgctaataaacgccataaccaacgccgcgccgctattaataccgaacaataaaaaaaaaaccattaaattataaatcaaaatttacaacaacgtacccgcgaacgccaaacttacgccgatcaaaacgacgaccaaacttcgtaacaaacgaaaattttacaccaacgcttctaataacgttaacgtatatccaaacaacaaaacgcgaatt

SEQ ID NO: 27487 - DNA, 502 bp, Artificial Sequence
  chemically treated genomic DNA (Homo sapiens) CpG-island No: 27487
agtgattattatcggtaagagttgttagatattttgttagcgggcgtgggatatttcgtttgttagttagtaaaagatgtcgtaagtatgattttcggttagtagtagggtgatgcgggtaaggtttatataaaaggtcgatagcgcgatattcgcgaggattagtttgtttttgttatgggtatgacgaaattcgttttttgcggttatgattagtagttagtttacgtcgttttcgtatgtcgcgatgaatgatagagaatagtttgtaatcggcgtcggatttagcgcgttggtaagcgttatagttagcgtcgcgtcgttgttaatgtcgagtagtgaaggagaggttattgggttgtgggttagggtttgtagtagcgtgttcgcgagcgttaggtttgcgtcgattagaacggcgattaggtttcgtggtaaacgaaggttttgtattagcgtttttggtagcgttggcgtgtgtttaggtagtagggcgcgggtt

SEQ ID NO: 27488 - DNA, 502 bp, Artificial Sequence
  chemically treated genomic DNA (Homo sapiens) CpG-island No: 27488
aacccgcgccctactacctaaacacacgccaacgctaccaaaaacgctaatacaaaaccttcgtttaccacgaaacctaatcgccgttctaatcgacgcaaacctaacgctcgcgaacacgctactacaaaccctaacccacaacccaataacctctccttcactactcgacattaacaacgacgcgacgctaactataacgcttaccaacgcgctaaatccgacgccgattacaaactattctctatcattcatcgcgacatacgaaaacgacgtaaactaactactaatcataaccgcaaaaaacgaatttcgtcatacccataacaaaaacaaactaatcctcgcgaatatcgcgctatcgaccttttatataaaccttacccgcatcaccctactactaaccgaaaatcatacttacgacatcttttactaactaacaaacgaaatatcccacgcccgctaacaaaatatctaacaactcttaccgataataatcact

SEQ ID NO: 27489 - DNA, 539 bp, Artificial Sequence
  chemically treated genomic DNA (Homo sapiens) CpG-island No: 27489
attcgtcgtaggtttttattcgtgattatatttttgatatttatgatgaaaatggtaaagtatcgttgttgtcggtattcggcggtaacgttgattatttatcgaaaattggcggaatatgcgttggaaaaattaacgtcgtattattacgggtattggttcggatatggacgaaagagagtgtgttatcgggtggcgttattgaaggcgatcgcgacgattatgtcgttcgtttgcgtcgacgttattcgtttttgattgaatcgttggcgcgttattacgttcgtatttacggtagtaatagcgagttgttgttcggtaatgcgggaacggtaagcgatttcggggaagatttcggttatgagttttacgaagcggagttgaaatatttggtgggatttacgatatgggttcgtacgcgtcgatagacgttttgtggcgtcgtataaaataaggtatgtggttaaatgcggattaataatttcgtgtgagttagtggttggtggagtatacgtagtagaggttatcgttggcgtcgt

SEQ ID NO: 27490 - DNA, 539 bp, Artificial Sequence
  chemically treated genomic DNA (Homo sapiens) CpG-island No: 27490
acgacgccaacgataacctctactacgtatactccaccaaccactaactcacacgaaattattaatccgcatttaaccacataccttattttatacgacgccacaaaacgtctatcgacgcgtacgaacccatatcgtaaatcccaccaaatatttcaactccgcttcgtaaaactcataaccgaaatcttccccgaaatcgcttaccgttcccgcattaccgaacaacaactcgctattactaccgtaaatacgaacgtaataacgcgccaacgattcaatcaaaaacgaataacgtcgacgcaaacgaacgacataatcgtcgcgatcgccttcaataacgccacccgataacacactctctttcgtccatatccgaaccaatacccgtaataatacgacgttaatttttccaacgcatattccgccaattttcgataaataatcaacgttaccgccgaataccgacaacaacgatactttaccattttcatcataaatatcaaaaatataatcacgaataaaaacctacgacgaat

SEQ ID NO: 27491 - DNA, 539 bp, Artificial Sequence
  chemically treated genomic DNA (Homo sapiens) CpG-island No: 27491
acgacgttagcgataatttttgttgcgtatattttattagttattgatttatacgagattgttgattcgtatttagttatatgttttgttttgtgcgacgttatagggcgtttgtcggcgcgtgcggatttatgtcgtggattttattaggtattttagtttcgtttcgtagaatttatgatcgaaatttttttcgagatcgtttatcgttttcgtattgtcgagtagtagttcgttgttgttgtcgtaagtgcgagcgtaatgacgcgttagcgatttagttaggaacggatagcgtcggcgtaggcgagcggtataatcgtcgcggtcgtttttaatggcgttattcggtagtatattttttttcgtttatgttcgggttaatattcgtgataatacggcgttagtttttttagcgtatgtttcgttagttttcggtaggtggttagcgttatcgtcgaatatcgatagtagcggtgttttgttatttttattatgaatattaagggtgtaattacgggtaagagtttgcggcgagt

SEQ ID NO: 27492 - DNA, 539 bp, Artificial Sequence
  chemically treated genomic DNA (Homo sapiens) CpG-island No: 27492
actcgccgcaaactcttacccgtaattacacccttaatattcataataaaaataacaaaacaccgctactatcgatattcgacgataacgctaaccacctaccgaaaactaacgaaacatacgctaaaaaaactaacgccgtattatcacgaatattaacccgaacataaacgaaaaaaaatatactaccgaataacgccattaaaaacgaccgcgacgattataccgctcgcctacgccgacgctatccgttcctaactaaatcgctaacgcgtcattacgctcgcacttacgacaacaacaacgaactactactcgacaatacgaaaacgataaacgatctcgaaaaaaatttcgatcataaattctacgaaacgaaactaaaatacctaataaaatccacgacataaatccgcacgcgccgacaaacgccctataacgtcgcacaaaacaaaacatataactaaatacgaatcaacaatctcgtataaatcaataactaataaaatatacgcaacaaaaattatcgctaacgtcgt

SEQ ID NO: 27493 - DNA, 566 bp, Artificial Sequence
  chemically treated genomic DNA (Homo sapiens) CpG-island No: 27493
tcgtatgttagttattgcgcgtgcgggtaattaacgttcgtaaattgacgtcggatttaggtagtttttgttttagtttgagtggattaacgtcgcgattcgttaataaacgtagttatttacgtattagcgttgcgcgttttttcggtgaatgaattcggttttgggtgatttttatcgacggatatatcggattacgggtattaaagttgaagtataaatcgttgtcgttatattttatcgtatcgcgttattgttggcgtatcgtaatggggatttgtcgatcgaatgtatcgcgtatttaacgcgattatttttattatcggcgtatcgagattttttggtagggtaaattttttttgggttgagtcggttatgcgggttaaatgtcgtttttattttgcgtagttttgtaaaaagttttttatcgaaaaacgtcgggttgtatttagcgcgaaaatttttgtcgtgttcgttttataataaattatcgtatttcgtagttagcgttattacgttattagagatttgttttattaaaattttttgttgaggatcgtatatat

SEQ ID NO: 27494 - DNA, 566 bp, Artificial Sequence
  chemically treated genomic DNA (Homo sapiens) CpG-island No: 27494
atatatacgatcctcaacaaaaaattttaataaaacaaatctctaataacgtaataacgctaactacgaaatacgataatttattataaaacgaacacgacaaaaattttcgcgctaaatacaacccgacgtttttcgataaaaaactttttacaaaactacgcaaaataaaaacgacatttaacccgcataaccgactcaacccaaaaaaaatttaccctaccaaaaaatctcgatacgccgataataaaaataatcgcgttaaatacgcgatacattcgatcgacaaatccccattacgatacgccaacaataacgcgatacgataaaatataacgacaacgatttatacttcaactttaatacccgtaatccgatatatccgtcgataaaaatcacccaaaaccgaattcattcaccgaaaaaacgcgcaacgctaatacgtaaataactacgtttattaacgaatcgcgacgttaatccactcaaactaaaacaaaaactacctaaatccgacgtcaatttacgaacgttaattacccgcacgcgcaataactaacatacga

SEQ ID NO: 27495 - DNA, 566 bp, Artificial Sequence
  chemically treated genomic DNA (Homo sapiens) CpG-island No: 27495
atatgtgcgatttttaataagagattttgatgaagtaaatttttgatgacgtggtggcgttgattgcgaaatacggtggtttgttgtggggcgagtacggtaaaggttttcgcgttgaatatagttcggcgtttttcggtgaggaattttttgtagaattgcgtaaagtgaaagcggtatttgattcgtataatcgatttaatttagggaagatttgttttgttagaaggtttcgatgcgtcgatgatgaaagtgatcgcgttgaatgcgcggtatattcgatcggtagatttttattgcggtacgttagtagtggcgcggtgcgatggagtgtaacggtaacggtttatgttttaattttgatgttcgtagttcgatgtgttcgtcgatgaagattatttagaatcggatttatttatcgaaagggcgcgtaacgttggtgcgtgaatggttgcgtttgttggcggatcgcggcgttgatttatttaaattggaataagaattgtttgaattcggcgttagtttgcggacgttaattgttcgtacgcgtaatagttggtatgcga

SEQ ID NO: 27496 - DNA, 566 bp, Artificial Sequence
  chemically treated genomic DNA (Homo sapiens) CpG-island No: 27496
tcgcataccaactattacgcgtacgaacaattaacgtccgcaaactaacgccgaattcaaacaattcttattccaatttaaataaatcaacgccgcgatccgccaacaaacgcaaccattcacgcaccaacgttacgcgccctttcgataaataaatccgattctaaataatcttcatcgacgaacacatcgaactacgaacatcaaaattaaaacataaaccgttaccgttacactccatcgcaccgcgccactactaacgtaccgcaataaaaatctaccgatcgaatataccgcgcattcaacgcgatcactttcatcatcgacgcatcgaaaccttctaacaaaacaaatcttccctaaattaaatcgattatacgaatcaaataccgctttcactttacgcaattctacaaaaaattcctcaccgaaaaacgccgaactatattcaacgcgaaaacctttaccgtactcgccccacaacaaaccaccgtatttcgcaatcaacgccaccacgtcatcaaaaatttacttcatcaaaatctcttattaaaaatcgcacatat

SEQ ID NO: 27497 - DNA, 551 bp, Artificial Sequence
  chemically treated genomic DNA (Homo sapiens) CpG-island No: 27497
atttttcggtgttatttgtaagatatatttttgttcgcgtatattacgcgattttatatttagcgaatgtaggttggtaggggcgttttttatcgttttaggcggtattatttttgcgcgaatagttgagtgtgggtaagcggtaacgtagtggttatattgggtatagagtttttttttttagatggggattttttcggcgatattgcgttttttttagcgcgtagtgtttatcggttaggtgtcgtttggcggtagcgtcgaaacggggagggcgttattaagttcggcgagtatcgtagcggttacggtttttacgaaattaggggcggtatcggaaattattggcggtcgattggcgttgtgcggatttatcggttgtaacggaattttttttacggatttacgcgttagcgttagagtttgttagttgcgttttattagattttggtttttgttattgtaatttttggtaatcgtattttgtaattttgcgagggcgttatcgttaggtagaatttgcgttagatggaaaaaagttatttgtatga

SEQ ID NO: 27498 - DNA, 551 bp, Artificial Sequence
  chemically treated genomic DNA (Homo sapiens) CpG-island No: 27498
tcatacaaataacttttttccatctaacgcaaattctacctaacgataacgccctcgcaaaattacaaaatacgattaccaaaaattacaataacaaaaaccaaaatctaataaaacgcaactaacaaactctaacgctaacgcgtaaatccgtaaaaaaaattccgttacaaccgataaatccgcacaacgccaatcgaccgccaataatttccgataccgcccctaatttcgtaaaaaccgtaaccgctacgatactcgccgaacttaataacgccctccccgtttcgacgctaccgccaaacgacacctaaccgataaacactacgcgctaaaaaaaacgcaatatcgccgaaaaaatccccatctaaaaaaaaaaactctatacccaatataaccactacgttaccgcttacccacactcaactattcgcgcaaaaataataccgcctaaaacgataaaaaacgcccctaccaacctacattcgctaaatataaaatcgcgtaatatacgcgaacaaaaatatatcttacaaataacaccgaaaaat

SEQ ID NO: 27499 - DNA, 551 bp, Artificial Sequence
  chemically treated genomic DNA (Homo sapiens) CpG-island No: 27499
ttatgtagatggtttttttttatttgacgtaaattttgtttggcgatagcgttttcgtagaattgtagggtgcgattgttaaaagttatagtagtaaaggttaggatttggtggaacgtaattggtaggttttggcgttggcgcgtgaattcgtagaagaagtttcgttgtaatcggtaaattcgtatagcgttaatcgatcgttagtggttttcgatgtcgtttttgatttcgtgaaaatcgtaatcgttgcgatgttcgtcgggtttggtgacgtttttttcgtttcggcgttgtcgttagacggtatttggtcgatgggtattacgcgttgggaaaaacgtaatatcgtcgaagagatttttatttggaaagaggaattttgtatttaatgtaattattgcgttgtcgtttgtttatatttagttattcgcgtaaaagtggtgtcgtttgaagcgatggaaaacgtttttgttagtttgtattcgttggatgtgaaatcgcgtgatatgcgcgggtagaaatatgttttgtaggtggtatcggaagat

SEQ ID NO: 27500 - DNA, 551 bp, Artificial Sequence
  chemically treated genomic DNA (Homo sapiens) CpG-island No: 27500
atcttccgataccacctacaaaacatatttctacccgcgcatatcacgcgatttcacatccaacgaatacaaactaacaaaaacgttttccatcgcttcaaacgacaccacttttacgcgaataactaaatataaacaaacgacaacgcaataattacattaaatacaaaattcctctttccaaataaaaatctcttcgacgatattacgtttttcccaacgcgtaatacccatcgaccaaataccgtctaacgacaacgccgaaacgaaaaaaacgtcaccaaacccgacgaacatcgcaacgattacgattttcacgaaatcaaaaacgacatcgaaaaccactaacgatcgattaacgctatacgaatttaccgattacaacgaaacttcttctacgaattcacgcgccaacgccaaaacctaccaattacgttccaccaaatcctaacctttactactataacttttaacaatcgcaccctacaattctacgaaaacgctatcgccaaacaaaatttacgtcaaataaaaaaaaaccatctacataa

SEQ ID NO: 27501 - DNA, 935 bp, Artificial Sequence
  chemically treated genomic DNA (Homo sapiens) CpG-island No: 27501
  unsure (760, 813, 833)
ttcgttattagcgtataggtattatttgtttgttttagcgagaagcgatgggtaatggcgttacgcggttatagtttttagttcgttagattatgggcgtatttttttatatggaatagattggttatttaggagtcgataattcgtcgttgatggtgtattagatcggcgttgatttcgaattttattttttcggttttattaatgtaaattattcgtttttagttagcggtggattgtagtgttagtaagcgatttgcggtattatcggaataatcgagcgtaatattcgcgttatcgtgggtgagttcggcgataatttgcggtagattttcggtggttgttaaatagtcgtgatttattatttttaattgttttgttatcgttagacgtttcggtagtatattaacgtcgatgattcgttttgtatcgcgatttttcgttagtattatcgttattatgtcgattggttttagatcgattattagtacgttattattgtcggaaatttcgtcgcgtaaaatttttttatacgttgtattaacgtcgtaattgataaacgtattattttcgtagtttagcgtattcggtaggaggattagatttttttttttcgttagtaagtattcggtatgatcgtcgttacgttgttagtcgtaagtcgtttttttttcgttagtataagaaataggaaaatcgcgacggtagttcgggtaaaaattatagttagaaatgtgatatattagtatagcggtcgttnttttttaataatggcggtagttttgttttatcgttataattttgttcgtacgngtttagtgatcggttgatanagagttttggtataacggtttatcgggtgtcgtcgttgtggtacggtgttgatgatagatatagtggatatcgttttcgtaaatttcggaggattttatttt

SEQ ID NO: 27502 - DNA, 935 bp, Artificial Sequence
  chemically treated genomic DNA (Homo sapiens) CpG-island No: 27502
  unsure (103, 123, 176)
aaaataaaatcctccgaaatttacgaaaacgatatccactatatctatcatcaacaccgtaccacaacgacgacacccgataaaccgttataccaaaactctntatcaaccgatcactaaacncgtacgaacaaaattataacgataaaacaaaactaccgccattattaaaaaanaacgaccgctatactaatatatcacatttctaactataatttttacccgaactaccgtcgcgattttcctatttcttatactaacgaaaaaaaaacgacttacgactaacaacgtaacgacgatcataccgaatacttactaacgaaaaaaaaaaatctaatcctcctaccgaatacgctaaactacgaaaataatacgtttatcaattacgacgttaatacaacgtataaaaaaattttacgcgacgaaatttccgacaataataacgtactaataatcgatctaaaaccaatcgacataataacgataatactaacgaaaaatcgcgatacaaaacgaatcatcgacgttaatatactaccgaaacgtctaacgataacaaaacaattaaaaataataaatcacgactatttaacaaccaccgaaaatctaccgcaaattatcgccgaactcacccacgataacgcgaatattacgctcgattattccgataataccgcaaatcgcttactaacactacaatccaccgctaactaaaaacgaataatttacattaataaaaccgaaaaaataaaattcgaaatcaacgccgatctaatacaccatcaacgacgaattatcgactcctaaataaccaatctattccatataaaaaaatacgcccataatctaacgaactaaaaactataaccgcgtaacgccattacccatcgcttctcgctaaaacaaacaaataatacctatacgctaataacgaa

SEQ ID NO: 27503 - DNA, 935 bp, Artificial Sequence
  chemically treated genomic DNA (Homo sapiens) CpG-island No: 27503
  unsure (103, 123, 176)
aaaatgaaatttttcgggatttgcggaagcgatgtttattatatttattattaatatcgtgttatagcggcggtattcgataaatcgttatattagggttttntattaatcggttattgaatncgtgcgggtagaattgtggcgatggggtaaggttgtcgttattgttaaagagnggcgatcgttgtgttggtgtattatatttttggttgtggtttttgttcgaattgtcgtcgcggtttttttattttttgtattggcgaaggaaaagcggtttacggttggtagcgtgacggcggttatgtcgaatatttgttggcggaagaaaaagatttgatttttttgtcggatgcgttgagttacgaagatggtgcgtttattagttgcggcgttggtatagcgtatgaaggaattttgcgcggcgaagttttcggtagtgataacgtgttggtggtcggtttggggttagtcggtatgatggcgatgatgttggcgaaaggtcgcggtgtaaaacggattatcggcgttgatatgttgtcggaacgtttggcgatggtaaaatagttaggggtgatggattacggttatttagtaattatcgaaggtttgtcgtagattatcgtcgaatttatttacggtggcgcggatgttgcgttcgattgtttcggtaatgtcgtaggtcgtttgttggtattgtaatttatcgttgattggggacgggtggtttatattggtgaaatcggaaaagtggaattcgaggttagcgtcgatttgatgtattattaacggcggattatcggtttttgggtgattagtttgttttatatggaaaaatgcgtttatgatttgacggattggaagttgtggtcgcgtaacgttattatttatcgtttttcgttggaataggtaggtgatgtttatgcgttgatggcgag

SEQ ID NO: 27504 - DNA, 935 bp, Artificial Sequence
  chemically treated genomic DNA (Homo sapiens) CpG-island No: 27504
  unsure (760, 813, 833)
ctcgccatcaacgcataaacatcacctacctattccaacgaaaaacgataaataataacgttacgcgaccacaacttccaatccgtcaaatcataaacgcatttttccatataaaacaaactaatcacccaaaaaccgataatccgccgttaataatacatcaaatcgacgctaacctcgaattccacttttccgatttcaccaatataaaccacccgtccccaatcaacgataaattacaataccaacaaacgacctacgacattaccgaaacaatcgaacgcaacatccgcgccaccgtaaataaattcgacgataatctacgacaaaccttcgataattactaaataaccgtaatccatcacccctaactattttaccatcgccaaacgttccgacaacatatcaacgccgataatccgttttacaccgcgacctttcgccaacatcatcgccatcataccgactaaccccaaaccgaccaccaacacgttatcactaccgaaaacttcgccgcgcaaaattccttcatacgctataccaacgccgcaactaataaacgcaccatcttcgtaactcaacgcatccgacaaaaaaatcaaatctttttcttccgccaacaaatattcgacataaccgccgtcacgctaccaaccgtaaaccgcttttccttcgccaatacaaaaaataaaaaaaccgcgacgacaattcgaacaaaaaccacaaccaaaaatataatacaccaacacaacgatcgccnctctttaacaataacgacaaccttaccccatcgccacaattctacccgcacgnattcaataaccgattaatanaaaaccctaatataacgatttatcgaataccgccgctataacacgatattaataataaatataataaacatcgcttccgcaaatcccgaaaaatttcatttt

SEQ ID NO: 27505 - DNA, 858 bp, Artificial Sequence
  chemically treated genomic DNA (Homo sapiens) CpG-island No: 27505
tgacgcgttgggcgtttggtattagaacgattcggtattggtgaaagaatttgtcgaattgttgtggttgaaaggcgatgaatttgttatcgatcgtagggtaaaacgttgtttttgaacgaagcgttatatgtggtattatcgtatattcgattttggtatagatatttgttaatattgttgagaattacgttattgtttatcgcggtagttgaatatacgtgttgtcgttggtgggcgataaatgcgatacgttacgatgatagtttattgatttgttgattgacgtcgattgttgatatggtgcgttattattttacgtggtacgagttatggagtgtattagagaagttgtttaagtttatattttaggtatagacgattattgtttgattgtcgcgtttgtattttatcgttttttcgtaggcgagaagtcgtagaattgaagttaatagcgggttcgaatacggatttgcgttaggtggcgtggcgtttatcgaacgtggaaggtcgcgttcgtgtcggtggtgtttttagttttttcgttgatcgcgtggaagaagagggcgaagttcgcgtatttatcgaatataacgataattttcgtttgttagttaatttagaaatttcggtgattatgattggtttaggtatcggtattgcgtcgtttcgcgtttttatgtagtaacgcgtcgtcgacgaagcgttaggtaaaaattggttgttttttggtaattcgtattttacggaagattttttgtattaggtggagtggtagcgttacgttaaagatggcgtgttgatacgtatcgattttgtttggtcgcgcgattaaaaagaaaaagtttacgtataaga

SEQ ID NO: 27506 - DNA, 858 bp, Artificial Sequence
  chemically treated genomic DNA (Homo sapiens) CpG-island No: 27506
tcttatacgtaaactttttctttttaatcgcgcgaccaaacaaaatcgatacgtatcaacacgccatctttaacgtaacgctaccactccacctaatacaaaaaatcttccgtaaaatacgaattaccaaaaaacaaccaatttttacctaacgcttcgtcgacgacgcgttactacataaaaacgcgaaacgacgcaataccgatacctaaaccaatcataatcaccgaaatttctaaattaactaacaaacgaaaattatcgttatattcgataaatacgcgaacttcgccctcttcttccacgcgatcaacgaaaaaactaaaaacaccaccgacacgaacgcgaccttccacgttcgataaacgccacgccacctaacgcaaatccgtattcgaacccgctattaacttcaattctacgacttctcgcctacgaaaaaacgataaaatacaaacgcgacaatcaaacaataatcgtctatacctaaaatataaacttaaacaacttctctaatacactccataactcgtaccacgtaaaataataacgcaccatatcaacaatcgacgtcaatcaacaaatcaataaactatcatcgtaacgtatcgcatttatcgcccaccaacgacaacacgtatattcaactaccgcgataaacaataacgtaattctcaacaatattaacaaatatctataccaaaatcgaatatacgataataccacatataacgcttcgttcaaaaacaacgttttaccctacgatcgataacaaattcatcgcctttcaaccacaacaattcgacaaattctttcaccaataccgaatcgttctaataccaaacgcccaacgcgtca

SEQ ID NO: 27507 - DNA, 858 bp, Artificial Sequence
  chemically treated genomic DNA (Homo sapiens) CpG-island No: 27507
ttttgtacgtaaattttttttttttgatcgcgcgattaggtaagatcgatacgtgttagtacgttatttttgacgtagcgttgttattttatttggtataggaagtttttcgtaaagtgcggattattaaagaatagttagtttttatttggcgtttcgtcggcggcgcgttgttgtataaaggcgcggaacggcgtaatatcggtgtttgggttaattataattatcggggtttttggattggttggtaggcggaagttatcgttatgttcgataaatacgcggatttcgttttttttttttacgcggttagcgaggaagttggaggtattatcggtacgggcgcggttttttacgttcggtaagcgttacgttatttagcgtagattcgtgttcggattcgttgttagttttagttttgcgatttttcgtttgcgaggaggcgatggaatatagacgcggtagttaagtagtggtcgtttatgtttagaatgtgaatttgagtagtttttttggtgtattttatagttcgtgttacgtgggatgataacgtattatgttaataatcggcgttagttagtaggttagtaaattgttatcgtaacgtgtcgtatttatcgtttattagcggtagtacgtgtgtttagttgtcgcggtaagtagtggcgtaatttttaataatgttggtaggtgtttgtattagggtcgagtgtgcgatagtgttatatgtagcgtttcgtttagaggtaacgttttgttttgcgatcggtgataggtttatcgttttttagttatagtagttcgataagtttttttattagtgtcggatcgttttgatattagacgtttagcgcgtta

SEQ ID NO: 27508 - DNA, 858 bp, Artificial Sequence
  chemically treated genomic DNA (Homo sapiens) CpG-island No: 27508
taacgcgctaaacgtctaatatcaaaacgatccgacactaataaaaaaacttatcgaactactataactaaaaaacgataaacctatcaccgatcgcaaaacaaaacgttacctctaaacgaaacgctacatataacactatcgcacactcgaccctaatacaaacacctaccaacattattaaaaattacgccactacttaccgcgacaactaaacacacgtactaccgctaataaacgataaatacgacacgttacgataacaatttactaacctactaactaacgccgattattaacataatacgttatcatcccacgtaacacgaactataaaatacaccaaaaaaactactcaaattcacattctaaacataaacgaccactacttaactaccgcgtctatattccatcgcctcctcgcaaacgaaaaatcgcaaaactaaaactaacaacgaatccgaacacgaatctacgctaaataacgtaacgcttaccgaacgtaaaaaaccgcgcccgtaccgataatacctccaacttcctcgctaaccgcgtaaaaaaaaaaaacgaaatccgcgtatttatcgaacataacgataacttccgcctaccaaccaatccaaaaaccccgataattataattaacccaaacaccgatattacgccgttccgcgcctttatacaacaacgcgccgccgacgaaacgccaaataaaaactaactattctttaataatccgcactttacgaaaaacttcctataccaaataaaataacaacgctacgtcaaaaataacgtactaacacgtatcgatcttacctaatcgcgcgatcaaaaaaaaaaaatttacgtacaaaa

SEQ ID NO: 27509 - DNA, 1134 bp, Artificial Sequence
  chemically treated genomic DNA (Homo sapiens) CpG-island No: 27509
agcggaaattaggttgcgcgttattgtatgtttgggggcgttaaatagcgtttttatatcgttttgttcgataattttatcgttagatattatcgttacgttattcgttagacgcgttataacgtttatattatgggttattagtagtattttcggcgtttgtttttgtataatgttttttagtagatcgaggatgcgcgtttgtgttattacgttaaggtcggtggtcggtttatcggcgatgataaacggtgatttatatagtatcgttatcgtaattattatgcgttgtaatatgtcgtcgtttatttcgaacgggtatagttttagtacgcgcgcggcgttttttagttttatcgtttttatggtagcggtaagcgtagcgttatcggcgggtttttttaacgttaggtaggtttttcgcgcgtgggtgtgtatggtgtgtagtggattataggggttgcgcgggttttgtatgatgttgttaattttgatgtcgcgtagggcgtaaggcgaaatcggtttgttatcggttaaaatttttttcgtcgtttggcgaacgttagcgggtaaaatgtttagcgttgcggcgtaggttaatgatttttcgttgtcgttatcgtcgattaacgttagtacgcgttcgcgttgtagggttaacgatatatcgtgtattagcggttgcgcggtttgtagcgcgatattacgtagtttaatttgttgcggtattagtgtgcgtgtttcgttattagatgagggtttagatgatcgcgtagtgcgttatttattaggttaaaggttattacgttgataaatagcgttagtttcggttagaatatttgtagcggttgggtttagatatattggcgcgcgtcgttaattattacgttttattcggcggtcggcgcggttatatcgaggttaaggaaagatattttcgcgacgtgtagtattatatggtcgatatttagcgttgttagtattagtagcgaagggattatcgcgtttgttagatgatcgataaatattcgtatatggttcgtatcggatatagtcgtgacgtttagttataaattcgcgttggcgtagtgaaattattaggttgcgtattatgcgtgtatatttacgttttag

SEQ ID NO: 27510 - DNA, 1134 bp, Artificial Sequence
  chemically treated genomic DNA (Homo sapiens) CpG-island No: 27510
ctaaaacgtaaatatacacgcataatacgcaacctaataatttcactacgccaacgcgaatttataactaaacgtcacgactatatccgatacgaaccatatacgaatatttatcgatcatctaacaaacgcgataatcccttcgctactaatactaacaacgctaaatatcgaccatataatactacacgtcgcgaaaatatctttccttaacctcgatataaccgcgccgaccgccgaataaaacgtaataattaacgacgcgcgccaatatatctaaacccaaccgctacaaatattctaaccgaaactaacgctatttatcaacgtaataacctttaacctaataaataacgcactacgcgatcatctaaaccctcatctaataacgaaacacgcacactaataccgcaacaaattaaactacgtaatatcgcgctacaaaccgcgcaaccgctaatacacgatatatcgttaaccctacaacgcgaacgcgtactaacgttaatcgacgataacgacaacgaaaaatcattaacctacgccgcaacgctaaacattttacccgctaacgttcgccaaacgacgaaaaaaattttaaccgataacaaaccgatttcgccttacgccctacgcgacatcaaaattaacaacatcatacaaaacccgcgcaacccctataatccactacacaccatacacacccacgcgcgaaaaacctacctaacgttaaaaaaacccgccgataacgctacgcttaccgctaccataaaaacgataaaactaaaaaacgccgcgcgcgtactaaaactatacccgttcgaaataaacgacgacatattacaacgcataataattacgataacgatactatataaatcaccgtttatcatcgccgataaaccgaccaccgaccttaacgtaataacacaaacgcgcatcctcgatctactaaaaaacattatacaaaaacaaacgccgaaaatactactaataacccataatataaacgttataacgcgtctaacgaataacgtaacgataatatctaacgataaaattatcgaacaaaacgatataaaaacgctatttaacgcccccaaacatacaataacgcgcaacctaatttccgct

SEQ ID NO: 27511 - DNA, 1134 bp, Artificial Sequence
  chemically treated genomic DNA (Homo sapiens) CpG-island No: 27511
ttagggcgtaggtatgtacgtatggtgcgtagtttggtgattttattacgttaacgcgagtttgtagttaggcgttacggttatattcggtgcgggttatgtgcgggtgtttgtcgattatttggtaggcgcggtgattttttcgttgttggtgttggtaacgttggatatcggttatatgatgttgtacgtcgcggggatgtttttttttggtttcggtgtgatcgcgtcgatcgtcgaatggggcgtgatgattaacgacgcgcgttagtatatttggatttagtcgttgtaaatgttttggtcggggttggcgttgtttattagcgtgatggtttttaatttggtgggtgacgtattgcgcgattatttggatttttatttggtgacggagtacgtatattaatgtcgtaatagattgaattacgtaatatcgcgttataggtcgcgtagtcgttggtatacggtgtatcgttaattttgtaacgcgggcgcgtgttggcgttagtcggcggtagcggtagcgggaaattattaatttgcgtcgtaacgttgggtattttgttcgttggcgttcgttagacggcgggggaaattttagtcgatggtaaatcggtttcgttttgcgttttgcgcggtattaaaattggtagtattatgtagaattcgcgtagtttttgtaatttattgtatattatgtatatttacgcgcgggaaatttgtttggcgttagggaaattcgtcgatgacgttacgtttatcgttgttatagaagcggtggggttggaaaacgtcgcgcgcgtgttgaagttgtattcgttcgagatgagcggcggtatgttgtagcgtatgatgattgcgatggcggtgttgtgtgaattatcgtttattatcgtcgatgaatcgattatcgattttgacgtggtagtataggcgcgtattttcgatttgttggaaagtattatgtaaaaataagcgtcgggaatgttgttggtgatttatgatatgggcgttgtggcgcgtttggcggatgacgtggcggtgatgtttgacggtaagattgtcgaatagggcgatgtagaaacgttgtttaacgtttttaaatatatagtgacgcgtagtttggttttcgtt

SEQ ID NO: 27512 - DNA, 1134 bp, Artificial Sequence
  chemically treated genomic DNA (Homo sapiens) CpG-island No: 27512
aacgaaaaccaaactacgcgtcactatatatttaaaaacgttaaacaacgtttctacatcgccctattcgacaatcttaccgtcaaacatcaccgccacgtcatccgccaaacgcgccacaacgcccatatcataaatcaccaacaacattcccgacgcttatttttacataatactttccaacaaatcgaaaatacgcgcctatactaccacgtcaaaatcgataatcgattcatcgacgataataaacgataattcacacaacaccgccatcgcaatcatcatacgctacaacataccgccgctcatctcgaacgaatacaacttcaacacgcgcgcgacgttttccaaccccaccgcttctataacaacgataaacgtaacgtcatcgacgaatttccctaacgccaaacaaatttcccgcgcgtaaatatacataatatacaataaattacaaaaactacgcgaattctacataatactaccaattttaataccgcgcaaaacgcaaaacgaaaccgatttaccatcgactaaaatttcccccgccgtctaacgaacgccaacgaacaaaatacccaacgttacgacgcaaattaataatttcccgctaccgctaccgccgactaacgccaacacgcgcccgcgttacaaaattaacgatacaccgtataccaacgactacgcgacctataacgcgatattacgtaattcaatctattacgacattaatatacgtactccgtcaccaaataaaaatccaaataatcgcgcaatacgtcacccaccaaattaaaaaccatcacgctaataaacaacgccaaccccgaccaaaacatttacaacgactaaatccaaatatactaacgcgcgtcgttaatcatcacgccccattcgacgatcgacgcgatcacaccgaaaccaaaaaaaaacatccccgcgacgtacaacatcatataaccgatatccaacgttaccaacaccaacaacgaaaaaatcaccgcgcctaccaaataatcgacaaacacccgcacataacccgcaccgaatataaccgtaacgcctaactacaaactcgcgttaacgtaataaaatcaccaaactacgcaccatacgtacatacctacgccctaa

SEQ ID NO: 27513 - DNA, 981 bp, Artificial Sequence
  chemically treated genomic DNA (Homo sapiens) CpG-island No: 27513
tcgcggtcgtcgttaggtaagtcgttaatagtagtagcgtaattcgcgtcggcgttagcgttatttttacggttcgggcggtattattatttagcggtaaaatggttagttagcggcggtatagcggggtaatcgttagtaaaattattattataatttcggtgcgttagatttgcgtatcggtcgcgttgtaggtcgaatcggaaatttaggttagtatttgcgttattcgcgggttattatttgtttgtaatattattaaaagtatggtgaacgcggtgtttaacgttattttcgttagtaatatacggtgtggggaaaatttatcgcggtcggcggcgattataatgattaatagcgttatcgtcgcgtcgagattgtttgtaggtaatagttagttaaaggtattattcggtattagaaatagtattaatattacgttaaacgtcgcgtcggagttaatttttagtattttcgggtttgttatcgggttttcggttagtcgttgaataatatagttcgttatcgttagtatgacgttcgtaaatagcgtcgttataattcgcggttagcgttagggtattaaattttcgagtaacgtttcgttcgtttacgtttagtcgtgcgtattacgattaaacgatagcgttattattatagttattaatagtagtacgtcgttcgcgagggtaaacgttagtatatgttggcgtttagtcgcgatacgatcgttgatttttatattcggcgcgttaatgttgcgtaaacgcggtaatagttatagtagtagcggcgtatcgattaacgtagtgatcgaatcggtggatatttttatttatacgcgagttagttagaggatgatttgatcggaaagttagaggattagcgtattaattaacgacgttagtattagtcgtggtagtagacgtcgcgtttttagtatttttgttagtagcggcgcgaataattcgataaagtcga

SEQ ID NO: 27514 - DNA, 981 bp, Artificial Sequence
  chemically treated genomic DNA (Homo sapiens) CpG-island No: 27514
tcgactttatcgaattattcgcgccgctactaacaaaaatactaaaaacgcgacgtctactaccacgactaatactaacgtcgttaattaatacgctaatcctctaactttccgatcaaatcatcctctaactaactcgcgtataaataaaaatatccaccgattcgatcactacgttaatcgatacgccgctactactataactattaccgcgtttacgcaacattaacgcgccgaatataaaaatcaacgatcgtatcgcgactaaacgccaacatatactaacgtttaccctcgcgaacgacgtactactattaataactataataataacgctatcgtttaatcgtaatacgcacgactaaacgtaaacgaacgaaacgttactcgaaaatttaataccctaacgctaaccgcgaattataacgacgctatttacgaacgtcatactaacgataacgaactatattattcaacgactaaccgaaaacccgataacaaacccgaaaatactaaaaattaactccgacgcgacgtttaacgtaatattaatactatttctaataccgaataatacctttaactaactattacctacaaacaatctcgacgcgacgataacgctattaatcattataatcgccgccgaccgcgataaattttccccacaccgtatattactaacgaaaataacgttaaacaccgcgttcaccatacttttaataatattacaaacaaataataacccgcgaataacgcaaatactaacctaaatttccgattcgacctacaacgcgaccgatacgcaaatctaacgcaccgaaattataataataattttactaacgattaccccgctataccgccgctaactaaccattttaccgctaaataataataccgcccgaaccgtaaaaataacgctaacgccgacgcgaattacgctactactattaacgacttacctaacgacgaccgcga

SEQ ID NO: 27515 - DNA, 981 bp, Artificial Sequence
  chemically treated genomic DNA (Homo sapiens) CpG-island No: 27515
tcggttttatcgggttgttcgcgtcgttgttggtaaaaatgttgggggcgcggcgtttgttgttacgattgatgttggcgtcgttgattggtgcgttgattttttggtttttcgattaaattattttttggttgattcgcgtgtggatggaagtgtttatcggttcggttattgcgttgatcggtgcgtcgttgttattgtggttgttgtcgcgtttacgtagtattagcgcgtcggatatgaaggttaacgatcgtgtcgcggttgaacgttaatatgtgttggcgtttgttttcgcgggcggcgtgttgttgttgatggttgtggtggtggcgttgtcgtttggtcgtgatgcgtacggttggacgtgggcgagcggggcgttgttcgaggatttaatgttttggcgttggtcgcgaattatggcggcgttgtttgcgggcgttatgttggcggtggcgggttgtattatttagcgattgatcggaaattcgatggtaagttcggaagtgttggggattagtttcggcgcggcgtttggcgtggtgttgatgttgtttttggtgtcgggtaatgtttttggttggttgttatttgtaggtagtttcggcgcggcggtgacgttgttgattattatgatcgtcgtcggtcgcggtggattttttttatatcgtatgttattggcggggatggcgttaagtatcgcgtttattatgtttttgatgatgttgtaggtaagtggtgattcgcgaatggcgtaagtgttgatttggattttcggttcgatttataacgcgatcgatgcgtaggtttggcgtatcggaattgtgatggtgattttgttggcgattatttcgttgtgtcgtcgttggttgattattttatcgttgggtggtgatatcgttcgagtcgtaggaatggcgttgacgtcgacgcgaattgcgttgttgttgttagcggtttgtttgacggcgatcgcga

SEQ ID NO: 27516 - DNA, 981 bp, Artificial Sequence
  chemically treated genomic DNA (Homo sapiens) CpG-island No: 27516
tcgcgatcgccgtcaaacaaaccgctaacaacaacaacgcaattcgcgtcgacgtcaacgccattcctacgactcgaacgatatcaccacccaacgataaaataatcaaccaacgacgacacaacgaaataatcgccaacaaaatcaccatcacaattccgatacgccaaacctacgcatcgatcgcgttataaatcgaaccgaaaatccaaatcaacacttacgccattcgcgaatcaccacttacctacaacatcatcaaaaacataataaacgcgatacttaacgccatccccgccaataacatacgatataaaaaaaatccaccgcgaccgacgacgatcataataatcaacaacgtcaccgccgcgccgaaactacctacaaataacaaccaaccaaaaacattacccgacaccaaaaacaacatcaacaccacgccaaacgccgcgccgaaactaatccccaacacttccgaacttaccatcgaatttccgatcaatcgctaaataatacaacccgccaccgccaacataacgcccgcaaacaacgccgccataattcgcgaccaacgccaaaacattaaatcctcgaacaacgccccgctcgcccacgtccaaccgtacgcatcacgaccaaacgacaacgccaccaccacaaccatcaacaacaacacgccgcccgcgaaaacaaacgccaacacatattaacgttcaaccgcgacacgatcgttaaccttcatatccgacgcgctaatactacgtaaacgcgacaacaaccacaataacaacgacgcaccgatcaacgcaataaccgaaccgataaacacttccatccacacgcgaatcaaccaaaaaataatttaatcgaaaaaccaaaaaatcaacgcaccaatcaacgacgccaacatcaatcgtaacaacaaacgccgcgcccccaacatttttaccaacaacgacgcgaacaacccgataaaaccga

SEQ ID NO: 27517 - DNA, 620 bp, Artificial Sequence
  chemically treated genomic DNA (Homo sapiens) CpG-island No: 27517
acgttttcggttatggtttgacgtttggcgtttatacgcgtattgatgaattatcgcgtagttattggttcggtttatgttgtaatttgtatgtatcgtatatggtggcgtagtgttgtggtatcgttcgcggcgaaggtgttcgtatcgcggagtcgcgttcgttttatttttatttttgttggcgaatcgttcggaaagtgcgttggtagtgacgttcgcgcgttaggatgtaaagtattcggtcgatgcgtagttgaaagtcgtattgatttagtcgttaaatgtattgcgggaatgggtagtaaatcgtttagaattgtaggcgttatgtacgtaatatggcgagttggcgtaggtaggaatataacgattgttgtcggggtcgacgggtgaacgtaatatttggacgttgttgtcgcgtgagcgcgtgttgtgtattgtcgatgatgagtaggatgcgttgatttagttcgtcgtcgtgttggcggtgggtagttaggtattgtggtcggatgacgcgttgtatcgttagttagtgaaggtattgttatcggtagttagcgaacgtatttaattggcgaaagcggaaaatataatcgtttaatcgtttgatgcgg

SEQ ID NO: 27518 - DNA, 620 bp, Artificial Sequence
  chemically treated genomic DNA (Homo sapiens) CpG-island No: 27518
ccgcatcaaacgattaaacgattatattttccgctttcgccaattaaatacgttcgctaactaccgataacaataccttcactaactaacgatacaacgcgtcatccgaccacaatacctaactacccaccgccaacacgacgacgaactaaatcaacgcatcctactcatcatcgacaatacacaacacgcgctcacgcgacaacaacgtccaaatattacgttcacccgtcgaccccgacaacaatcgttatattcctacctacgccaactcgccatattacgtacataacgcctacaattctaaacgatttactacccattcccgcaatacatttaacgactaaatcaatacgactttcaactacgcatcgaccgaatactttacatcctaacgcgcgaacgtcactaccaacgcactttccgaacgattcgccaacaaaaataaaaataaaacgaacgcgactccgcgatacgaacaccttcgccgcgaacgataccacaacactacgccaccatatacgatacatacaaattacaacataaaccgaaccaataactacgcgataattcatcaatacgcgtataaacgccaaacgtcaaaccataaccgaaaacgt

SEQ ID NO: 27519 - DNA, 620 bp, Artificial Sequence
  chemically treated genomic DNA (Homo sapiens) CpG-island No: 27519
tcgtattaaacggttgagcggttatatttttcgttttcgttagttgaatacgttcgttgattgtcgatggtaatgtttttattaattgacgatgtagcgcgttattcggttatagtatttggttgtttatcgttagtacggcggcgagttgagttagcgtattttgtttattatcggtaatatataatacgcgtttacgcggtagtagcgtttaggtgttgcgtttattcgtcggtttcggtagtaatcgttgtgtttttgtttgcgttagttcgttatattgcgtatataacgtttgtaattttggacgatttgttgtttattttcgtagtgtatttagcggttgagttaatgcggtttttaattgcgtatcgatcggatattttgtattttgacgcgcgagcgttattgttagcgtatttttcgggcgattcgttagtagaggtagagatagagcggacgcggtttcgcggtacggatattttcgtcgcgaacggtgttataatattgcgttattatatacggtatatataggttataatatgggtcgagttagtgattgcgcgatggtttattaatgcgcgtatggacgttaagcgttagattataatcggaagcgt

SEQ ID NO: 27520 - DNA, 620 bp, Artificial Sequence
  chemically treated genomic DNA (Homo sapiens) CpG-island No: 27520
acgcttccgattataatctaacgcttaacgtccatacgcgcattaataaaccatcgcgcaatcactaactcgacccatattataacctatatataccgtatataataacgcaatattataacaccgttcgcgacgaaaatatccgtaccgcgaaaccgcgtccgctctatctctacctctactaacgaatcgcccgaaaaatacgctaacaataacgctcgcgcgtcaaaatacaaaatatccgatcgatacgcaattaaaaaccgcattaactcaaccgctaaatacactacgaaaataaacaacaaatcgtccaaaattacaaacgttatatacgcaatataacgaactaacgcaaacaaaaacacaacgattactaccgaaaccgacgaataaacgcaacacctaaacgctactaccgcgtaaacgcgtattatatattaccgataataaacaaaatacgctaactcaactcgccgccgtactaacgataaacaaccaaatactataaccgaataacgcgctacatcgtcaattaataaaaacattaccatcgacaatcaacgaacgtattcaactaacgaaaacgaaaaatataaccgctcaaccgtttaatacga

SEQ ID NO: 27521 - DNA, 678 bp, Artificial Sequence
  chemically treated genomic DNA (Homo sapiens) CpG-island No: 27521
tttagcgttttttttcggtgcggcgtcgtgttacggttttgtgtagttgttattttttttgttttttttcgttgggtttcgtttttatttgtttgcgtttgttttaggtgttttgttcgatcgttcgcggtttgtttttgcgttttttagtgtttttcgtttatttttttcgtttttgttttttgacgttatattttgtttgtcgatcgatacgttgtttttcggtcgttttagtcgttattttttgttttttataatgttatgaattatttcgttatttttattcgttttttgttcgttcgtagtttttcgtttttgtttgttcgcgtgtttttcgttcgttttgttttcggttcgttcgtttcgttcgggttttcgtgtcgttcgtttggtttcggttgtggcgtgttgtgcgttagtttggttgcgtcgtcgtttgtttgtggttcgtcgtttgtgtttttttgtttgtttttttttcgtttttgtttcgcgtttgcgtatttttatttttcgttatattcgcgtcgtttcgtcggcgtagcgtcgcggttgtacgttcgtcgtttattagttttttcgttttttttagtcgtttgtacgttacgtttagcgttttttgtacgtcgtatcgattatagcgcgttcgttgtatttttagtcgtcgcgttttattcg

SEQ ID NO: 27522 - DNA, 678 bp, Artificial Sequence
  chemically treated genomic DNA (Homo sapiens) CpG-island No: 27522
cgaataaaacgcgacgactaaaaatacaacgaacgcgctataatcgatacgacgtacaaaaaacgctaaacgtaacgtacaaacgactaaaaaaaacgaaaaaactaataaacgacgaacgtacaaccgcgacgctacgccgacgaaacgacgcgaatataacgaaaaataaaaatacgcaaacgcgaaacaaaaacgaaaaaaaaacaaacaaaaaaacacaaacgacgaaccacaaacaaacgacgacgcaaccaaactaacgcacaacacgccacaaccgaaaccaaacgaacgacacgaaaacccgaacgaaacgaacgaaccgaaaacaaaacgaacgaaaaacacgcgaacaaacaaaaacgaaaaactacgaacgaacaaaaaacgaataaaaataacgaaataattcataacattataaaaaacaaaaaataacgactaaaacgaccgaaaaacaacgtatcgatcgacaaacaaaatataacgtcaaaaaacaaaaacgaaaaaaataaacgaaaaacactaaaaaacgcaaaaacaaaccgcgaacgatcgaacaaaacacctaaaacaaacgcaaacaaataaaaacgaaacccaacgaaaaaaaacaaaaaaaataacaactacacaaaaccgtaacacgacgccgcaccgaaaaaaaacgctaaa

SEQ ID NO: 27523 - DNA, 678 bp, Artificial Sequence
  chemically treated genomic DNA (Homo sapiens) CpG-island No: 27523
cgagtgagacgcgacggttaggagtgtaacgaacgcgttgtaatcgatacggcgtataagaagcgttggacgtgacgtataagcgattagagggagcgagaaggttagtagacgacgagcgtatagtcgcgacgttacgtcgacgaagcggcgcgagtgtggcgaggagtagagatgcgtaagcgcgaagtagagacgaggagaagataggtagagaggtataggcggcggattataaataggcgacgacgtagttagattagcgtatagtacgttatagtcggaattagacgaacggtacgagagttcggacggaacgaacggatcgaagataggacgaacgagagatacgcgaatagataagaacggagagttacgagcgagtagagagcgagtgagagtgacgaggtaatttatgatattataagagatagagggtagcgattaggacggtcgagaagtaacgtgtcgatcggtaagtaggatgtggcgttaagagatagagacgggagggataggcggaggatattgagaggcgtaagggtaggtcgcgaacgatcggataaaatatttaggataaacgtagatagataaggacgagatttagcgaaagagagtaggaagaatagtaattatatagggtcgtgatacgacgtcgtatcggagagaaacgttgag

SEQ ID NO: 27524 - DNA, 678 bp, Artificial Sequence
  chemically treated genomic DNA (Homo sapiens) CpG-island No: 27524
ctcaacgtttctctccgatacgacgtcgtatcacgaccctatataattactattcttcctactctctttcgctaaatctcgtccttatctatctacgtttatcctaaatattttatccgatcgttcgcgacctacccttacgcctctcaatatcctccgcctatccctcccgtctctatctcttaacgccacatcctacttaccgatcgacacgttacttctcgaccgtcctaatcgctaccctctatctcttataatatcataaattacctcgtcactctcactcgctctctactcgctcgtaactctccgttcttatctattcgcgtatctctcgttcgtcctatcttcgatccgttcgttccgtccgaactctcgtaccgttcgtctaattccgactataacgtactatacgctaatctaactacgtcgtcgcctatttataatccgccgcctatacctctctacctatcttctcctcgtctctacttcgcgcttacgcatctctactcctcgccacactcgcgccgcttcgtcgacgtaacgtcgcgactatacgctcgtcgtctactaaccttctcgctccctctaatcgcttatacgtcacgtccaacgcttcttatacgccgtatcgattacaacgcgttcgttacactcctaaccgtcgcgtctcactcg

SEQ ID NO: 27525 - DNA, 525 bp, Artificial Sequence
  chemically treated genomic DNA (Homo sapiens) CpG-island No: 27525
ttagtcgggcgtaggtcggattatgatgtcggatgtcgataattaacggttcgtttatgtatttttttttacggtaggcggtggcgggtttgataataagtttgttagtgagtttttttatgtgtggcgatacgttgttcgaagtaacggcgtagacgcgcgcgatttttttcgttatttttgacgatggtttcggtaatatattttattaggtcggtaggttttttcgcgcgattcgttaaaaattaggcgcggacgtttatagtatgggttacgtttacggttttagcggtggatataatcgttgttagtgtatttattgacgtttttttttcgtcgttggtacgtagatcgcggaaggtgcggattagtaattttagtatcgcgttaggtattttatgcggaatatcgttatgggttagtaaacgcgtcgaagtattggcgattagttttaatttttgggcgaaatttataatcggaaaaatcgttttaaaatcgaagcgacgttttagcgtagtatttatt

SEQ ID NO: 27526 - DNA, 525 bp, Artificial Sequence
  chemically treated genomic DNA (Homo sapiens) CpG-island No: 27526
aataaatactacgctaaaacgtcgcttcgattttaaaacgatttttccgattataaatttcgcccaaaaattaaaactaatcgccaatacttcgacgcgtttactaacccataacgatattccgcataaaatacctaacgcgatactaaaattactaatccgcaccttccgcgatctacgtaccaacgacgaaaaaaaaacgtcaataaatacactaacaacgattatatccaccgctaaaaccgtaaacgtaacccatactataaacgtccgcgcctaatttttaacgaatcgcgcgaaaaaacctaccgacctaataaaatatattaccgaaaccatcgtcaaaaataacgaaaaaaatcgcgcgcgtctacgccgttacttcgaacaacgtatcgccacacataaaaaaactcactaacaaacttattatcaaacccgccaccgcctaccgtaaaaaaaaatacataaacgaaccgttaattatcgacatccgacatcataatccgacctacgcccgactaa

SEQ ID NO: 27527 - DNA, 525 bp, Artificial Sequence
  chemically treated genomic DNA (Homo sapiens) CpG-island No: 27527
aatgagtgttgcgttaaagcgtcgtttcgattttgaaacggttttttcgattatggatttcgtttaggagttggaattggtcgttagtgtttcggcgcgtttgttggtttatagcggtatttcgtataaagtgtttgacgcggtattggaattattggttcgtatttttcgcgatttgcgtgttaacggcgaaaagaaaacgttaatggatatattgatagcgattatgtttatcgttgaagtcgtgaacgtggtttatgttgtgggcgttcgcgtttggtttttagcgaatcgcgcgggggagtttgtcgatttggtggaatgtattgtcggaattatcgttaaagataacgaagaagatcgcgcgcgtttgcgtcgttatttcgaatagcgtgtcgttatatataaagaagtttattggtaggtttattattaagttcgttatcgtttgtcgtgaggaaagatgtatgagcgagtcgttaattgtcggtattcggtattatagttcggtttgcgttcggttgg

SEQ ID NO: 27528 - DNA, 525 bp, Artificial Sequence
  chemically treated genomic DNA (Homo sapiens) CpG-island No: 27528
ccaaccgaacgcaaaccgaactataataccgaataccgacaattaacgactcgctcatacatctttcctcacgacaaacgataacgaacttaataataaacctaccaataaacttctttatatataacgacacgctattcgaaataacgacgcaaacgcgcgcgatcttcttcgttatctttaacgataattccgacaatacattccaccaaatcgacaaactcccccgcgcgattcgctaaaaaccaaacgcgaacgcccacaacataaaccacgttcacgacttcaacgataaacataatcgctatcaatatatccattaacgttttcttttcgccgttaacacgcaaatcgcgaaaaatacgaaccaataattccaataccgcgtcaaacactttatacgaaataccgctataaaccaacaaacgcgccgaaacactaacgaccaattccaactcctaaacgaaatccataatcgaaaaaaccgtttcaaaatcgaaacgacgctttaacgcaacactcatt

SEQ ID NO: 27529 - DNA, 905 bp, Artificial Sequence
  chemically treated genomic DNA (Homo sapiens) CpG-island No: 27529
ggggcgaatattcgttttttttgtcgtcgtttcggtattttatttgttatcggttataagtggttttagcgttgggtttaggaaggtgtcgtcggtttttaggatcgttcgcgtatttcgtattatttttcgaatcgtttatttgacgatattacggttttgttgcgtatggtttatgatcgttatgaacgttggggagttcgtaagattaagcgttggttcgaggattaggggtatattatgttcgtttttagtatcgtttataatttgatggttcgttatggtttgttgtcgggcgttttatcgggtattttcgttacgggtcggttcgaatacgacgcgtcgaatcgtttttggtagatggattttaagggttattttttttttggcggtggacgttgttattcgtttattttgttggacgattattttcgtttttttttgtgtttggcgtattgtatcgatgaacggcgcgagatcgtgtagtagtagttggttagcgtgtttgagcgttacggtttgtcggatcggatgattatggataacggtttatcgtggggcgatattatcggtatttggacggcgttggagttgtggttgatgcgtttgggtattcgggtggggtattttcgggtttattattcgtagacgtaggggaagttggagcgtattatcgtagtttgtatgggggaatgttgtaggtaattggttcgaaatcgcggtgaatgtaggggttttgaatattggggaggttatatttgaggtcgaaaagcgtgaatgggagcggttagaaacgtagcgagtataggttaaagtcgaaataaaggcggtttaaggtatatattagtacggagttagcgataggttagaagtcgcgaaaaaaatattaatttgttaacgtgtta

SEQ ID NO: 27530 - DNA, 905 bp, Artificial Sequence
  chemically treated genomic DNA (Homo sapiens) CpG-island No: 27530
taacacgttaacaaattaatatttttttcgcgacttctaacctatcgctaactccgtactaatatataccttaaaccgcctttatttcgactttaacctatactcgctacgtttctaaccgctcccattcacgcttttcgacctcaaatataacctccccaatattcaaaacccctacattcaccgcgatttcgaaccaattacctacaacattcccccatacaaactacgataatacgctccaacttcccctacgtctacgaataataaacccgaaaataccccacccgaatacccaaacgcatcaaccacaactccaacgccgtccaaataccgataatatcgccccacgataaaccgttatccataatcatccgatccgacaaaccgtaacgctcaaacacgctaaccaactactactacacgatctcgcgccgttcatcgatacaatacgccaaacacaaaaaaaaacgaaaataatcgtccaacaaaataaacgaataacaacgtccaccgccaaaaaaaaaataacccttaaaatccatctaccaaaaacgattcgacgcgtcgtattcgaaccgacccgtaacgaaaatacccgataaaacgcccgacaacaaaccataacgaaccatcaaattataaacgatactaaaaacgaacataatatacccctaatcctcgaaccaacgcttaatcttacgaactccccaacgttcataacgatcataaaccatacgcaacaaaaccgtaatatcgtcaaataaacgattcgaaaaataatacgaaatacgcgaacgatcctaaaaaccgacgacaccttcctaaacccaacgctaaaaccacttataaccgataacaaataaaataccgaaacgacgacaaaaaaaacgaatattcgcccc

SEQ ID NO: 27531 - DNA, 905 bp, Artificial Sequence
  chemically treated genomic DNA (Homo sapiens) CpG-island No: 27531
taatacgttgataaattagtgtttttttcgcggtttttagtttgtcgttaatttcgtgttggtgtgtattttgggtcgtttttgtttcggttttggtttgtgttcgttgcgtttttggtcgtttttatttacgtttttcggttttaagtataatttttttagtgtttaaggtttttgtatttatcgcggtttcgaattagttgtttgtagtatttttttatgtagattgcggtgatacgttttagttttttttgcgtttgcggatgataagttcgggagtgttttattcggatatttaggcgtattagttatagttttagcgtcgtttaggtgtcggtggtgtcgttttacggtgagtcgttatttatggttattcggttcggtaggtcgtaacgtttaaatacgttgattagttgttgttgtacggtttcgcgtcgtttatcggtatagtgcgttaggtatagggaaaaacgggagtggtcgtttagtagggtgagcggatggtagcgtttatcgttaaaaggaaagtggtttttaaaatttatttgttagaggcggttcggcgcgtcgtgttcgaatcggttcgtggcgggaatgttcggtgaagcgttcggtagtaggttatggcgggttattaggttatggacggtgttgaaggcgggtatggtgtgtttttggttttcgagttagcgtttaattttgcgggttttttagcgtttatgacggttatgggttatacgtagtagggtcgtgatgtcgttagatgagcggttcggggaatggtgcggaatgcgcgggcggttttgaagatcggcggtatttttttgagtttagcgttggagttatttgtagtcggtggtaggtgaaatgtcgaagcgacggtagagggaacggatgttcgtttt

SEQ ID NO: 27532 - DNA, 905 bp, Artificial Sequence
  chemically treated genomic DNA (Homo sapiens) CpG-island No: 27532
aaaacgaacatccgttccctctaccgtcgcttcgacatttcacctaccaccgactacaaataactccaacgctaaactcaaaaaaataccgccgatcttcaaaaccgcccgcgcattccgcaccattccccgaaccgctcatctaacgacatcacgaccctactacgtataacccataaccgtcataaacgctaaaaaacccgcaaaattaaacgctaactcgaaaaccaaaaacacaccatacccgccttcaacaccgtccataacctaataacccgccataacctactaccgaacgcttcaccgaacattcccgccacgaaccgattcgaacacgacgcgccgaaccgcctctaacaaataaattttaaaaaccactttccttttaacgataaacgctaccatccgctcaccctactaaacgaccactcccgtttttccctatacctaacgcactataccgataaacgacgcgaaaccgtacaacaacaactaatcaacgtatttaaacgttacgacctaccgaaccgaataaccataaataacgactcaccgtaaaacgacaccaccgacacctaaacgacgctaaaactataactaatacgcctaaatatccgaataaaacactcccgaacttatcatccgcaaacgcaaaaaaaactaaaacgtatcaccgcaatctacataaaaaaatactacaaacaactaattcgaaaccgcgataaatacaaaaaccttaaacactaaaaaaattatacttaaaaccgaaaaacgtaaataaaaacgaccaaaaacgcaacgaacacaaaccaaaaccgaaacaaaaacgacccaaaatacacaccaacacgaaattaacgacaaactaaaaaccgcgaaaaaaacactaatttatcaacgtatta

SEQ ID NO: 27533 - DNA, 506 bp, Artificial Sequence
  chemically treated genomic DNA (Homo sapiens) CpG-island No: 27533
gttttttattttcggttcgcggttggcgttggagggtagtatcgtttatatcgttaattacgcgttcgttaaaagtttgtttttttttgtagtaggtgcgttgagttatagttgcggtacgcgtttgttgtcgcgtttgcgtggcgtattgtatattttgtcgttgttaggcgtgggtttttgcgtggtagcgttggcgattatcggcgtgtcgtcgtttaacggtttttttagtaaattttcgttgtttgttgtcggttttgcgttgttagtggagtattggattttgttgttcgttatgatttttttgatgattgaatcggtcgttagtttcgtttggtttattcgttggtttggtcgcgttgtgtttggtaaatcgagcgaggtcgtcgtcgatgtcgtatcgttgttaggattaatgcgtttggtgttgattgtattgattgtgatgtcgttgatttttagcgtaatcgtcgcgatttggttgtagtaaggagatgatgaat

SEQ ID NO: 27534 - DNA, 506 bp, Artificial Sequence
  chemically treated genomic DNA (Homo sapiens) CpG-island No: 27534
attcatcatctccttactacaaccaaatcgcgacgattacgctaaaaatcaacgacatcacaatcaatacaatcaacaccaaacgcattaatcctaacaacgatacgacatcgacgacgacctcgctcgatttaccaaacacaacgcgaccaaaccaacgaataaaccaaacgaaactaacgaccgattcaatcatcaaaaaaatcataacgaacaacaaaatccaatactccactaacaacgcaaaaccgacaacaaacaacgaaaatttactaaaaaaaccgttaaacgacgacacgccgataatcgccaacgctaccacgcaaaaacccacgcctaacaacgacaaaatatacaatacgccacgcaaacgcgacaacaaacgcgtaccgcaactataactcaacgcacctactacaaaaaaaaacaaacttttaacgaacgcgtaattaacgatataaacgatactaccctccaacgccaaccgcgaaccgaaaataaaaaac

SEQ ID NO: 27535 - DNA, 506 bp, Artificial Sequence
  chemically treated genomic DNA (Homo sapiens) CpG-island No: 27535
atttattatttttttattgtaattaggtcgcggcgattacgttggaaattagcgatattataattagtataattaatattaggcgtattgattttggtagcggtgcggtatcggcgacggtttcgttcggtttgttaggtataacgcgattaaattagcgaataaattaggcgaaattggcgatcgatttaattattagaagaattatggcgggtagtaggatttagtattttattgataacgtaaaatcggtagtaaatagcgggaatttattgaagaagtcgttgaacggcggtacgtcggtaatcgttagcgttgttacgtagaaatttacgtttggtaacggtagggtgtgtaatacgttacgtagacgcggtaataagcgcgtgtcgtagttgtaatttagcgtatttgttataaggaaaaataggtttttagcgaacgcgtggttgacgatgtaggcgatgttgttttttagcgttagtcgcgagtcgaagatggagagt

SEQ ID NO: 27536 - DNA, 506 bp, Artificial Sequence
  chemically treated genomic DNA (Homo sapiens) CpG-island No: 27536
actctccatcttcgactcgcgactaacgctaaaaaacaacatcgcctacatcgtcaaccacgcgttcgctaaaaacctatttttccttataacaaatacgctaaattacaactacgacacgcgcttattaccgcgtctacgtaacgtattacacaccctaccgttaccaaacgtaaatttctacgtaacaacgctaacgattaccgacgtaccgccgttcaacgacttcttcaataaattcccgctatttactaccgattttacgttatcaataaaatactaaatcctactacccgccataattcttctaataattaaatcgatcgccaatttcgcctaatttattcgctaatttaatcgcgttatacctaacaaaccgaacgaaaccgtcgccgataccgcaccgctaccaaaatcaatacgcctaatattaattatactaattataatatcgctaatttccaacgtaatcgccgcgacctaattacaataaaaaaataataaat

SEQ ID NO: 27537 - DNA, 856 bp, Artificial Sequence
  chemically treated genomic DNA (Homo sapiens) CpG-island No: 27537
tatttttgtcgttcgcgttgcggttacggcggtttgaatgttggtaatgatcgggcgagtggttgagatattaaattcggcgagatttaagtagtcgtttggcgtggtataagcgttttgtatatttattacgattagcgtattttgttgcggatcgaaggtaatggttttcggtcgagcggttaaggtcgttattatgttattttttgagttagcgtaggtagatgggcgcggtattgtattagtggttgaatgcgttcgtcgaaggtttcgattttcgatagaaaatcgtcgaaggttaatagtacgttttcggtattaggtacgtttgcgattttatttaatatgcgcgcgatattggcgtaagaatcgattaacgtttttatattgatgtttatcgtcgaagtgggatcggttatttgacgaacgttggtgttagtatcggagcgggtatttttttgattttgttcggttagttagtttaacgtttttttattcgcgttcgttttgtagtgtttttatttggcgcgagcggtatcgtcggttttatcggtaattattataaataatatataagagttaacgtcgcgttcggtttgttttgcggtttgttttattcgcgtagcggtcggggcgaaagtcgtgggtgtatttacgtttttgtcgaaatagaagttgaaatcggtatatcgggcggagaacgttatgttagcgtcgttttgttcggcgtagattatttttatggggatattcggttgcggatttacgcgataattatttatggtgaaaaaatcgtttttaaaatcgttttttttcgtgttttataggtcgcgtagtatttgaatatattcggtga

SEQ ID NO: 27538 - DNA, 856 bp, Artificial Sequence
  chemically treated genomic DNA (Homo sapiens) CpG-island No: 27538
tcaccgaatatattcaaatactacgcgacctataaaacacgaaaaaaaacgattttaaaaacgattttttcaccataaataattatcgcgtaaatccgcaaccgaatatccccataaaaataatctacgccgaacaaaacgacgctaacataacgttctccgcccgatataccgatttcaacttctatttcgacaaaaacgtaaatacacccacgactttcgccccgaccgctacgcgaataaaacaaaccgcaaaacaaaccgaacgcgacgttaactcttatatattatttataataattaccgataaaaccgacgataccgctcgcgccaaataaaaacactacaaaacgaacgcgaataaaaaaacgttaaactaactaaccgaacaaaatcaaaaaaatacccgctccgatactaacaccaacgttcgtcaaataaccgatcccacttcgacgataaacatcaatataaaaacgttaatcgattcttacgccaatatcgcgcgcatattaaataaaatcgcaaacgtacctaataccgaaaacgtactattaaccttcgacgattttctatcgaaaatcgaaaccttcgacgaacgcattcaaccactaatacaataccgcgcccatctacctacgctaactcaaaaaataacataataacgaccttaaccgctcgaccgaaaaccattaccttcgatccgcaacaaaatacgctaatcgtaataaatatacaaaacgcttataccacgccaaacgactacttaaatctcgccgaatttaatatctcaaccactcgcccgatcattaccaacattcaaaccgccgtaaccgcaacgcgaacgacaaaaata

SEQ ID NO: 27539 - DNA, 856 bp, Artificial Sequence
  chemically treated genomic DNA (Homo sapiens) CpG-island No: 27539
ttatcgaatatgtttaggtgttgcgcgatttgtggggtacggggaaaagcgattttaaaggcgatttttttattatgaatgattgtcgcgtgagttcgtaatcgagtgtttttatgaaagtgatttgcgtcgggtaaagcgacgttggtatggcgtttttcgttcggtatgtcgattttaatttttgtttcggtaaaggcgtaaatatatttacggttttcgtttcgatcgttgcgcggatgaaataggtcgtagagtaaatcggacgcgacgttggtttttatgtgttgtttatggtgattgtcgatgaaatcgacgatgtcgttcgcgttaaatgggaatattataaagcgggcgcggatgaagaggcgttaagttggttaatcgaataaagttagaaagatattcgtttcggtattgatattaacgttcgttagatggtcgattttatttcggcggtaaatattaatatggggacgttagtcggtttttacgttagtgtcgcgcgtatgttagatgaagtcgtaagcgtgtttggtgtcgaaggcgtgttgttaattttcgacgattttttgtcgggaatcgaaattttcggcgagcgtatttaattattgatgtaatgtcgcgtttatttatttgcgttgatttaggaggtggtatgatgacgattttaatcgttcgatcggaagttattattttcgattcgtagtaaagtgcgttgatcgtggtggatatgtaaaacgtttatgttacgttaggcggttatttagatttcgtcgggtttgatgttttaattattcgttcggttattgttaatatttaaatcgtcgtgatcgtagcgcgagcggtagggatg

SEQ ID NO: 27540 - DNA, 856 bp, Artificial Sequence
  chemically treated genomic DNA (Homo sapiens) CpG-island No: 27540
catccctaccgctcgcgctacgatcacgacgatttaaatattaacaataaccgaacgaataattaaaacatcaaacccgacgaaatctaaataaccgcctaacgtaacataaacgttttacatatccaccacgatcaacgcactttactacgaatcgaaaataataacttccgatcgaacgattaaaatcgtcatcataccacctcctaaatcaacgcaaataaataaacgcgacattacatcaataattaaatacgctcgccgaaaatttcgattcccgacaaaaaatcgtcgaaaattaacaacacgccttcgacaccaaacacgcttacgacttcatctaacatacgcgcgacactaacgtaaaaaccgactaacgtccccatattaatatttaccgccgaaataaaatcgaccatctaacgaacgttaatatcaataccgaaacgaatatctttctaactttattcgattaaccaacttaacgcctcttcatccgcgcccgctttataatattcccatttaacgcgaacgacatcgtcgatttcatcgacaatcaccataaacaacacataaaaaccaacgtcgcgtccgatttactctacgacctatttcatccgcgcaacgatcgaaacgaaaaccgtaaatatatttacgcctttaccgaaacaaaaattaaaatcgacataccgaacgaaaaacgccataccaacgtcgctttacccgacgcaaatcactttcataaaaacactcgattacgaactcacgcgacaatcattcataataaaaaaatcgcctttaaaatcgcttttccccgtaccccacaaatcgcgcaacacctaaacatattcgataa

SEQ ID NO: 27541 - DNA, 940 bp, Artificial Sequence
  chemically treated genomic DNA (Homo sapiens) CpG-island No: 27541
  unsure (367..368, 376, 379, 384, 390, 397, 402, 411, 414)
tgaatggttttcgtcgcgtacgtcgttttttgcgttatcgtttgcggtaatgttattttcgtagattagtcgtaaaggaattcggtaatgaacgaattttcggtatttatggtgtcgataatcgttatcggtttaggagtttgacgttagaattgcgcgttattttaggtaatgttggcgtttttatttagcgtgataattattgtttttgcgttacgggtaataatcgtttttatttttagacgtagcgtttcgttttttgcggcggaggtaaggtaaaatcgagatgcggtattagtgtttgttagagcgggttgttttattgtcggagaagtcgaaagcggtaagtttttgtttcggtaagcgnntgttagtntgntgagngaatanttgtcgnttatnttttcgtantgnttatattagattgtcgcgtgtataatgttatattgcgttagttaggcgtaattttttttatttagggtaaagtcggttattacgttttcggtgtagtcgtttaaaacgcgagtaggggcgggtagggttatcggaggttgtgcgggaacgtcgtgtttcgtagggatagggttgagagcgacgtttaggcgggcgagagttcggcggtagcgtgtgggtcggaggtagcggtatttatttaggtaatgtagtttcggcgggaggtcgtagcgagggtaggatatcgttatagggatcgtaggatcgttagaaaacgcgggaggttaggggcggggtagagagtcgacgtagggagtcgtcgagtggtcgttagggggggttagtcgtcgttagttcgttcggtagtagcgcgcgaaagcgggtttagcgtcgggcgggtatagagtttgggttcgtttatatatatcgttattagtttttattcgtatagtaatttttatagtttcgtttaatatagtcgcgtatt

SEQ ID NO: 27542 - DNA, 940 bp, Artificial Sequence
  chemically treated genomic DNA (Homo sapiens) CpG-island No: 27542
  unsure (527, 530, 539, 544, 551, 557, 562, 565, 573..)
aatacgcgactatattaaacgaaactataaaaattactatacgaataaaaactaataacgatatatataaacgaacccaaactctatacccgcccgacgctaaacccgctttcgcgcgctactaccgaacgaactaacgacgactaaccccccctaacgaccactcgacgactccctacgtcgactctctaccccgcccctaacctcccgcgttttctaacgatcctacgatccctataacgatatcctaccctcgctacgacctcccgccgaaactacattacctaaataaataccgctacctccgacccacacgctaccgccgaactctcgcccgcctaaacgtcgctctcaaccctatccctacgaaacacgacgttcccgcacaacctccgataaccctacccgcccctactcgcgttttaaacgactacaccgaaaacgtaataaccgactttaccctaaataaaaaaaattacgcctaactaacgcaatataacattatacacgcgacaatctaatataancantacgaaaanataancgacaantattcnctcancanactaacanncgcttaccgaaacaaaaacttaccgctttcgacttctccgacaataaaacaacccgctctaacaaacactaataccgcatctcgattttaccttacctccgccgcaaaaaacgaaacgctacgtctaaaaataaaaacgattattacccgtaacgcaaaaacaataattatcacgctaaataaaaacgccaacattacctaaaataacgcgcaattctaacgtcaaactcctaaaccgataacgattatcgacaccataaataccgaaaattcgttcattaccgaattcctttacgactaatctacgaaaataacattaccgcaaacgataacgcaaaaaacgacgtacgcgacgaaaaccattca

SEQ ID NO: 27543 - DNA, 940 bp, Artificial Sequence
  chemically treated genomic DNA (Homo sapiens) CpG-island No: 27543
  unsure (527, 530, 539, 544, 551, 557, 562, 565, 573..)
gatgcgcgattatattgagcggggttatgagggttattgtacgagtggaggttggtgacgatgtatatgaacgagtttagattttatgttcgttcggcgttggattcgttttcgcgcgttgttgtcggacggattgacgacgattgattttttttggcgattattcggcgattttttgcgtcgattttttatttcgtttttgatttttcgcgttttttggcggttttgcggtttttgtggcggtgttttgttttcgttacggtttttcgtcgggattgtattatttgggtgggtgtcgttgttttcggtttatacgttgtcgtcggattttcgttcgtttgggcgtcgtttttagttttgtttttacgaaatacggcgttttcgtataattttcggtggttttgttcgtttttgttcgcgttttgggcgattatatcgaaggcgtgatggtcgattttgttttgagtgaagaggattacgtttggttggcgtagtatgatattgtgtacgcggtaatttggtgtgantantgcgggganatgancggtaantgtttntttantangttggtanncgtttgtcggggtaagagtttatcgttttcgattttttcgatagtgggatagttcgttttggtagatattggtgtcgtatttcgattttgttttgttttcgtcgtagaagacgaaacgttgcgtttgaagatgaaagcgattgttgttcgtggcgtaggaatagtgattgttacgttgggtgaaaacgttagtattgtttgggatggcgcgtagttttggcgttaggtttttgaatcggtgacggttatcgatattatgggtgtcggagattcgtttattgtcggatttttttgcggttggtttgcggggatgatattatcgtaggcgatagcgtagggaacggcgtgcgcggcgaaaattattta

SEQ ID NO: 27544 - DNA, 940 bp, Artificial Sequence
  chemically treated genomic DNA (Homo sapiens) CpG-island No: 27544
  unsure (367..368, 376, 379, 384, 390, 397, 402, 411, 414)
taaataattttcgccgcgcacgccgttccctacgctatcgcctacgataatatcatccccgcaaaccaaccgcaaaaaaatccgacaataaacgaatctccgacacccataatatcgataaccgtcaccgattcaaaaacctaacgccaaaactacgcgccatcccaaacaatactaacgttttcacccaacgtaacaatcactattcctacgccacgaacaacaatcgctttcatcttcaaacgcaacgtttcgtcttctacgacgaaaacaaaacaaaatcgaaatacgacaccaatatctaccaaaacgaactatcccactatcgaaaaaatcgaaaacgataaactcttaccccgacaaacgnntaccaacntantaaanaaacanttaccgntcatntccccgcantantcacaccaaattaccgcgtacacaatatcatactacgccaaccaaacgtaatcctcttcactcaaaacaaaatcgaccatcacgccttcgatataatcgcccaaaacgcgaacaaaaacgaacaaaaccaccgaaaattatacgaaaacgccgtatttcgtaaaaacaaaactaaaaacgacgcccaaacgaacgaaaatccgacgacaacgtataaaccgaaaacaacgacacccacccaaataatacaatcccgacgaaaaaccgtaacgaaaacaaaacaccgccacaaaaaccgcaaaaccgccaaaaaacgcgaaaaatcaaaaacgaaataaaaaatcgacgcaaaaaatcgccgaataatcgccaaaaaaaatcaatcgtcgtcaatccgtccgacaacaacgcgcgaaaacgaatccaacgccgaacgaacataaaatctaaactcgttcatatacatcgtcaccaacctccactcgtacaataaccctcataaccccgctcaatataatcgcgcatc

SEQ ID NO: 27545 - DNA, 560 bp, Artificial Sequence
  chemically treated genomic DNA (Homo sapiens) CpG-island No: 27545
tagcgtgtcgtttttcgggcgatcgaagtagacgttgtcgtgcgtatcgtaaacgtttagatttgtatcgttagcgtaatttttgtagtaacgtatatagcggtagtaggcgatgtagcggtttatttcgtgagagatgaatggttttaaattttgattacggtgggtacgtttggtgaaacggtagcgacggaagttgtgttcggttattatagttatattttgaagatggtagttatcgttttttttatatatcggatagtcgtgcgggtggttggttattaattattcgattacgtttttacggaattgtttcgttttttcgtcgttaatggaaataaaggtgttatcggaagtcggtgttatataggatattattaggcgattacgcgtgtttttcgcgttttggtattgttttatcgtatattggcggtaagtatcgatattttttagcgtcggatgttagtaaaagtcgggaatattaaggtttagagatagataagtttttagtaggttgttcgtttcgttgatttcgtattttttgtcgtttatatgaattg

SEQ ID NO: 27546 - DNA, 560 bp, Artificial Sequence
  chemically treated genomic DNA (Homo sapiens) CpG-island No: 27546
caattcatataaacgacaaaaaatacgaaatcaacgaaacgaacaacctactaaaaacttatctatctctaaaccttaatattcccgacttttactaacatccgacgctaaaaaatatcgatacttaccgccaatatacgataaaacaataccaaaacgcgaaaaacacgcgtaatcgcctaataatatcctatataacaccgacttccgataacacctttatttccattaacgacgaaaaaacgaaacaattccgtaaaaacgtaatcgaataattaataaccaaccacccgcacgactatccgatatataaaaaaaacgataactaccatcttcaaaatataactataataaccgaacacaacttccgtcgctaccgtttcaccaaacgtacccaccgtaatcaaaatttaaaaccattcatctctcacgaaataaaccgctacatcgcctactaccgctatatacgttactacaaaaattacgctaacgatacaaatctaaacgtttacgatacgcacgacaacgtctacttcgatcgcccgaaaaacgacacgcta

SEQ ID NO: 27547 - DNA, 560 bp, Artificial Sequence
  chemically treated genomic DNA (Homo sapiens) CpG-island No: 27547
taatttatgtagacggtaaagaatacgaggttaacggagcggataatttgttggaagtttgtttgtttttgggttttgatattttcgatttttgttggtattcggcgttgggaagtgtcggtgtttgtcgttagtgtgcggtgaagtaatattaaaacgcggaagatacgcgtggtcgtttggtgatgttttgtatgatatcggttttcgatggtatttttatttttattgacgacgaagaagcgaaatagtttcgtgaaagcgtggtcgagtggttgatgattaattattcgtacgattgttcggtatgtgaagagggcggtaattgttatttttaggatatgattgtgatgatcggatatagttttcgtcgttatcgttttattaaacgtatttatcgtaattaggatttggggttatttattttttacgaaatgaatcgttgtatcgtttgttatcgttgtgtgcgttattataaagattacgttgacggtatagatttgggcgtttacggtgcgtacgataacgtttatttcggtcgttcggaagacggtacgttg

SEQ ID NO: 27548 - DNA, 560 bp, Artificial Sequence
  chemically treated genomic DNA (Homo sapiens) CpG-island No: 27548
caacgtaccgtcttccgaacgaccgaaataaacgttatcgtacgcaccgtaaacgcccaaatctataccgtcaacgtaatctttataataacgcacacaacgataacaaacgatacaacgattcatttcgtaaaaaataaataaccccaaatcctaattacgataaatacgtttaataaaacgataacgacgaaaactatatccgatcatcacaatcatatcctaaaaataacaattaccgccctcttcacataccgaacaatcgtacgaataattaatcatcaaccactcgaccacgctttcacgaaactatttcgcttcttcgtcgtcaataaaaataaaaataccatcgaaaaccgatatcatacaaaacatcaccaaacgaccacgcgtatcttccgcgttttaatattacttcaccgcacactaacgacaaacaccgacacttcccaacgccgaataccaacaaaaatcgaaaatatcaaaacccaaaaacaaacaaacttccaacaaattatccgctccgttaacctcgtattctttaccgtctacataaatta

SEQ ID NO: 27549 - DNA, 588 bp, Artificial Sequence
  chemically treated genomic DNA (Homo sapiens) CpG-island No: 27549
  unsure (35, 48, 51)
gtagttatggtcggtaagttatttggttttagggnttttaagttcggnggntggcgtattttggtgtttttatcggcgtggtttgttcggtgtgtttcggcggagtgacgttcggttattcggttaattttttgttcggtgtaaaggtttttttcggtgaaatcgatatcgttttgttcggttcgttgtcgtttattttttttcgtatttatagtagttatcggataaaaacgttcgcgtcggtggggagtttcggtttcggttggaaaatgtttgcggatattcgtttatagttgcgcgataatatattgatatttagtgataacggcggtagaagtttgtattttgagtatttgtttttcggtgaggacggttatagtcgtagcgagttattgtggttggtgcgcggcggcgtggcgaaattggatgaaggttatcggttggtcgtattttggtaggcgttgtcggaagaatttcgtttaagttcgtatcgttattttttaagcgtaaagtatgggcgtggtggaaatcgagagtcggtagcgagatagagtaagatttatcgtttttggatttgtatcgggtagt

SEQ ID NO: 27550 - DNA, 588 bp, Artificial Sequence
  chemically treated genomic DNA (Homo sapiens) CpG-island No: 27550
  unsure (538, 541, 554)
actacccgatacaaatccaaaaacgataaatcttactctatctcgctaccgactctcgatttccaccacgcccatactttacgcttaaaaaataacgatacgaacttaaacgaaattcttccgacaacgcctaccaaaatacgaccaaccgataaccttcatccaatttcgccacgccgccgcgcaccaaccacaataactcgctacgactataaccgtcctcaccgaaaaacaaatactcaaaatacaaacttctaccgccgttatcactaaatatcaatatattatcgcgcaactataaacgaatatccgcaaacattttccaaccgaaaccgaaactccccaccgacgcgaacgtttttatccgataactactataaatacgaaaaaaaataaacgacaacgaaccgaacaaaacgatatcgatttcaccgaaaaaaacctttacaccgaacaaaaaattaaccgaataaccgaacgtcactccgccgaaacacaccgaacaaaccacgccgataaaaacaccaaaatacgccanccnccgaacttaaaanccctaaaaccaaataacttaccgaccataactac

SEQ ID NO: 27551 - DNA, 588 bp, Artificial Sequence
  chemically treated genomic DNA (Homo sapiens) CpG-island No: 27551
  unsure (538, 541, 554)
gttattcgatataaatttaggaacggtgaattttgttttgtttcgttatcgattttcgatttttattacgtttatgttttgcgtttgaagaataacgatgcggatttaagcggagttttttcggtagcgtttgttagagtgcggttagtcggtgatttttatttagtttcgttacgtcgtcgcgtattagttatagtgattcgttgcggttgtaatcgtttttatcgggaaataggtgtttaaaatataggtttttgtcgtcgttattattgagtattagtgtgttatcgcgtagttgtaagcggatattcgtaggtattttttagtcggggtcgaggttttttatcggcgcgggcgtttttgttcggtaattgttgtaggtgcgggagaggatgaacggtagcgggtcgggtagggcgatgtcggttttatcgggaaggatttttgtatcgagtaggggattgatcggatggtcggacgttatttcgtcggggtatatcgaataggttacgtcggtgggggtattaaaatgcgttanttntcgggtttgaaanttttggaattaaatggtttatcggttataattgt

SEQ ID NO: 27552 - DNA, 588 bp, Artificial Sequence
  chemically treated genomic DNA (Homo sapiens) CpG-island No: 27552
  unsure (35, 48, 51)
acaattataaccgataaaccatttaattccaaaantttcaaacccganaantaacgcattttaatacccccaccgacgtaacctattcgatataccccgacgaaataacgtccgaccatccgatcaatcccctactcgatacaaaaatccttcccgataaaaccgacatcgccctacccgacccgctaccgttcatcctctcccgcacctacaacaattaccgaacaaaaacgcccgcgccgataaaaaacctcgaccccgactaaaaaatacctacgaatatccgcttacaactacgcgataacacactaatactcaataataacgacgacaaaaacctatattttaaacacctatttcccgataaaaacgattacaaccgcaacgaatcactataactaatacgcgacgacgtaacgaaactaaataaaaatcaccgactaaccgcactctaacaaacgctaccgaaaaaactccgcttaaatccgcatcgttattcttcaaacgcaaaacataaacgtaataaaaatcgaaaatcgataacgaaacaaaacaaaattcaccgttcctaaatttatatcgaataac

SEQ ID NO: 27553 - DNA, 1238 bp, Artificial Sequence
  chemically treated genomic DNA (Homo sapiens) CpG-island No: 27553
gttttttagttgcgcgatatcgcgtatatttgtcggtttgtcgttaagttgacgataaatttgcgttagcgtcgttgcgtttagcgcgttattgtttttgtttaaattaattagtagtagtgcgttattttcggtagaaagttgcggcgtgatggtgtgacgtatattttttacgcgggtaaatgtagaaattattagcgatagcggcgacgttatttcgcgtttttcgttatttttttgttagcgggtttttatcgatatggagtttttatttatcgggatcgttaggtttagcgtcggataaagtttttcgtttacggttttaacggttttatataggttcgtatttttattagcgtggtttgtcgtcgttatttagttggcggaaagtttgatgcgtatgatatcgttaatttgtgttgcggcgatgttggttaacgttttatcgatcggtagacgggtagaggcggcgaaatttagtagcgtaatcggcgtacgttcgttaatcgttatcgttttatcgtagtagttgtcgaggttggcggtagtgatcgcgtagttagcgatcggtatttgttacggttttattatttgatcgcgcgttattatgtcggttacgttgcggtcgttaatggttattaggaaggtttttttcgttattagtcggtagtatgtagtatacgtttgtatcgcgtttgtaattggtgatttttttacgggttagcgcgtcgtttttcgtttttagcgtttgtatatcgcgggttattttcggcgttttattaagtaggacgtttagcggtagatcgatcggttgattattaaaatgacgatcgtgtagagaaagatgtagtttttcggtcgttttattaattatcgcgtagggtgcgcgtttacgtttatatagttcgttaaatagcggtaattgatcggtagtaatcgttagtacgtagcgtttttgggattcgttatattagatttttagcgggtttatgttcggttcgtcgtttagaatttcgcgtagtttaaatttatcgtcgcgttcgtcgtcgtttattagtttcggtatggcgttagaaagatcgttagcgttaacgtcgtggataaataggattgggttggtattattaagttgttagtaacggtcgattattttttggtagcgacgttttattttcgggttgtcgcgttgtacggaagtaaagtcgaggtcggtattagattgattagacgttatagaa

SEQ ID NO: 27554 - DNA, 1238 bp, Artificial Sequence
  chemically treated genomic DNA (Homo sapiens) CpG-island No: 27554
ttctataacgtctaatcaatctaataccgacctcgactttacttccgtacaacgcgacaacccgaaaataaaacgtcgctaccaaaaaataatcgaccgttactaacaacttaataataccaacccaatcctatttatccacgacgttaacgctaacgatctttctaacgccataccgaaactaataaacgacgacgaacgcgacgataaatttaaactacgcgaaattctaaacgacgaaccgaacataaacccgctaaaaatctaatataacgaatcccaaaaacgctacgtactaacgattactaccgatcaattaccgctatttaacgaactatataaacgtaaacgcgcaccctacgcgataattaataaaacgaccgaaaaactacatctttctctacacgatcgtcattttaataatcaaccgatcgatctaccgctaaacgtcctacttaataaaacgccgaaaataacccgcgatatacaaacgctaaaaacgaaaaacgacgcgctaacccgtaaaaaaatcaccaattacaaacgcgatacaaacgtatactacatactaccgactaataacgaaaaaaaccttcctaataaccattaacgaccgcaacgtaaccgacataataacgcgcgatcaaataataaaaccgtaacaaataccgatcgctaactacgcgatcactaccgccaacctcgacaactactacgataaaacgataacgattaacgaacgtacgccgattacgctactaaatttcgccgcctctacccgtctaccgatcgataaaacgttaaccaacatcgccgcaacacaaattaacgatatcatacgcatcaaactttccgccaactaaataacgacgacaaaccacgctaataaaaatacgaacctatataaaaccgttaaaaccgtaaacgaaaaactttatccgacgctaaacctaacgatcccgataaataaaaactccatatcgataaaaacccgctaacaaaaaaataacgaaaaacgcgaaataacgtcgccgctatcgctaataatttctacatttacccgcgtaaaaaatatacgtcacaccatcacgccgcaactttctaccgaaaataacgcactactactaattaatttaaacaaaaacaataacgcgctaaacgcaacgacgctaacgcaaatttatcgtcaacttaacgacaaaccgacaaatatacgcgatatcgcgcaactaaaaaac

SEQ ID NO: 27555 - DNA, 1238 bp, Artificial Sequence
  chemically treated genomic DNA (Homo sapiens) CpG-island No: 27555
ttttatggcgtttggttagtttgatgtcgatttcgattttgttttcgtatagcgcgataattcggagatggagcgtcgttgttaggaagtgatcgatcgttgttggtagtttggtgatgttaatttaattttgtttatttacgacgttggcgttggcggtttttttaacgttatgtcggaattggtgagcgacggcgggcgcggcggtaaatttgaattgcgcgagattttaagcgacgaatcgggtatgagttcgttggaaatttggtgtaacgaattttaggaacgttacgtgttggcggttgttgtcgattaattatcgttgtttgacgaattgtgtaagcgtgagcgcgtattttacgcggtgattggtgaagcgatcgaagaattgtatttttttttgtacgatcgttattttgataattagtcgatcgatttgtcgttggacgttttgtttggtaaaacgtcgaagatgattcgcgatgtataaacgttgaaagcgaaaggcgacgcgttggttcgtgaagggattattagttgtagacgcggtgtaaacgtgtgttgtatattgtcgattagtggcggaaaaaatttttttggtgattattggcgatcgtagcgtaatcggtatggtagcgcgcgattagatggtggggtcgtggtaggtgtcggtcgttaattgcgcggttattatcgttagtttcgatagttattacggtgaagcgatggcgattggcgagcgtgcgtcggttgcgttgttggatttcgtcgtttttgttcgtttgtcggtcggtgaagcgttaattaatatcgtcgtaatataaattggcgatattatacgtattaaatttttcgttaattggatggcggcggtaggttacgttggtgaagatgcgggtttgtatgaagtcgttaaagtcgtgggcgaagagttttgttcggcgttgggtttgacgatttcggtgggtaaagattttatgtcgatgaaaattcgttggtaggaaggtaacgaagagcgcgaaatgacgtcgtcgttgtcgttggtgatttttgtatttgttcgcgtggaagatgtacgttatattattacgtcgtagttttttatcgaagataacgtattgttgttgattgatttgggtaaaggtaataacgcgttgggcgtaacggcgttggcgtaggtttatcgttagtttggcgataaatcggtagatgtacgcgatgtcgcgtaattgaaaggt

SEQ ID NO: 27556 - DNA, 1238 bp, Artificial Sequence
  chemically treated genomic DNA (Homo sapiens) CpG-island No: 27556
acctttcaattacgcgacatcgcgtacatctaccgatttatcgccaaactaacgataaacctacgccaacgccgttacgcccaacgcgttattacctttacccaaatcaatcaacaacaatacgttatcttcgataaaaaactacgacgtaataatataacgtacatcttccacgcgaacaaatacaaaaatcaccaacgacaacgacgacgtcatttcgcgctcttcgttaccttcctaccaacgaattttcatcgacataaaatctttacccaccgaaatcgtcaaacccaacgccgaacaaaactcttcgcccacgactttaacgacttcatacaaacccgcatcttcaccaacgtaacctaccgccgccatccaattaacgaaaaatttaatacgtataatatcgccaatttatattacgacgatattaattaacgcttcaccgaccgacaaacgaacaaaaacgacgaaatccaacaacgcaaccgacgcacgctcgccaatcgccatcgcttcaccgtaataactatcgaaactaacgataataaccgcgcaattaacgaccgacacctaccacgaccccaccatctaatcgcgcgctaccataccgattacgctacgatcgccaataatcaccaaaaaaattttttccgccactaatcgacaatatacaacacacgtttacaccgcgtctacaactaataatcccttcacgaaccaacgcgtcgcctttcgctttcaacgtttatacatcgcgaatcatcttcgacgttttaccaaacaaaacgtccaacgacaaatcgatcgactaattatcaaaataacgatcgtacaaaaaaaaatacaattcttcgatcgcttcaccaatcaccgcgtaaaatacgcgctcacgcttacacaattcgtcaaacaacgataattaatcgacaacaaccgccaacacgtaacgttcctaaaattcgttacaccaaatttccaacgaactcatacccgattcgtcgcttaaaatctcgcgcaattcaaatttaccgccgcgcccgccgtcgctcaccaattccgacataacgttaaaaaaaccgccaacgccaacgtcgtaaataaacaaaattaaattaacatcaccaaactaccaacaacgatcgatcacttcctaacaacgacgctccatctccgaattatcgcgctatacgaaaacaaaatcgaaatcgacatcaaactaaccaaacgccataaaa

SEQ ID NO: 27557 - DNA, 1158 bp, Artificial Sequence
  chemically treated genomic DNA (Homo sapiens) CpG-island No: 27557
tggttggtacgttgggtatgttaagtaaagtaatgcggattttacgttagtaggaagttacggttttgcgtatttatttgtaaattcgtatcggtttgtatgcggcgtttaatgtttgtgaagagatgtgttaacgcgtggcgttggagcgttaattggatagcgaagaacgcgtattattgattgaacgttcgtaaacggttattcgttagggtcgcgattttttttacgtttgggatgttatttggaattcggcgtaggcgttggataacgtattatagtcggatagagtaggttagtttgtcgacgttttggagaaatacgttgtcggtttggtaatcgtatttagtcgttttttttaaataacgtttgaagagatattcgttttttaggttattttgtttattttattaaaataggagtaatacgtttgttagtttttcgttcgtttgttagattggatagtttcggtattaacgttcgttacggaataggtataaggagttacgtaatgattaatcgttaatttttacgtttgttgttgtgtagtattttcggtagtacgacgttgattttcggttgtgttttggtacgtaaggattttgtattttattaatagtttaaatcggaataaattaaattggtcgacgatatttattttgttagtttcggttggtcgtaggcgtagtggtggaaataatttaatgattcgtagttggatgcgttgatttaacggacgttaagtggtttatatattttcgtcgaagcgaaattgcgggaagaaaaagcgtagttttaggtcgatttgttagatgtcggtttataattataggtcgtagcgttagggatgtttaatcgttaacgtgtttcggcgaacggttttttaagtttttatttaatggatgcgttagtattgggtggacgggtcgtattacggaagttatagtaggttgttcggattgttttgatttgtggggtgtatcgtttagcggttgtcgtcgttagcgcgtataatgtcgttggtagaaatcgtagtagtagagttatcgtggttacgggcgtagtagttttattagtataggttagattagatgttcgatttgtgataatttaatgtgatgatacgcggaaagcgtattagagtaaagtggcgtacgg

SEQ ID NO: 27558 - DNA, 1158 bp, Artificial Sequence
  chemically treated genomic DNA (Homo sapiens) CpG-island No: 27558
ccgtacgccactttactctaatacgctttccgcgtatcatcacattaaattatcacaaatcgaacatctaatctaacctatactaataaaactactacgcccgtaaccacgataactctactactacgatttctaccaacgacattatacgcgctaacgacgacaaccgctaaacgatacaccccacaaatcaaaacaatccgaacaacctactataacttccgtaatacgacccgtccacccaatactaacgcatccattaaataaaaacttaaaaaaccgttcgccgaaacacgttaacgattaaacatccctaacgctacgacctataattataaaccgacatctaacaaatcgacctaaaactacgctttttcttcccgcaatttcgcttcgacgaaaatatataaaccacttaacgtccgttaaatcaacgcatccaactacgaatcattaaattatttccaccactacgcctacgaccaaccgaaactaacaaaataaatatcgtcgaccaatttaatttattccgatttaaactattaataaaatacaaaatccttacgtaccaaaacacaaccgaaaatcaacgtcgtactaccgaaaatactacacaacaacaaacgtaaaaattaacgattaatcattacgtaactccttatacctattccgtaacgaacgttaataccgaaactatccaatctaacaaacgaacgaaaaactaacaaacgtattactcctattttaataaaataaacaaaataacctaaaaaacgaatatctcttcaaacgttatttaaaaaaaacgactaaatacgattaccaaaccgacaacgtatttctccaaaacgtcgacaaactaacctactctatccgactataatacgttatccaacgcctacgccgaattccaaataacatcccaaacgtaaaaaaaatcgcgaccctaacgaataaccgtttacgaacgttcaatcaataatacgcgttcttcgctatccaattaacgctccaacgccacgcgttaacacatctcttcacaaacattaaacgccgcatacaaaccgatacgaatttacaaataaatacgcaaaaccgtaacttcctactaacgtaaaatccgcattactttacttaacatacccaacgtaccaacca

SEQ ID NO: 27559 - DNA, 1158 bp, Artificial Sequence
  chemically treated genomic DNA (Homo sapiens) CpG-island No: 27559
tcgtgcgttattttattttggtgcgtttttcgcgtattattatattgagttgttatagatcgagtatttgatttggtttatattgataaagttgttacgttcgtggttacgatagttttattgttgcggtttttgttagcggtattatgcgcgttggcggcggtaatcgttgagcgatgtattttataaattaagatagttcggataatttattgtggttttcgtagtacggttcgtttatttagtgttggcgtatttattgaataagggtttaaaaagtcgttcgtcgagatacgttggcggttgagtatttttaacgttgcgatttgtaattgtgaatcggtatttaataaatcggtttgggattgcgtttttttttttcgtagtttcgtttcggcgagggtgtgtgaattatttagcgttcgttggattagcgtatttagttgcgggttattgagttgtttttattattgcgtttgcggttagtcggagttggtaagatgaatatcgtcggttagtttgatttgtttcggtttgagttgttgatgaggtgtagaatttttacgtattagggtatagtcggaaattagcgtcgtgttgtcgagaatgttgtataatagtagacgtgaaagttgacgattgattattgcgtggttttttgtgtttgtttcgtggcgggcgttaatgtcggggttgtttagtttggtaagcgggcgaaaagttggtagacgtgttgtttttgttttaataaggtgggtaggatggtttgagaggcgggtgtttttttaagcgttatttgaggagaacggttgagtgcggttgttagatcggtagcgtatttttttagggcgtcggtaaattgatttgttttgttcggttgtagtgcgttatttagcgtttgcgtcgagttttaggtggtattttaggcgtgaagaagatcgcggttttgacgaataatcgtttgcgaacgtttaattagtaatgcgcgtttttcgttgtttagttgacgttttagcgttacgcgttggtatatttttttataggtattaaacgtcgtatgtagatcgatacgaatttgtagataagtgcgtagagtcgtgattttttgttggcgtgggattcgtattattttatttaatatatttagcgtgttagtta

SEQ ID NO: 27560 - DNA, 1158 bp, Artificial Sequence
  chemically treated genomic DNA (Homo sapiens) CpG-island No: 27560
taactaacacgctaaatatattaaataaaataatacgaatcccacgccaacaaaaaatcacgactctacgcacttatctacaaattcgtatcgatctacatacgacgtttaatacctataaaaaaatataccaacgcgtaacgctaaaacgtcaactaaacaacgaaaaacgcgcattactaattaaacgttcgcaaacgattattcgtcaaaaccgcgatcttcttcacgcctaaaataccacctaaaactcgacgcaaacgctaaataacgcactacaaccgaacaaaacaaatcaatttaccgacgccctaaaaaaatacgctaccgatctaacaaccgcactcaaccgttctcctcaaataacgcttaaaaaaacacccgcctctcaaaccatcctacccaccttattaaaacaaaaacaacacgtctaccaacttttcgcccgcttaccaaactaaacaaccccgacattaacgcccgccacgaaacaaacacaaaaaaccacgcaataatcaatcgtcaactttcacgtctactattatacaacattctcgacaacacgacgctaatttccgactataccctaatacgtaaaaattctacacctcatcaacaactcaaaccgaaacaaatcaaactaaccgacgatattcatcttaccaactccgactaaccgcaaacgcaataataaaaacaactcaataacccgcaactaaatacgctaatccaacgaacgctaaataattcacacaccctcgccgaaacgaaactacgaaaaaaaaaaacgcaatcccaaaccgatttattaaataccgattcacaattacaaatcgcaacgttaaaaatactcaaccgccaacgtatctcgacgaacgactttttaaacccttattcaataaatacgccaacactaaataaacgaaccgtactacgaaaaccacaataaattatccgaactatcttaatttataaaatacatcgctcaacgattaccgccgccaacgcgcataataccgctaacaaaaaccgcaacaataaaactatcgtaaccacgaacgtaacaactttatcaatataaaccaaatcaaatactcgatctataacaactcaatataataatacgcgaaaaacgcaccaaaataaaataacgcacga

SEQ ID NO: 27561 - DNA, 720 bp, Artificial Sequence
  chemically treated genomic DNA (Homo sapiens) CpG-island No: 27561
aacgttggcgtatagatgatgtaggtatgaagtagtaggaacgttagcggcgtagttaggaagattagtcgtggaatgttcgataagaagtggaatatggcgttgacgtaatatagtcgttgagtaaattttagttttttatcggtgagcgggttatcgagacggaagatttgtattatttcgcgcgtttagcgaatacgttgatcgatatgcgtcgatagattttcggtcgttagtttcgtttgtttgtcggaatacgtattatagcgttggtaggtattaggttacggattgggtgtaaatcgtggtagagtaacgttattcgcggttattcgttttagggtttaacgggttatcgatagtaatgtcgttaattttatttagcggtttacgacgaattatcgtataggaatcgtagaagaaagtggcgttttatatatcgttgttattttgtattagattatagaatagcgtgttttcgttcggcgttttacggaaacgttttaggttgcgtttaaacgggttcggtgagaagaagtggtgcggcgtttgtattatcgttagttgttttttttttaggaattagtttatggttatttgtaagaacgatcgcgttggtacgtggtcgtagtcgaaaatcgatacgaattcgttttgggtatattttagcgtattgttgatgttgtttgttttcgtatgtttatgagtggtgcgggcgat

SEQ ID NO: 27562 - DNA, 720 bp, Artificial Sequence
  chemically treated genomic DNA (Homo sapiens) CpG-island No: 27562
atcgcccgcaccactcataaacatacgaaaacaaacaacatcaacaatacgctaaaatatacccaaaacgaattcgtatcgattttcgactacgaccacgtaccaacgcgatcgttcttacaaataaccataaactaattcctaaaaaaaaaacaactaacgataatacaaacgccgcaccacttcttctcaccgaacccgtttaaacgcaacctaaaacgtttccgtaaaacgccgaacgaaaacacgctattctataatctaatacaaaataacaacgatatataaaacgccactttcttctacgattcctatacgataattcgtcgtaaaccgctaaataaaattaacgacattactatcgataacccgttaaaccctaaaacgaataaccgcgaataacgttactctaccacgatttacacccaatccgtaacctaatacctaccaacgctataatacgtattccgacaaacaaacgaaactaacgaccgaaaatctatcgacgcatatcgatcaacgtattcgctaaacgcgcgaaataatacaaatcttccgtctcgataacccgctcaccgataaaaaactaaaatttactcaacgactatattacgtcaacgccatattccacttcttatcgaacattccacgactaatcttcctaactacgccgctaacgttcctactacttcatacctacatcatctatacgccaacgtt

SEQ ID NO: 27563 - DNA, 720 bp, Artificial Sequence
  chemically treated genomic DNA (Homo sapiens) CpG-island No: 27563
atcgttcgtattatttatgaatatgcgaaagtaggtaatattaataatgcgttgaaatatgtttaaggcgagttcgtgtcgattttcgattgcgattacgtattaacgcgatcgtttttgtaaatgattatgggttggtttttgaaagaaaaatagttggcgatgatgtagacgtcgtattatttttttttatcggattcgtttgaacgtaatttggggcgttttcgtaaaacgtcgaacgaaggtacgttgttttatggtttggtgtaggatggtaacgatatgtgggacgttatttttttttgcggtttttgtgcggtgattcgtcgtaagtcgttggatgaaattggcggtattgttgtcgataattcgttggattttgaaacgaatggtcgcgaataacgttgttttgttacggtttgtatttagttcgtggtttaatatttgttagcgttataatgcgtatttcggtaggtaggcggggttggcgatcgaaagtttgtcggcgtatatcggttagcgtattcgttgggcgcgcgggatggtataaatttttcgtttcgataattcgtttatcggtaaagggttgaagtttgtttagcggttatgttacgttaacgttatgttttattttttgtcgggtattttacggttgatttttttgattgcgtcgttggcgtttttgttgttttatgtttatattatttatgcgttagcgtt

SEQ ID NO: 27564 - DNA, 720 bp, Artificial Sequence
  chemically treated genomic DNA (Homo sapiens) CpG-island No: 27564
aacgctaacgcataaataatataaacataaaacaacaaaaacgccaacgacgcaatcaaaaaaatcaaccgtaaaatacccgacaaaaaataaaacataacgttaacgtaacataaccgctaaacaaacttcaaccctttaccgataaacgaattatcgaaacgaaaaatttataccatcccgcgcgcccaacgaatacgctaaccgatatacgccgacaaactttcgatcgccaaccccgcctacctaccgaaatacgcattataacgctaacaaatattaaaccacgaactaaatacaaaccgtaacaaaacaacgttattcgcgaccattcgtttcaaaatccaacgaattatcgacaacaataccgccaatttcatccaacgacttacgacgaatcaccgcacaaaaaccgcaaaaaaaaataacgtcccacatatcgttaccatcctacaccaaaccataaaacaacgtaccttcgttcgacgttttacgaaaacgccccaaattacgttcaaacgaatccgataaaaaaaaataatacgacgtctacatcatcgccaactatttttctttcaaaaaccaacccataatcatttacaaaaacgatcgcgttaatacgtaatcgcaatcgaaaatcgacacgaactcgccttaaacatatttcaacgcattattaatattacctactttcgcatattcataaataatacgaacgat

SEQ ID NO: 27565 - DNA, 630 bp, Artificial Sequence
  chemically treated genomic DNA (Homo sapiens) CpG-island No: 27565
  unsure (224, 278, 288, 402, 443)
atttagtagcggacgtagtagaaaatcgtcgaggcgtagggtttgtattttcgttatatagtgtgaacgattggttttttttatacgttcgttaaatcgcgtttgttgacgaaattgttggataacggttttatgttattgatgatttcgttaaagtcgtcgttgatattcgttaaataggcgcgtatacgacggataatcggcgtgttgtaacgttggtatanttatttattatttattaagtattaattcgggataaatttattatcgcgtattangtgttatttngttagtcgaggttgaatatcgttattagtatcgcgtttattagcgcggtattgcgtaggatagttgttatttacgggtaaacggtaaggaggatttcgcggaatttattttagntggttattaagtgacgcgggaaattatttgttcgacgggtngggtattaaattcgtttaatggttggcgtaacgtagtatttattacgtcggtacgtaattgttgcgattaacgtttatatgcgcggttcggagtttaaaattagggtaagcgaaaattgcgtcgtttaattggttagtttcggggcggtaatatagttgtagtttaatatacgtcgtagttagtttt

SEQ ID NO: 27566 - DNA, 630 bp, Artificial Sequence
  chemically treated genomic DNA (Homo sapiens) CpG-island No: 27566
  unsure (188, 229, 343, 353, 407)
aaaactaactacgacgtatattaaactacaactatattaccgccccgaaactaaccaattaaacgacgcaattttcgcttaccctaattttaaactccgaaccgcgcatataaacgttaatcgcaacaattacgtaccgacgtaataaatactacgttacgccaaccattaaacgaatttaatacccnacccgtcgaacaaataatttcccgcgtcacttaataaccanctaaaataaattccgcgaaatcctccttaccgtttacccgtaaataacaactatcctacgcaataccgcgctaataaacgcgatactaataacgatattcaacctcgactaacnaaataacacntaatacgcgataataaatttatcccgaattaatacttaataaataataaataantataccaacgttacaacacgccgattatccgtcgtatacgcgcctatttaacgaatatcaacgacgactttaacgaaatcatcaataacataaaaccgttatccaacaatttcgtcaacaaacgcgatttaacgaacgtataaaaaaaaccaatcgttcacactatataacgaaaatacaaaccctacgcctcgacgattttctactacgtccgctactaaat

SEQ ID NO: 27567 - DNA, 630 bp, Artificial Sequence
  chemically treated genomic DNA (Homo sapiens) CpG-island No: 27567
  unsure (188, 229, 343, 353, 407)
agggttggttgcggcgtatgttgggttgtaattgtattgtcgtttcggggttaattaattaagcggcgtagttttcgtttgttttggttttaaatttcgggtcgcgtatgtaggcgttagtcgtaatagttgcgtatcgacgtgatggatgttgcgttacgttagttattaagcgagtttgatatttnattcgtcgggtaggtgatttttcgcgttatttaatgattanttgaagtgaatttcgcggaattttttttatcgtttattcgtaagtggtaattgttttgcgtagtgtcgcgttggtgggcgcgatgttggtggcgatgtttagtttcgattggtngaatggtatntggtgcgcgataatggatttgtttcgggttggtgtttggtgggtaatgggtgantatattagcgttatagtacgtcgattgttcgtcgtgtgcgcgtttatttggcggatattaacgacggttttaacgaaattattaatggtatggagtcgttatttagtagtttcgttagtaggcgcgatttggcgaacgtatgggggaggttagtcgtttatattatatggcgaggatgtaaattttgcgtttcgacggttttttgttgcgttcgttgttgagt

SEQ ID NO: 27568 - DNA, 630 bp, Artificial Sequence
  chemically treated genomic DNA (Homo sapiens) CpG-island No: 27568
  unsure (224, 278, 288, 402, 443)
actcaacaacgaacgcaacaaaaaaccgtcgaaacgcaaaatttacatcctcgccatataatataaacgactaacctcccccatacgttcgccaaatcgcgcctactaacgaaactactaaataacgactccataccattaataatttcgttaaaaccgtcgttaatatccgccaaataaacgcgcacacgacgaacaatcgacgtactataacgctaatatantcacccattacccaccaaacaccaacccgaaacaaatccattatcgcgcaccanataccattcnaccaatcgaaactaaacatcgccaccaacatcgcgcccaccaacgcgacactacgcaaaacaattaccacttacgaataaacgataaaaaaaattccgcgaaattcacttcaantaatcattaaataacgcgaaaaatcacctacccgacgaatnaaatatcaaactcgcttaataactaacgtaacgcaacatccatcacgtcgatacgcaactattacgactaacgcctacatacgcgacccgaaatttaaaaccaaaacaaacgaaaactacgccgcttaattaattaaccccgaaacgacaatacaattacaacccaacatacgccgcaaccaaccct

SEQ ID NO: 27569 - DNA, 684 bp, Artificial Sequence
  chemically treated genomic DNA (Homo sapiens) CpG-island No: 27569
gcggtagcgttattcgttgatttcgaaagcgtcgcgatatgtggcgaaggcggatttgatttttgggaggtcgtttttgttcgttagtcgtcgttatcgtcgttaggtggagattttgttatcgcgttggggttggcgtttgggaaggcgtattgatgaattcgttaattaattttttgttttggcgatagtaacgtcggatcgtttttttgcgtttttggttgttgatgttcgttgcgtttttgttgttggtcgtcgggataacgttaatattgcgtttgataggtagcgtcgaagcgcgtatagacgtagttttgttttaggcggaataataattcgttcgtagtttatagataacgaagttacgtttgttggagtaatagtagttacgcgaatagcgttcgtaacggtagcgttagcgataatttattcgcgattggtaatttgcgttggaagtattggcggcgtttttattcgagtacgtttggttgataacgataagttggtagtagggaacgttggagattaaggggttgataataagtattatcgcgttaaacgtattagaaacgttatttcgttaggatgtatttttttattttaattagcggggagttacgtagtaggatgcgtagggacgttggtaatttgagtattagttaataaggaaggttagcgatgaat

SEQ ID NO: 27570 - DNA, 684 bp, Artificial Sequence
  chemically treated genomic DNA (Homo sapiens) CpG-island No: 27570
attcatcgctaaccttccttattaactaatactcaaattaccaacgtccctacgcatcctactacgtaactccccgctaattaaaataaaaaaatacatcctaacgaaataacgtttctaatacgtttaacgcgataatacttattatcaaccccttaatctccaacgttccctactaccaacttatcgttatcaaccaaacgtactcgaataaaaacgccgccaatacttccaacgcaaattaccaatcgcgaataaattatcgctaacgctaccgttacgaacgctattcgcgtaactactattactccaacaaacgtaacttcgttatctataaactacgaacgaattattattccgcctaaaacaaaactacgtctatacgcgcttcgacgctacctatcaaacgcaatattaacgttatcccgacgaccaacaacaaaaacgcaacgaacatcaacaaccaaaaacgcaaaaaaacgatccgacgttactatcgccaaaacaaaaaattaattaacgaattcatcaatacgccttcccaaacgccaaccccaacgcgataacaaaatctccacctaacgacgataacgacgactaacgaacaaaaacgacctcccaaaaatcaaatccgccttcgccacatatcgcgacgctttcgaaatcaacgaataacgctaccgc

SEQ ID NO: 27571 - DNA, 684 bp, Artificial Sequence
  chemically treated genomic DNA (Homo sapiens) CpG-island No: 27571
gtttatcgttaattttttttgttaattgatatttaaattgttagcgtttttgcgtattttgttgcgtggtttttcgttgattgagatgaaaagatgtattttggcggagtgacgtttttagtgcgtttaacgcggtaatgtttgttgttagttttttgatttttagcgttttttgttgttagtttatcgttgttagttaggcgtgttcgggtaaaagcgtcgttagtgtttttagcgtagattgttagtcgcgggtaaattgtcgttggcgttgtcgttgcgaacgttgttcgcgtaattgttgttgttttagtaaacgtggtttcgttatttgtaagttgcgggcgagttgttgtttcgtttgaagtaaaattgcgtttatgcgcgtttcggcgttgtttgttagacgtagtattagcgttatttcgacggttagtagtagaggcgtaacgaatattagtaattagaaacgtagaaaagcggttcggcgttgttgtcgttagggtaaaaaattaattggcgggtttattagtacgtttttttaagcgttagttttagcgcgatggtaaagtttttatttggcggcggtagcggcggttgacgaatagaaacggttttttagggattaaattcgttttcgttatatatcgcgacgttttcgggattaacggataacgttgtcgt

SEQ ID NO: 27572 - DNA, 684 bp, Artificial Sequence
  chemically treated genomic DNA (Homo sapiens) CpG-island No: 27572
acgacaacgttatccgttaatcccgaaaacgtcgcgatatataacgaaaacgaatttaatccctaaaaaaccgtttctattcgtcaaccgccgctaccgccgccaaataaaaactttaccatcgcgctaaaactaacgcttaaaaaaacgtactaataaacccgccaattaattttttaccctaacgacaacaacgccgaaccgcttttctacgtttctaattactaatattcgttacgcctctactactaaccgtcgaaataacgctaatactacgtctaacaaacaacgccgaaacgcgcataaacgcaattttacttcaaacgaaacaacaactcgcccgcaacttacaaataacgaaaccacgtttactaaaacaacaacaattacgcgaacaacgttcgcaacgacaacgccaacgacaatttacccgcgactaacaatctacgctaaaaacactaacgacgcttttacccgaacacgcctaactaacaacgataaactaacaacaaaaaacgctaaaaatcaaaaaactaacaacaaacattaccgcgttaaacgcactaaaaacgtcactccgccaaaatacatcttttcatctcaatcaacgaaaaaccacgcaacaaaatacgcaaaaacgctaacaatttaaatatcaattaacaaaaaaaattaacgataaac

SEQ ID NO: 27573 - DNA, 930 bp, Artificial Sequence
  chemically treated genomic DNA (Homo sapiens) CpG-island No: 27573
  unsure (741..742, 744, 754..755, 763..764, 766, 772..773, 775, 783..784)
  unsure (788..789, 803..804, 898, 902, 924)
ggtattcgtcgtagtatgttgtttgtgtttggtgttaatgtcgcgatggttagtaatttttttatttattcggttgatgttttgatgtttgatttcgaagatttcgtagtattgcgtgaaaaagatatcgttcgtcgtatggtttattacgcgttgtaatattcgttgtatcgcgatattgaaattattgtgcgtgttaacgcgttggatttcgaatggggtgttaacgatttggaagtcgtcgttcgcggtggtgcggacgttgtgcgtttgtcgaaaatcgatatcgtttaggatgttttggatattgaaaaagagattttgcgtatcgaaaaagtttgtggtcgtgaattcggtagtatcggtttgttggcggcgattgaattttcgttggggattattcgcgtagtggaaatcgtttacgttttcgagcgtttgatcggtatcgttttcggtgtagaagattatgtgcgtaatttgcgtatagaacgtttttcggaaggaattgaattgttgttcgtacgttgttttattttgtaggtcgcgcgttttgcgggtatttaggcgttcgatatcgtttatttcgacgttaataacgaagtcggatttttgtaagaagtcggttatattaaatagttgggttttgacggtaaatcgttgattaattcgcgttagattgatttgttgtataatttttacgtatcgatttagaaagaagtggattacgttcgtcgcgtcgtnnangaagtcgttnngaagtcgnntncgtttnngncgaacggnntttnncggcgtggtttttnnttgaacggtaagatggtggacggttcggttatcgatcgcgttcgtttggtgttttttcgtgtagaatttttcggtattcgcgaagaataaggtnattnaaatgacgtagaaaattgaatnatttta

SEQ ID NO: 27574 - DNA, 930 bp, Artificial Sequence
  chemically treated genomic DNA (Homo sapiens) CpG-island No: 27574
  unsure (7, 29, 33, 127..128, 142..143, 147..148, 156, 158..159, 165)
  unsure (167..168, 176..177, 187, 189..)
taaaatnattcaattttctacgtcatttnaatnaccttattcttcgcgaataccgaaaaattctacacgaaaaaacaccaaacgaacgcgatcgataaccgaaccgtccaccatcttaccgttcaannaaaaaccacgccgnnaaannccgttcgncnnaaacgnanncgacttcnnaacgacttcntnnacgacgcgacgaacgtaatccacttctttctaaatcgatacgtaaaaattatacaacaaatcaatctaacgcgaattaatcaacgatttaccgtcaaaacccaactatttaatataaccgacttcttacaaaaatccgacttcgttattaacgtcgaaataaacgatatcgaacgcctaaatacccgcaaaacgcgcgacctacaaaataaaacaacgtacgaacaacaattcaattccttccgaaaaacgttctatacgcaaattacgcacataatcttctacaccgaaaacgataccgatcaaacgctcgaaaacgtaaacgatttccactacgcgaataatccccaacgaaaattcaatcgccgccaacaaaccgatactaccgaattcacgaccacaaactttttcgatacgcaaaatctctttttcaatatccaaaacatcctaaacgatatcgattttcgacaaacgcacaacgtccgcaccaccgcgaacgacgacttccaaatcgttaacaccccattcgaaatccaacgcgttaacacgcacaataatttcaatatcgcgatacaacgaatattacaacgcgtaataaaccatacgacgaacgatatctttttcacgcaatactacgaaatcttcgaaatcaaacatcaaaacatcaaccgaataaataaaaaaattactaaccatcgcgacattaacaccaaacacaaacaacatactacgacgaatacc

SEQ ID NO: 27575 - DNA, 930 bp, Artificial Sequence
  chemically treated genomic DNA (Homo sapiens) CpG-island No: 27575
  unsure (7, 29, 33, 127..128, 142..143, 147..148, 156, 158..159, 165)
  unsure (167..168, 176..177, 187, 189..)
tgagatngtttaattttttgcgttatttngatngttttatttttcgcggatgtcggaaagttttgtacgggagagtattagacgggcgcgatcgataatcggatcgtttattattttgtcgtttagnnggaaattacgtcgnnaggnntcgttcgntnngagcgngnncggttttnnagcggttttntnnacgacgcggcgggcgtgatttatttttttttgggtcggtgcgtagaggttgtgtagtagattaatttgacgcgggttgattagcgatttgtcgttaaagtttagttgtttgatgtggtcggttttttgtagaaattcggtttcgttgttagcgtcggaatagacggtatcgaacgtttgaatattcgtagagcgcgcggtttgtaaaatggaatagcgtgcgaatagtagtttagtttttttcggggagcgttttgtacgtaggttgcgtatatagttttttgtatcgagggcgatatcgattaaacgttcggaagcgtgagcgatttttattgcgcgggtaatttttagcggagatttaatcgtcgttagtaggtcggtgttgtcgggtttacgattataggttttttcgatacgtaggattttttttttaatatttagaatattttgagcggtatcggttttcggtagacgtataacgttcgtattatcgcgaacgacggtttttaggtcgttaatattttattcggaatttagcgcgttgatacgtataatggttttaatatcgcgatatagcggatgttgtagcgcgtggtaaattatgcggcgggcggtgttttttttacgtaatgttacggagttttcgaggttaaatattagggtattagtcgggtagatgaaggagttgttgattatcgcggtattggtattaggtataaataatatgttgcggcgggtgtt

SEQ ID NO: 27576 - DNA, 930 bp, Artificial Sequence
  chemically treated genomic DNA (Homo sapiens) CpG-island No: 27576
  unsure (741..742, 744, 754..755, 763..764, 766, 772..773, 775, 783..784)
  unsure (788..789, 803..804, 898, 902, 924)
aacacccgccgcaacatattatttatacctaataccaataccgcgataatcaacaactccttcatctacccgactaataccctaatatttaacctcgaaaactccgtaacattacgtaaaaaaaacaccgcccgccgcataatttaccacgcgctacaacatccgctatatcgcgatattaaaaccattatacgtatcaacgcgctaaattccgaataaaatattaacgacctaaaaaccgtcgttcgcgataatacgaacgttatacgtctaccgaaaaccgataccgctcaaaatattctaaatattaaaaaaaaaatcctacgtatcgaaaaaacctataatcgtaaacccgacaacaccgacctactaacgacgattaaatctccgctaaaaattacccgcgcaataaaaatcgctcacgcttccgaacgtttaatcgatatcgccctcgatacaaaaaactatatacgcaacctacgtacaaaacgctccccgaaaaaaactaaactactattcgcacgctattccattttacaaaccgcgcgctctacgaatattcaaacgttcgataccgtctattccgacgctaacaacgaaaccgaatttctacaaaaaaccgaccacatcaaacaactaaactttaacgacaaatcgctaatcaacccgcgtcaaattaatctactacacaacctctacgcaccgacccaaaaaaaaataaatcacgcccgccgcgtcgtnnanaaaaccgctnnaaaaccgnncncgctcnnancgaacganncctnncgacgtaatttccnnctaaacgacaaaataataaacgatccgattatcgatcgcgcccgtctaatactctcccgtacaaaactttccgacatccgcgaaaaataaaacnatcnaaataacgcaaaaaattaaacnatctca

SEQ ID NO: 27577 - DNA, 1011 bp, Artificial Sequence
  chemically treated genomic DNA (Homo sapiens) CpG-island No: 27577
tcgatgttttagggtataggtgatttttcgttcggcgtttatatcggtttatttgttttgtatttgcgttatcgttagttcgtacgatgttagttagcggcggttttttttatttattcgtttagttaggattttattttttagtcggtcgagtatttgtattagtatcggcgggaatattatattgttatcgttttcgttatcggattgttgaagggtattcgttaggttgcggcgttgcgttttcgttagtttatcggtggcggttttaattttgatgagtggcgtgaagtttttcggttgataaatcgtttggatgcgggttttgtcgttttgtatcgtggttaggcggtcgtcgttttagtcgtattaggttatttgcggttttcgtgatagcgatatttagttcgttaggtttcgtttacgtcgttatattcgttttgttattttgcggtttagcgggtcgtaaagatagcgattttcgattagcggttttgtatattgtgttcgcgtgtagtgtattagtcggtgttgattgtcgtaatggtatcggtgggtgcgtttattattcgtgcggataatttttttcgggatgaggtcggttttttttgttagtttgtcgtgacggttatatcggtaaagatagtgcgcgttacgggcgatacggttattcggttatatgttgagggtgttgttcgggtgtagtttcgggtcgggtaggcggttatttgtcgggtttgtggtatacgggatgcggatatttagattcgttgcggtggtgtgaacgtcggttagtttgtcggtggtgttgtagttgtaatttcgggtttggcgcgggttgttgatgcggatgagttcgtcgttgtcgttttaggtgtaatcgcggttagatagtaggttgtttaggtgttggttttgtaattgttcggtaggggtataagcggtggtgagtttataacggtcgaagttgcgtagcgtttttcggtgtaggcggtcgcgggtgtattttat

SEQ ID NO: 27578 - DNA, 1011 bp, Artificial Sequence
  chemically treated genomic DNA (Homo sapiens) CpG-island No: 27578
ataaaatacacccgcgaccgcctacaccgaaaaacgctacgcaacttcgaccgttataaactcaccaccgcttatacccctaccgaacaattacaaaaccaacacctaaacaacctactatctaaccgcgattacacctaaaacgacaacgacgaactcatccgcatcaacaacccgcgccaaacccgaaattacaactacaacaccaccgacaaactaaccgacgttcacaccaccgcaacgaatctaaatatccgcatcccgtataccacaaacccgacaaataaccgcctacccgacccgaaactacacccgaacaacaccctcaacatataaccgaataaccgtatcgcccgtaacgcgcactatctttaccgatataaccgtcacgacaaactaacaaaaaaaaccgacctcatcccgaaaaaaattatccgcacgaataataaacgcacccaccgataccattacgacaatcaacaccgactaatacactacacgcgaacacaatatacaaaaccgctaatcgaaaatcgctatctttacgacccgctaaaccgcaaaataacaaaacgaatataacgacgtaaacgaaacctaacgaactaaatatcgctatcacgaaaaccgcaaataacctaatacgactaaaacgacgaccgcctaaccacgatacaaaacgacaaaacccgcatccaaacgatttatcaaccgaaaaacttcacgccactcatcaaaattaaaaccgccaccgataaactaacgaaaacgcaacgccgcaacctaacgaatacccttcaacaatccgataacgaaaacgataacaatataatattcccgccgatactaatacaaatactcgaccgactaaaaaataaaatcctaactaaacgaataaataaaaaaaaccgccgctaactaacatcgtacgaactaacgataacgcaaatacaaaacaaataaaccgatataaacgccgaacgaaaaatcacctataccctaaaacatcga

SEQ ID NO: 27579 - DNA, 1011 bp, Artificial Sequence
  chemically treated genomic DNA (Homo sapiens) CpG-island No: 27579
gtggagtatattcgcgatcgtttgtatcgggaaacgttgcgtagtttcggtcgttatgaatttattatcgtttatatttttgtcgggtagttatagagttagtatttgaatagtttgttgtttgatcgcgattatatttggaacgataacggcgaatttattcgtattagtagttcgcgttagattcggagttatagttatagtattatcggtaggttgatcggcgtttatattatcgtagcgaatttggatattcgtatttcgtatgttatagattcggtaggtaatcgtttgttcgattcggagttgtattcggatagtatttttagtatgtggtcggataatcgtatcgttcgtgacgcgtattatttttatcggtatgatcgttacggtaggttgatagagaaaatcgattttatttcggaaggggttattcgtacggatgatgagcgtatttatcggtattattacgatagttagtatcggttggtgtattatacgcggatataatatgtagagtcgttggtcgaaagtcgttatttttacgattcgttgggtcgtagggtggtaaaacgggtatggcggcgtgaacgggatttgacgggttggatgtcgttgttacggaaatcgtaagtgatttggtacggttgggacggcgatcgtttgattacgatatagaacgatagaattcgtatttagacgatttattagtcggggagttttacgttatttattagggttgaaatcgttatcggtgagttggcgaaaacgtagcgtcgtagtttggcggatattttttagtagttcggtggcgaagacggtggtagtgtggtgttttcgtcggtgttggtgtagatgttcgatcggttggaaagtgaaattttggttgagcgggtgagtgaggaaagtcgtcgttggttggtatcgtgcgggttgacggtggcgtagatgtaaggtagatgggtcggtataaacgtcgggcgaaaaattatttgtattttgggatatcgg

SEQ ID NO: 27580 - DNA, 1011 bp, Artificial Sequence
  chemically treated genomic DNA (Homo sapiens) CpG-island No: 27580
ccgatatcccaaaatacaaataatttttcgcccgacgtttataccgacccatctaccttacatctacgccaccgtcaacccgcacgataccaaccaacgacgactttcctcactcacccgctcaaccaaaatttcactttccaaccgatcgaacatctacaccaacaccgacgaaaacaccacactaccaccgtcttcgccaccgaactactaaaaaatatccgccaaactacgacgctacgttttcgccaactcaccgataacgatttcaaccctaataaataacgtaaaactccccgactaataaatcgtctaaatacgaattctatcgttctatatcgtaatcaaacgatcgccgtcccaaccgtaccaaatcacttacgatttccgtaacaacgacatccaacccgtcaaatcccgttcacgccgccatacccgttttaccaccctacgacccaacgaatcgtaaaaataacgactttcgaccaacgactctacatattatatccgcgtataatacaccaaccgatactaactatcgtaataataccgataaatacgctcatcatccgtacgaataaccccttccgaaataaaatcgattttctctatcaacctaccgtaacgatcataccgataaaaataatacgcgtcacgaacgatacgattatccgaccacatactaaaaatactatccgaatacaactccgaatcgaacaaacgattacctaccgaatctataacatacgaaatacgaatatccaaattcgctacgataatataaacgccgatcaacctaccgataatactataactataactccgaatctaacgcgaactactaatacgaataaattcgccgttatcgttccaaatataatcgcgatcaaacaacaaactattcaaatactaactctataactacccgacaaaaatataaacgataataaattcataacgaccgaaactacgcaacgtttcccgatacaaacgatcgcgaatatactccac

SEQ ID NO: 27581 - DNA, 755 bp, Artificial Sequence
  chemically treated genomic DNA (Homo sapiens) CpG-island No: 27581
  unsure (407, 410, 462..463, 527, 540..541, 688, 707, 716, 728, 730)
  unsure (734, 736..737, 748..)
ttgtcgacgtcggagcgttgtaggatttgcggtgaggtaatcgcgtttgtatataatagtatttttttgttggtcgttgcgcgggttgggatggtgttgtcgttttttagttattcgacgtttatcgcgcgtttgtcgttaaaaatgatgtgatcggttatagcgtgagtacgaatggttaggttaggacgcgatttggtttgatcgagatagttacgcgcggtgttggcgcgacggttttgcggcgtgacggtgcgatttatcggattaaaatttttttgttgataatcgttgagatcgttcgtgcgcgggtagttcgtttgtacgttcgttttaattatcgttttaaatagcggattgacgtcgggtttggaggtagtgacgtttatcgggttatttatcgtcgntgnataggttcgtttttaatttaataattcggcgaggtttttcgggtttttggtnnggtagtagggtaggtagtcgaggtagttttagttttttagatcgggtttttgcgtttagttatncgagattttaagnncgtattgcgtacgggaatggttaggttattaattgttttcgggttttggaagttttaaggtcggaatcgggaattttttaagcgttttaaggaaatttcgttgttttaagcgttcggagcgggattttatcgggttaaatcgttttnttaaattggggtcgggggncgggggttntaatttttttantnaaananncgggttttagnngtttcg

SEQ ID NO: 27582 - DNA, 755 bp, Artificial Sequence
  chemically treated genomic DNA (Homo sapiens) CpG-island No: 27582
  unsure (7..8, 19..20, 22, 26, 28, 40, 49, 68, 215..216, 229, 293..294)
  unsure (346, 349)
cgaaacnnctaaaacccgnntntttnantaaaaaaattanaacccccgncccccgaccccaatttaanaaaacgatttaacccgataaaatcccgctccgaacgcttaaaacaacgaaatttccttaaaacgcttaaaaaattcccgattccgaccttaaaacttccaaaacccgaaaacaattaataacctaaccattcccgtacgcaatacgnncttaaaatctcgnataactaaacgcaaaaacccgatctaaaaaactaaaactacctcgactacctaccctactaccnnaccaaaaacccgaaaaacctcgccgaattattaaattaaaaacgaacctatncancgacgataaataacccgataaacgtcactacctccaaacccgacgtcaatccgctatttaaaacgataattaaaacgaacgtacaaacgaactacccgcgcacgaacgatctcaacgattatcaacaaaaaaattttaatccgataaatcgcaccgtcacgccgcaaaaccgtcgcgccaacaccgcgcgtaactatctcgatcaaaccaaatcgcgtcctaacctaaccattcgtactcacgctataaccgatcacatcatttttaacgacaaacgcgcgataaacgtcgaataactaaaaaacgacaacaccatcccaacccgcgcaacgaccaacaaaaaaatactattatatacaaacgcgattacctcaccgcaaatcctacaacgctccgacgtcgacaa

SEQ ID NO: 27583 - DNA, 755 bp, Artificial Sequence
  chemically treated genomic DNA (Homo sapiens) CpG-island No: 27583
  unsure (7..8, 19..20, 22, 26, 28, 40, 49, 68, 215..216, 229, 293..294)
  unsure (346, 349)
cggaatnnttggaattcgnntntttnantggaaaaattanaattttcgnttttcggttttaatttggnggaacggtttggttcggtgaaatttcgtttcgggcgtttaaaataacggggtttttttggggcgtttggggaattttcggtttcggttttggaatttttaaaattcgggggtaattggtggtttaattattttcgtgcgtaatgcgnntttggaatttcgnataattgggcgtaagaattcggtttggagaattggagttatttcgattgtttgttttattattnngttaagggttcgaagaatttcgtcgaattattgggttgaaaacgaatttatntancggcggtgaatggttcggtgagcgttattatttttaaattcggcgttaattcgttgtttgaagcgatgattgaagcgggcgtgtaggcgggttattcgcgtacggacgattttaacggttattagtaggaaggttttggttcgatggatcgtatcgttacgtcgtagggtcgtcgcgttagtatcgcgcgtggttatttcgattaggttaaatcgcgttttaatttgattattcgtatttacgttatgatcgattatattatttttgacggtaaacgcgcggtgggcgtcgaatggttggaaggcgatagtattattttaattcgcgtaacggttaataaagaagtgttgttatgtgtaggcgcgattgttttatcgtagattttgtaacgtttcggcgtcggtaa

SEQ ID NO: 27584 - DNA, 755 bp, Artificial Sequence
  chemically treated genomic DNA (Homo sapiens) CpG-island No: 27584
  unsure (407, 410, 462..463, 527, 540..541, 688, 707, 716, 728, 730)
  unsure (734, 736..737, 748..)
ttaccgacgccgaaacgttacaaaatctacgataaaacaatcgcgcctacacataacaacacttctttattaaccgttacgcgaattaaaataatactatcgccttccaaccattcgacgcccaccgcgcgtttaccgtcaaaaataatataatcgatcataacgtaaatacgaataatcaaattaaaacgcgatttaacctaatcgaaataaccacgcgcgatactaacgcgacgaccctacgacgtaacgatacgatccatcgaaccaaaaccttcctactaataaccgttaaaatcgtccgtacgcgaataacccgcctacacgcccgcttcaatcatcgcttcaaacaacgaattaacgccgaatttaaaaataataacgctcaccgaaccattcaccgccgntanataaattcgttttcaacccaataattcgacgaaattcttcgaacccttaacnnaataataaaacaaacaatcgaaataactccaattctccaaaccgaattcttacgcccaattatncgaaattccaaanncgcattacgcacgaaaataattaaaccaccaattacccccgaattttaaaaattccaaaaccgaaaccgaaaattccccaaacgccccaaaaaaaccccgttattttaaacgcccgaaacgaaatttcaccgaaccaaaccgttccnccaaattaaaaccgaaaancgaaaattntaatttttccantnaaananncgaattccaannattccg

SEQ ID NO: 27585 - DNA, 596 bp, Artificial Sequence
  chemically treated genomic DNA (Homo sapiens) CpG-island No: 27585
gtttatacggtttgtcgggaataggtttattacgttacgcggatttagcgttttttcggcgtttaatttatttagtatgtcgttggcgtttttaaatagtcgttgcgttttaacgtttattattttattttttagaatgcgcggatatttttcggttagcgattaggttataaagaacggtgtttagtcgatgtaattacgtagcgtttcgatgttggtttcgattttttgtacgtcgagacggtgcgttatcggcggcgtgtaagtttgttagttaaaagcgaaatcgttatcgcgcgtcgtttttagcgtgatcggtggtgtgcgcggttttttgcgttcgtgttgaatacgtacggtttcgtattttttgcgggtacgagcgataaaattattacgttgggtatcggaaagtagcgtcgttattatattaacggtacgcgaggtattttgtatatatatcgtcgggtcgttgtagttttgttcgatttttatcgtcgtgtgcgtttttgaggtcgtcgcgtcgttaattagtaacggaatagtgaagttttgacgttttatttttttcgttacgttaattatttcgtttagcg

SEQ ID NO: 27586 - DNA, 596 bp, Artificial Sequence
  chemically treated genomic DNA (Homo sapiens) CpG-island No: 27586
cgctaaacgaaataattaacgtaacgaaaaaaataaaacgtcaaaacttcactattccgttactaattaacgacgcgacgacctcaaaaacgcacacgacgataaaaatcgaacaaaactacaacgacccgacgatatatatacaaaatacctcgcgtaccgttaatataataacgacgctactttccgatacccaacgtaataattttatcgctcgtacccgcaaaaaatacgaaaccgtacgtattcaacacgaacgcaaaaaaccgcgcacaccaccgatcacgctaaaaacgacgcgcgataacgatttcgcttttaactaacaaacttacacgccgccgataacgcaccgtctcgacgtacaaaaaatcgaaaccaacatcgaaacgctacgtaattacatcgactaaacaccgttctttataacctaatcgctaaccgaaaaatatccgcgcattctaaaaaataaaataataaacgttaaaacgcaacgactatttaaaaacgccaacgacatactaaataaattaaacgccgaaaaaacgctaaatccgcgtaacgtaataaacctattcccgacaaaccgtataaac

SEQ ID NO: 27587 - DNA, 596 bp, Artificial Sequence
  chemically treated genomic DNA (Homo sapiens) CpG-island No: 27587
cgttggacgagatggttaacgtggcgaaagagatggagcgttagggttttattatttcgttattgattggcggcgcgacgattttaaaagcgtatacggcggtgaaaatcgagtagaattatagcggttcgacggtgtatgtgtagaatgtttcgcgtatcgttggtgtggtggcggcgttgtttttcgatatttagcgtgatgattttgtcgttcgtattcgtaaggagtacgaaatcgtacgtatttagtacgggcgtaagaaatcgcgtatattatcggttacgttggaagcggcgcgcgataacgatttcgtttttgattggtaggtttatacgtcgtcggtggcgtatcgtttcggcgtgtaggaagtcgaagttagtatcgaaacgttgcgtaattatatcgattggatatcgttttttatgatttggtcgttggtcgggaagtattcgcgtattttggaagatgaagtggtgggcgttgaggcgtagcggttgtttaaagacgttaacgatatgttggataaattaagcgtcgagaaaacgttgaattcgcgtggcgtggtgggtttgttttcggtaaatcgtgtgggt

SEQ ID NO: 27588 - DNA, 596 bp, Artificial Sequence
  chemically treated genomic DNA (Homo sapiens) CpG-island No: 27588
acccacacgatttaccgaaaacaaacccaccacgccacgcgaattcaacgttttctcgacgcttaatttatccaacatatcgttaacgtctttaaacaaccgctacgcctcaacgcccaccacttcatcttccaaaatacgcgaatacttcccgaccaacgaccaaatcataaaaaacgatatccaatcgatataattacgcaacgtttcgatactaacttcgacttcctacacgccgaaacgatacgccaccgacgacgtataaacctaccaatcaaaaacgaaatcgttatcgcgcgccgcttccaacgtaaccgataatatacgcgatttcttacgcccgtactaaatacgtacgatttcgtactccttacgaatacgaacgacaaaatcatcacgctaaatatcgaaaaacaacgccgccaccacaccaacgatacgcgaaacattctacacatacaccgtcgaaccgctataattctactcgattttcaccgccgtatacgcttttaaaatcgtcgcgccgccaatcaataacgaaataataaaaccctaacgctccatctctttcgccacgttaaccatctcgtccaacg

SEQ ID NO: 27589 - DNA, 537 bp, Artificial Sequence
  chemically treated genomic DNA (Homo sapiens) CpG-island No: 27589
gttttattcgatgtcgatcgtatatcggtattgatggtattgcgtgagtatgtttttggatttgagattttgtatatcgatgaggagattattttttacgagtgtgacgggttgagcgcgtatcgtacgcgtttattattggttgttttgtttaagtaaatggaataggtgatagcgattttggttgtttgttatcgtttgcgtgtatcggtggtgattcgtggtgtaggtatcgggttttttggtggcgcgttgtcgttggaaaaaggtgtgttgttggtgatggcgcgttttaaagagattttcgatattaatttcgttggtcgtcgcgcgcgcgtgtagttaggcgtgcgtaatttggcgattttttaggtcgttgtatcgtataatttttattacgtatcggatttttttttataaatcgtttgttttattggcggtaatgtggttgaaaatgtcggcggcgtttattgtttgaaatatggtttgatcgtatataatttgttgaaaattgaagtgtaaacgttggacggcgag

SEQ ID NO: 27590 - DNA, 537 bp, Artificial Sequence
  chemically treated genomic DNA (Homo sapiens) CpG-island No: 27590
ctcgccgtccaacgtttacacttcaattttcaacaaattatatacgatcaaaccatatttcaaacaataaacgccgccgacattttcaaccacattaccgccaataaaacaaacgatttataaaaaaaaatccgatacgtaataaaaattatacgatacaacgacctaaaaaatcgccaaattacgcacgcctaactacacgcgcgcgcgacgaccaacgaaattaatatcgaaaatctctttaaaacgcgccatcaccaacaacacacctttttccaacgacaacgcgccaccaaaaaacccgatacctacaccacgaatcaccaccgatacacgcaaacgataacaaacaaccaaaatcgctatcacctattccatttacttaaacaaaacaaccaataataaacgcgtacgatacgcgctcaacccgtcacactcgtaaaaaataatctcctcatcgatatacaaaatctcaaatccaaaaacatactcacgcaataccatcaataccgatatacgatcgacatcgaataaaac

SEQ ID NO: 27591 - DNA, 537 bp, Artificial Sequence
  chemically treated genomic DNA (Homo sapiens) CpG-island No: 27591
ttcgtcgtttagcgtttgtattttaatttttagtaggttatgtacggttagattatattttaggtagtggacgtcgtcggtatttttagttatattgtcgttaatggaataggcgatttgtgaggaagggttcggtgcgtagtagagattatgcggtgtaacggtttgggagatcgttaggttacgtacgtttggttgtacgcgcgcgcggcgattaacggggttaatgtcgaggatttttttaaagcgcgttattattaataatatatttttttttagcggtagcgcgttattagaaagttcggtgtttgtattacgggttattatcggtatacgtaggcgatggtagatagttagaatcgttgttatttgttttatttgtttaggtagaataattagtaatggacgcgtgcgatacgcgtttaattcgttatattcgtaaggaatgatttttttatcggtatgtaggattttaagtttagggatatgtttacgtagtgttattagtatcgatgtgcggtcgatatcgggtaaagt

SEQ ID NO: 27592 - DNA, 537 bp, Artificial Sequence
  chemically treated genomic DNA (Homo sapiens) CpG-island No: 27592
actttacccgatatcgaccgcacatcgatactaataacactacgtaaacatatccctaaacttaaaatcctacataccgataaaaaaatcattccttacgaatataacgaattaaacgcgtatcgcacgcgtccattactaattattctacctaaacaaataaaacaaataacaacgattctaactatctaccatcgcctacgtataccgataataacccgtaatacaaacaccgaactttctaataacgcgctaccgctaaaaaaaaatatattattaataataacgcgctttaaaaaaatcctcgacattaaccccgttaatcgccgcgcgcgcgtacaaccaaacgtacgtaacctaacgatctcccaaaccgttacaccgcataatctctactacgcaccgaacccttcctcacaaatcgcctattccattaacgacaatataactaaaaataccgacgacgtccactacctaaaatataatctaaccgtacataacctactaaaaattaaaatacaaacgctaaacgacgaa

SEQ ID NO: 27593 - DNA, 508 bp, Artificial Sequence
  chemically treated genomic DNA (Homo sapiens) CpG-island No: 27593
cggtttcggtggggcgatcggtgtaggtttcggtttaaattcggtgttattggttgtaatagtggtcggatcgagcgacggtgttgcggtattatttgttcgtatttttttcgttgcgtttttcggcggttgcgtcggtaacgtttgggtggcggttggtattatattaggtttattacgatcgttcgttttcggtattagcgggatagtcgcgaatttattttgataatgttttttttgttcgtttagtagttttggaagtataattatttttagcgttattagtacgatcgtgtttattaatcgattttgaaatttatttgttatcgttttttttcgcgttaattatttttatgatatgtgcgatcgtgtggaaagaattatatattagtacggtgtttttcgttttagcgttcgttattgcggtattttatgtttgcgtaacgttattaaatgatttgtcgttatttaaatgtttaagtagttgttttgtcgtggtatcgcgcgg

SEQ ID NO: 27594 - DNA, 508 bp, Artificial Sequence
  chemically treated genomic DNA (Homo sapiens) CpG-island No: 27594
ccgcgcgataccacgacaaaacaactacttaaacatttaaataacgacaaatcatttaataacgttacgcaaacataaaataccgcaataacgaacgctaaaacgaaaaacaccgtactaatatataattctttccacacgatcgcacatatcataaaaataattaacgcgaaaaaaaacgataacaaataaatttcaaaatcgattaataaacacgatcgtactaataacgctaaaaataattatacttccaaaactactaaacgaacaaaaaaaacattatcaaaataaattcgcgactatcccgctaataccgaaaacgaacgatcgtaataaacctaatataataccaaccgccacccaaacgttaccgacgcaaccgccgaaaaacgcaacgaaaaaaatacgaacaaataataccgcaacaccgtcgctcgatccgaccactattacaaccaataacaccgaatttaaaccgaaacctacaccgatcgccccaccgaaaccg

SEQ ID NO: 27595 - DNA, 508 bp, Artificial Sequence
  chemically treated genomic DNA (Homo sapiens) CpG-island No: 27595
tcgcgcggtgttacggtagaataattgtttgagtatttgggtaacggtaaattatttgatagcgttgcgtaggtatgggatgtcgtaatggcggacgttaaagcggaagatatcgtgttggtgtgtggttttttttatacggtcgtatatgttatggaagtgattgacgcgaggagaagcggtggtaagtaagttttagaatcggttagtgggtacgatcgtgttggtggcgttgggggtgattgtatttttagggttgttggacgggtagaaaaaatattattaggatgagttcgcggttatttcgttggtgtcgaaagcgggcgatcgtgatgagtttgatatgatgttagtcgttatttaggcgttatcgacgtagtcgtcggaaggcgtagcggaagaggtgcgggtaggtgatgtcgtagtatcgtcgttcgattcggttattattgtagttaataatatcgagtttgaatcggaatttgtatcggtcgttttatcgaagtcg

SEQ ID NO: 27596 - DNA, 508 bp, Artificial Sequence
  chemically treated genomic DNA (Homo sapiens) CpG-island No: 27596
cgacttcgataaaacgaccgatacaaattccgattcaaactcgatattattaactacaataataaccgaatcgaacgacgatactacgacatcacctacccgcacctcttccgctacgccttccgacgactacgtcgataacgcctaaataacgactaacatcatatcaaactcatcacgatcgcccgctttcgacaccaacgaaataaccgcgaactcatcctaataatattttttctacccgtccaacaaccctaaaaatacaatcacccccaacgccaccaacacgatcgtacccactaaccgattctaaaacttacttaccaccgcttctcctcgcgtcaatcacttccataacatatacgaccgtataaaaaaaaccacacaccaacacgatatcttccgctttaacgtccgccattacgacatcccatacctacgcaacgctatcaaataatttaccgttacccaaatactcaaacaattattctaccgtaacaccgcgcga

SEQ ID NO: 27597 - DNA, 963 bp, Artificial Sequence
  chemically treated genomic DNA (Homo sapiens) CpG-island No: 27597
  unsure (19)
ttgtagcgcggaggtgagnttggtaggttttttttatgtcggtgtcggacggtcgtcgtcgattattattatgatatcgttttgtataattttttttcgtttgatcgttttgatcgtttgcgttttcgagataaatattcgtattcggtcggtgtggtggtatacgttattttcgtttattatcgacgggtcgatcgtcgtggttttgattatcgaatttttcggcgcgatgttgttcgtcgggaagtagatcgtcgaggttagttttttcgtttttgtttttttcggcggtaggattacgttattcggttttacgtcgttttgttcgcgtaggtattggcggaagcgcgttcggcgttcggacgtttgttattatttaaggttttcgtttatcgtttggtcggttacggttatggcgtttagatgtagtaggtcgaggtcgcgtaggtggagtattattttcggtacgtcgttcgcgaggaaggcgcgtacggtcgggtgatagttcgggtcgttgggtagtacgtttattagacgcggtattttacggttgatgcgcgtttagtgtttaacgttcgggatcgtgtagttcgtcgcgtgggcgatggtcggaatgtgtagtagtaaattggtggagtcgtcgaacgtcgcgtggattattatcgcgttttcgatggttttatcggagaggatatttcgcgtggtgatgtcgcggttatttagttcgttgatcgcgcgcgtcgattggcgggcgatttttagttatatcgtttgttcggacggcgttagcgcggagtgcggtagcgttagatttagcgttttcgcgattatttgcgaggtgttcgtcgtgtcgaggaattgatattcgtcgttcggcgaggcgtaggcgcgatagtttagttcgcggttttttgtagggagagttcgtggttggcgaaacgcgcgtcgatggtttgtattttg

SEQ ID NO: 27598 - DNA, 963 bp, Artificial Sequence
  chemically treated genomic DNA (Homo sapiens) CpG-island No: 27598
  unsure (945)
caaaatacaaaccatcgacgcgcgtttcgccaaccacgaactctccctacaaaaaaccgcgaactaaactatcgcgcctacgcctcgccgaacgacgaatatcaattcctcgacacgacgaacacctcgcaaataatcgcgaaaacgctaaatctaacgctaccgcactccgcgctaacgccgtccgaacaaacgatataactaaaaatcgcccgccaatcgacgcgcgcgatcaacgaactaaataaccgcgacatcaccacgcgaaatatcctctccgataaaaccatcgaaaacgcgataataatccacgcgacgttcgacgactccaccaatttactactacacattccgaccatcgcccacgcgacgaactacacgatcccgaacgttaaacactaaacgcgcatcaaccgtaaaataccgcgtctaataaacgtactacccaacgacccgaactatcacccgaccgtacgcgccttcctcgcgaacgacgtaccgaaaataatactccacctacgcgacctcgacctactacatctaaacgccataaccgtaaccgaccaaacgataaacgaaaaccttaaataataacaaacgtccgaacgccgaacgcgcttccgccaatacctacgcgaacaaaacgacgtaaaaccgaataacgtaatcctaccgccgaaaaaaacaaaaacgaaaaaactaacctcgacgatctacttcccgacgaacaacatcgcgccgaaaaattcgataatcaaaaccacgacgatcgacccgtcgataataaacgaaaataacgtataccaccacaccgaccgaatacgaatatttatctcgaaaacgcaaacgatcaaaacgatcaaacgaaaaaaaattatacaaaacgatatcataataataatcgacgacgaccgtccgacaccgacataaaaaaaacctaccaanctcacctccgcgctacaa

SEQ ID NO: 27599 - DNA, 963 bp, Artificial Sequence
  chemically treated genomic DNA (Homo sapiens) CpG-island No: 27599
  unsure (945)
taaggtgtagattatcggcgcgcgtttcgttaattacgaattttttttgtaggaggtcgcgaattgggttgtcgcgtttgcgtttcgtcgggcggcgggtgttagtttttcggtacggcgggtatttcgtaggtggtcgcggaggcgttgggtttggcgttgtcgtatttcgcgttggcgtcgttcgggtaggcggtgtggttggagatcgttcgttagtcggcgcgcgcggttagcgagttggatagtcgcggtattattacgcgggatatttttttcgataaagttatcgaaaacgcgatggtgatttacgcggcgttcggcggttttattaatttattgttgtatatttcggttatcgtttacgcggcgggttgtacgatttcggacgttgagtattggacgcgtattaatcgtaaagtgtcgcgtttggtgagcgtgttgtttaacggttcggattattattcgatcgtgcgcgtttttttcgcgggcggcgtgtcggaggtgatgttttatttgcgcgatttcggtttgttgtatttggacgttatgatcgtgatcggttagacggtgggcgagaattttgaatggtggtaggcgttcgagcgtcgggcgcgttttcgttagtgtttgcgcgagtaggacggcgtagagtcggatgacgtgattttgtcgtcggagaaggtaaaagcgaaagggttgatttcgacggtttgtttttcgacgggtaatatcgcgtcggaaggttcggtgattaaggttacggcgatcgattcgtcggtggtgggcgaagatggcgtatattattatatcggtcgggtgcgggtgtttgtttcggaagcgtaggcgattaaggcgattaagcgggaagagattgtgtagggcgatattatggtggtgatcggcggcggtcgttcggtatcggtatggaagagatttattagntttattttcgcgttataa

SEQ ID NO: 27600 - DNA, 963 bp, Artificial Sequence
  chemically treated genomic DNA (Homo sapiens) CpG-island No: 27600
  unsure (19)
ttataacgcgaaaataaanctaataaatctcttccataccgataccgaacgaccgccgccgatcaccaccataatatcgccctacacaatctcttcccgcttaatcgccttaatcgcctacgcttccgaaacaaacacccgcacccgaccgatataataatatacgccatcttcgcccaccaccgacgaatcgatcgccgtaaccttaatcaccgaaccttccgacgcgatattacccgtcgaaaaacaaaccgtcgaaatcaaccctttcgcttttaccttctccgacgacaaaatcacgtcatccgactctacgccgtcctactcgcgcaaacactaacgaaaacgcgcccgacgctcgaacgcctaccaccattcaaaattctcgcccaccgtctaaccgatcacgatcataacgtccaaatacaacaaaccgaaatcgcgcaaataaaacatcacctccgacacgccgcccgcgaaaaaaacgcgcacgatcgaataataatccgaaccgttaaacaacacgctcaccaaacgcgacactttacgattaatacgcgtccaatactcaacgtccgaaatcgtacaacccgccgcgtaaacgataaccgaaatatacaacaataaattaataaaaccgccgaacgccgcgtaaatcaccatcgcgttttcgataactttatcgaaaaaaatatcccgcgtaataataccgcgactatccaactcgctaaccgcgcgcgccgactaacgaacgatctccaaccacaccgcctacccgaacgacgccaacgcgaaatacgacaacgccaaacccaacgcctccgcgaccacctacgaaatacccgccgtaccgaaaaactaacacccgccgcccgacgaaacgcaaacgcgacaacccaattcgcgacctcctacaaaaaaaattcgtaattaacgaaacgcgcgccgataatctacacctta

SEQ ID NO: 27601 - DNA, 955 bp, Artificial Sequence
  chemically treated genomic DNA (Homo sapiens) CpG-island No: 27601
aatggattcgtcgttttaaaggggaaaaaaagaggtttttacgtaatttcgatttcgtatttagttttggcgttaataggtataggtatcgggcgaagcgaaatcggatttttgttagttagtttagttttttcgtcgttttaaaattgaagaagtatggtcggaagatttgttggcgaagaaatcggaattgcgtggtaaaacgttgtacgaagtgttgtatgttatatcggaagtgagtaaattttcggtattcgaattggcggaagattagttgaacgatgaatttcgcgagttgggtttttatttgtaaaaagggttgttcgaagagtacgtatggtttggtcgcggttacggttacgatttggtatcgttcgatgattattattaagcgcgcggtttgcgttggtcggtggtgaacggtaaagaaacgtagtggcgttatagcgaaggtaacgattcgtacgtgaaagcgggcgaaggttataagttttacggtaaatcggatggtaaagcggtgattttcgtattgttattcgaatcggcggcggaagtatcggatgaagagtacgatttgtggttttttatcggacgcgttttggagtattggtatatcggtagtatgattcgtcgtgtattagaattgtatcgcgttttttcggaagcggttttgtttatttattcgttggatgcgaaagcgcgcgatttgcgtcgtggcgataaagtgaaagtggtttttcgtcgtggcgaagtgatttcgattgttgaaacgcgcggtcgtaatcgttcgttatagggtttggtgtatatgtcgtttttcgacgtcgtatagttggttaataaattgacgttggatgcgatcgattcgttttcgaaagagacggattttaagaagtgcgcggttaaattggagaaggtgtaagttattatgtttcggttagcgaaattttaaaat

SEQ ID NO: 27602 - DNA, 955 bp, Artificial Sequence
  chemically treated genomic DNA (Homo sapiens) CpG-island No: 27602
attttaaaatttcgctaaccgaaacataataacttacaccttctccaatttaaccgcgcacttcttaaaatccgtctctttcgaaaacgaatcgatcgcatccaacgtcaatttattaaccaactatacgacgtcgaaaaacgacatatacaccaaaccctataacgaacgattacgaccgcgcgtttcaacaatcgaaatcacttcgccacgacgaaaaaccactttcactttatcgccacgacgcaaatcgcgcgctttcgcatccaacgaataaataaacaaaaccgcttccgaaaaaacgcgatacaattctaatacacgacgaatcatactaccgatataccaatactccaaaacgcgtccgataaaaaaccacaaatcgtactcttcatccgatacttccgccgccgattcgaataacaatacgaaaatcaccgctttaccatccgatttaccgtaaaacttataaccttcgcccgctttcacgtacgaatcgttaccttcgctataacgccactacgtttctttaccgttcaccaccgaccaacgcaaaccgcgcgcttaataataatcatcgaacgataccaaatcgtaaccgtaaccgcgaccaaaccatacgtactcttcgaacaaccctttttacaaataaaaacccaactcgcgaaattcatcgttcaactaatcttccgccaattcgaataccgaaaatttactcacttccgatataacatacaacacttcgtacaacgttttaccacgcaattccgatttcttcgccaacaaatcttccgaccatacttcttcaattttaaaacgacgaaaaaactaaactaactaacaaaaatccgatttcgcttcgcccgatacctatacctattaacgccaaaactaaatacgaaatcgaaattacgtaaaaacctctttttttcccctttaaaacgacgaatccatt

SEQ ID NO: 27603 - DNA, 955 bp, Artificial Sequence
  chemically treated genomic DNA (Homo sapiens) CpG-island No: 27603
attttgaggtttcgttgatcgggatataatggtttatattttttttagtttgatcgcgtattttttgaagttcgtttttttcgagagcggatcggtcgtatttagcgttagtttgttaattaattgtgcggcgtcgaagaacggtatgtatattaggttttgtggcggacggttacgatcgcgcgttttaataatcgagattatttcgttacggcgagaaattatttttattttgtcgttacggcgtagatcgcgcgttttcgtatttagcgggtgaataaataggatcgttttcgggaaggcgcggtgtagttttggtatacggcgagttatattgtcggtgtgttagtgttttagaacgcgttcggtagagagttataggtcgtattttttattcggtgttttcgtcgtcggttcgaatggtagtgcgaagattatcgttttgttattcggtttatcgtagaatttatagttttcgttcgtttttacgtacgggtcgttattttcgttgtaacgttattgcgtttttttatcgtttattatcggttagcgtagatcgcgcgtttagtggtagttatcgaacggtgttagatcgtgatcgtgatcgcgattaaattatgcgtatttttcgaatagttttttttgtagatagaagtttagttcgcgggatttatcgtttagttgatttttcgttagttcggatatcgggaatttgtttattttcggtgtggtatatagtatttcgtatagcgttttgttacgtagtttcggttttttcgttagtagatttttcggttatatttttttagttttgaagcggcgggagaattggattaattggtagagattcgatttcgtttcgttcggtgtttgtatttgttggcgttagagttgggtacggggtcggggttacgtaagggttttttttttttttttttggggcggcgggtttatt

SEQ ID NO: 27604 - DNA, 955 bp, Artificial Sequence
  chemically treated genomic DNA (Homo sapiens) CpG-island No: 27604
aataaacccgccgccccaaaaaaaaaaaaaaaaaacccttacgtaaccccgaccccgtacccaactctaacgccaacaaatacaaacaccgaacgaaacgaaatcgaatctctaccaattaatccaattctcccgccgcttcaaaactaaaaaaatataaccgaaaaatctactaacgaaaaaaccgaaactacgtaacaaaacgctatacgaaatactatataccacaccgaaaataaacaaattcccgatatccgaactaacgaaaaatcaactaaacgataaatcccgcgaactaaacttctatctacaaaaaaaactattcgaaaaatacgcataatttaatcgcgatcacgatcacgatctaacaccgttcgataactaccactaaacgcgcgatctacgctaaccgataataaacgataaaaaaacgcaataacgttacaacgaaaataacgacccgtacgtaaaaacgaacgaaaactataaattctacgataaaccgaataacaaaacgataatcttcgcactaccattcgaaccgacgacgaaaacaccgaataaaaaatacgacctataactctctaccgaacgcgttctaaaacactaacacaccgacaatataactcgccgtataccaaaactacaccgcgccttcccgaaaacgatcctatttattcacccgctaaatacgaaaacgcgcgatctacgccgtaacgacaaaataaaaataatttctcgccgtaacgaaataatctcgattattaaaacgcgcgatcgtaaccgtccgccacaaaacctaatatacataccgttcttcgacgccgcacaattaattaacaaactaacgctaaatacgaccgatccgctctcgaaaaaaacgaacttcaaaaaatacgcgatcaaactaaaaaaaatataaaccattatatcccgatcaacgaaacctcaaaat

SEQ ID NO: 27605 - DNA, 842 bp, Artificial Sequence
  chemically treated genomic DNA (Homo sapiens) CpG-island No: 27605
  unsure (476, 482..483, 487, 490, 492, 494, 496, 507, 510, 515..516)
  unsure (520, 553..)
tcgcggcgacgcggtagatattgttgttgattcgattgaaggtacgcgtatgacggcgatgggttaggttaacgcgttggcggtgttggtagtaggcgataaaggttgtttttttaatgcgtcggatatgtatatggagaagttgattgtcgggtcgggagttaaaggtattattgatttgaatttgtcgttggcggataatttgcgtaatgtagcggcggcgttcggtaaatcgttgagcgaattgacggtaacgattttggttaaattacgttacgatgtcgttatcgttgaaatgtagtaattcggcgtacgcgtatttgttatttcggacggcgacgttgcggttttaatttttatttgtatgttagatagcgaagttgacgtgttgtacggtattggtggcgcgtcggaaggcgtagtttttgcggcggtgattcgcgtattagatggcgatatgaacggtcgtttgttgngcgcgnnttantgnantngntttaatagcgnttngatannacgntaattacgtaagtaatttcgttttcgtattggnnncgagtaggagttggtacgttgtaaagcgatgggtatcgaagtcggtaaagtattgcgtttgggcgatatggcgcgtagcgataacgttattttttttgttatcggtattattaaaggcgatttgttggaaggtattagtcgtaaaggtaatatcgcgattatcgaaacgttgttgattcgcggtaagttacgtattattcgtcgtatttagtttatttattatttggatcgtaaagattcggaaatgtaggtgtatattttttgattgatttgatcgattgagtttt

SEQ ID NO: 27606 - DNA, 842 bp, Artificial Sequence
  chemically treated genomic DNA (Homo sapiens) CpG-island No: 27606
  unsure (288..289, 323, 327..328, 333, 336, 347, 349, 351, 353, 356)
  unsure (360..361, 367)
aaaactcaatcgatcaaatcaatcaaaaaatatacacctacatttccgaatctttacgatccaaataataaataaactaaatacgacgaataatacgtaacttaccgcgaatcaacaacgtttcgataatcgcgatattacctttacgactaataccttccaacaaatcgcctttaataataccgataacaaaaaaaataacgttatcgctacgcgccatatcgcccaaacgcaatactttaccgacttcgatacccatcgctttacaacgtaccaactcctactcgnnnccaatacgaaaacgaaattacttacgtaattancgtnntatcnaancgctattaaancnantncantaanncgcgcncaacaaacgaccgttcatatcgccatctaatacgcgaatcaccgccgcaaaaactacgccttccgacgcgccaccaataccgtacaacacgtcaacttcgctatctaacatacaaataaaaattaaaaccgcaacgtcgccgtccgaaataacaaatacgcgtacgccgaattactacatttcaacgataacgacatcgtaacgtaatttaaccaaaatcgttaccgtcaattcgctcaacgatttaccgaacgccgccgctacattacgcaaattatccgccaacgacaaattcaaatcaataatacctttaactcccgacccgacaatcaacttctccatatacatatccgacgcattaaaaaaacaacctttatcgcctactaccaacaccgccaacgcgttaacctaacccatcgccgtcatacgcgtaccttcaatcgaatcaacaacaatatctaccgcgtcgccgcga

SEQ ID NO: 27607 - DNA, 842 bp, Artificial Sequence
  chemically treated genomic DNA (Homo sapiens) CpG-island No: 27607
  unsure (288..289, 323, 327..328, 333, 336, 347, 349, 351, 353, 356)
  unsure (360..361, 367)
aaggtttaatcgattaaattaattagaggatgtgtatttgtattttcgggtttttgcgatttagatagtggatggattgaatgcggcgaatggtgcgtgatttgtcgcggattagtagcgtttcggtagtcgcgatattgtttttgcggttaatgttttttagtagatcgtttttggtaatatcggtggtagagaagatgacgttatcgttgcgcgttatatcgtttaggcgtaatattttatcggtttcgatgtttatcgttttgtagcgtgttagtttttgttcgnnnttaatgcgggagcggagttgtttgcgtggttgncgtnntgttnggncgttgttggantngntntantganncgcgtntagtagacgatcgtttatgtcgttatttaatgcgcggattatcgtcgtagaaattacgtttttcggcgcgttattaatatcgtatagtacgttaatttcgttgtttggtatataggtgagaattgaggtcgtaacgtcgtcgttcggaatagtaaatacgcgtacgtcgagttgttgtattttagcgataacggtatcgtggcgtggtttagttagaatcgttatcgttagttcgtttaacggtttgtcgagcgtcgtcgttatattgcgtaggttattcgttagcggtaggtttagattaatggtgtttttggttttcggttcgataattagtttttttatatatatattcggcgtattgaggaagtagtttttatcgtttattgttagtatcgttagcgcgttagtttggtttatcgtcgttatgcgcgtgtttttaatcggattaatagtaatatttatcgcgtcgtcgcga

SEQ ID NO: 27608 - DNA, 842 bp, Artificial Sequence
  chemically treated genomic DNA (Homo sapiens) CpG-island No: 27608
  unsure (476, 482..483, 487, 490, 492, 494, 496, 507, 510, 515..516)
  unsure (520, 553..)
tcgcgacgacgcgataaatattactattaatccgattaaaaacacgcgcataacgacgataaaccaaactaacgcgctaacgatactaacaataaacgataaaaactacttcctcaatacgccgaatatatatataaaaaaactaattatcgaaccgaaaaccaaaaacaccattaatctaaacctaccgctaacgaataacctacgcaatataacgacgacgctcgacaaaccgttaaacgaactaacgataacgattctaactaaaccacgccacgataccgttatcgctaaaatacaacaactcgacgtacgcgtatttactattccgaacgacgacgttacgacctcaattctcacctatataccaaacaacgaaattaacgtactatacgatattaataacgcgccgaaaaacgtaatttctacgacgataatccgcgcattaaataacgacataaacgatcgtctactanacgcgnntcantanancnantccaacaacgnccnaacannacgncaaccacgcaaacaactccgctcccgcattaannncgaacaaaaactaacacgctacaaaacgataaacatcgaaaccgataaaatattacgcctaaacgatataacgcgcaacgataacgtcatcttctctaccaccgatattaccaaaaacgatctactaaaaaacattaaccgcaaaaacaatatcgcgactaccgaaacgctactaatccgcgacaaatcacgcaccattcgccgcattcaatccatccactatctaaatcgcaaaaacccgaaaatacaaatacacatcctctaattaatttaatcgattaaacctt

SEQ ID NO: 27609 - DNA, 510 bp, Artificial Sequence
  chemically treated genomic DNA (Homo sapiens) CpG-island No: 27609
ttttttaataatttggtatattattcggcgggcggtagttagtatttcggggtttattagatgtttggtgtgtaaaatagcgcgtagtaggtttttagaaggttgtatacgttttagtacgtcgagattcgttattatatttttaatgtcgtagcgtagtacggtatcgttttttagtcgtttaattatttgttgcggaaatagcgtgtgaatattgttgatttatttaggggtggtgagatttgaggtattttatttacggaacgtttatacgttggagtcgttaggatcgcgttataaggtaatttaggcggggttattggcgggggtgtgtttcgttttatagggtggttcggcggttgttagaattattcgtcggtggtgttcggggttcgaatacgtcgtttacgggaattttcgttggggagttcggtcggttttttgttgtattgtacggtcgtgggtcgtcggttttgtttagggtgttttgagtgttcgtttcgtttttcg

SEQ ID NO: 27610 - DNA, 510 bp, Artificial Sequence
  chemically treated genomic DNA (Homo sapiens) CpG-island No: 27610
cgaaaaacgaaacgaacactcaaaacaccctaaacaaaaccgacgacccacgaccgtacaatacaacaaaaaaccgaccgaactccccaacgaaaattcccgtaaacgacgtattcgaaccccgaacaccaccgacgaataattctaacaaccgccgaaccaccctataaaacgaaacacacccccgccaataaccccgcctaaattaccttataacgcgatcctaacgactccaacgtataaacgttccgtaaataaaatacctcaaatctcaccacccctaaataaatcaacaatattcacacgctatttccgcaacaaataattaaacgactaaaaaacgataccgtactacgctacgacattaaaaatataataacgaatctcgacgtactaaaacgtatacaaccttctaaaaacctactacgcgctattttacacaccaaacatctaataaaccccgaaatactaactaccgcccgccgaataatataccaaattattaaaaaa

SEQ ID NO: 27611 - DNA, 510 bp, Artificial Sequence
  chemically treated genomic DNA (Homo sapiens) CpG-island No: 27611
cgaggggcggaacggatatttaggatattttgggtaaagtcggcggtttacggtcgtgtaatataatagggaatcggtcggattttttaacggggattttcgtggacgacgtgttcgaatttcgggtattatcggcgggtaattttggtaatcgtcgaattattttgtggggcggaatatattttcgttaatagtttcgtttgagttgttttatggcgcgattttgacggttttagcgtgtgaacgtttcgtgaataaggtgttttaaattttattatttttgagtggattaatagtatttatacgttgttttcgtagtaggtgattgagcggttggaaagcgatgtcgtgttgcgttacggtattgaagatgtggtgacgaatttcgacgtgttggaacgtatgtagttttttgaaagtttgttacgcgttgttttgtatattaaatatttgatgaatttcgaagtattggttgtcgttcgtcggatagtgtgttaggttgttgaagaa

SEQ ID NO: 27612 - DNA, 510 bp, Artificial Sequence
  chemically treated genomic DNA (Homo sapiens) CpG-island No: 27612
ttcttcaacaacctaacacactatccgacgaacgacaaccaatacttcgaaattcatcaaatatttaatatacaaaacaacgcgtaacaaactttcaaaaaactacatacgttccaacacgtcgaaattcgtcaccacatcttcaataccgtaacgcaacacgacatcgctttccaaccgctcaatcacctactacgaaaacaacgtataaatactattaatccactcaaaaataataaaatttaaaacaccttattcacgaaacgttcacacgctaaaaccgtcaaaatcgcgccataaaacaactcaaacgaaactattaacgaaaatatattccgccccacaaaataattcgacgattaccaaaattacccgccgataatacccgaaattcgaacacgtcgtccacgaaaatccccgttaaaaaatccgaccgattccctattatattacacgaccgtaaaccgccgactttacccaaaatatcctaaatatccgttccgcccctcg

SEQ ID NO: 27613 - DNA, 593 bp, Artificial Sequence
  chemically treated genomic DNA (Homo sapiens) CpG-island No: 27613
tttggcgcgcggattgtggcgatgtagggtatgagcgattagttttttatcggtgtcggattcgtcgttaattagtacgttaatagaagaacgcgaaagtcgatcgataatacggaatacgttttgtatggttggcgtttcgtcgatgatatcggtcgttgggtcgttaagttgaatattacgcggttgttgttgtttttggtaatgattgatagcgcgtttaattagcgttattgtttcgtcgatattaaacggtttgggtagataattaaacgttttttgttgataggcgttgacggtagtatttagatcggaatgtgcggttataatgatgatcggaagtattggatggcgttgtttaatttgtttgagtagcgttagttcgtttattttcggtatacggatatttgaaagtagtatattcggcgttttgttcgttagcgtttttagtatttttgcgtcgtttttaaacgtcgtataggttaaatttgttttagcgagcgtacgtttaagtatttaacggatggaattatcgttatcgattatttagattatttttcgttgtataaacgttatttttattttttgatagg

SEQ ID NO: 27614 - DNA, 593 bp, Artificial Sequence
  chemically treated genomic DNA (Homo sapiens) CpG-island No: 27614
cctatcaaaaaataaaaataacgtttatacaacgaaaaataatctaaataatcgataacgataattccatccgttaaatacttaaacgtacgctcgctaaaacaaatttaacctatacgacgtttaaaaacgacgcaaaaatactaaaaacgctaacgaacaaaacgccgaatatactactttcaaatatccgtataccgaaaataaacgaactaacgctactcaaacaaattaaacaacgccatccaatacttccgatcatcattataaccgcacattccgatctaaatactaccgtcaacgcctatcaacaaaaaacgtttaattatctacccaaaccgtttaatatcgacgaaacaataacgctaattaaacgcgctatcaatcattaccaaaaacaacaacaaccgcgtaatattcaacttaacgacccaacgaccgatatcatcgacgaaacgccaaccatacaaaacgtattccgtattatcgatcgactttcgcgttcttctattaacgtactaattaacgacgaatccgacaccgataaaaaactaatcgctcataccctacatcgccacaatccgcgcgccaaa

SEQ ID NO: 27615 - DNA, 593 bp, Artificial Sequence
  chemically treated genomic DNA (Homo sapiens) CpG-island No: 27615
tttattaggaaataaaggtgacgtttatgtaacgagggatagtttgggtagtcgatgacgatagttttattcgttgggtgtttgaacgtgcgttcgttggggtaggtttaatttgtacgacgtttgagaacggcgtagaagtgttggaggcgttggcgagtaaaacgtcggatgtgttgtttttagatattcgtatgtcgggaatggacgggttggcgttgtttaagtagattaaatagcgttatttaatgttttcggttattattatgatcgtatatttcgatttggatgttgtcgttagcgtttattaataaggggcgtttgattatttgtttaaatcgtttgatatcgacgaagtagtggcgttggttgagcgcgttattagttattattaggaatagtagtagtcgcgtaatgtttagtttaacggtttaacgatcgatattatcggcgaagcgttagttatgtaggacgtgtttcgtattatcggtcggttttcgcgtttttttattagcgtgttgattaacggcgaattcggtatcggtaaagaattggtcgtttatgttttgtatcgttatagttcgcgcgttaaa

SEQ ID NO: 27616 - DNA, 593 bp, Artificial Sequence
  chemically treated genomic DNA (Homo sapiens) CpG-island No: 27616
tttaacgcgcgaactataacgatacaaaacataaacgaccaattctttaccgataccgaattcgccgttaatcaacacgctaataaaaaaacgcgaaaaccgaccgataatacgaaacacgtcctacataactaacgcttcgccgataatatcgatcgttaaaccgttaaactaaacattacgcgactactactattcctaataataactaataacgcgctcaaccaacgccactacttcgtcgatatcaaacgatttaaacaaataatcaaacgccccttattaataaacgctaacgacaacatccaaatcgaaatatacgatcataataataaccgaaaacattaaataacgctatttaatctacttaaacaacgccaacccgtccattcccgacatacgaatatctaaaaacaacacatccgacgttttactcgccaacgcctccaacacttctacgccgttctcaaacgtcgtacaaattaaacctaccccaacgaacgcacgttcaaacacccaacgaataaaactatcgtcatcgactacccaaactatccctcgttacataaacgtcacctttatttcctaataaa

SEQ ID NO: 27617 - DNA, 574 bp, Artificial Sequence
  chemically treated genomic DNA (Homo sapiens) CpG-island No: 27617
aatatgtgttaatttggtttatggtagagtaagcgagaatacgtttgatgtcggtttgtattagcgcggtaaaatcggttagtagtagcgtaatcgtttcgataatatttattagatgtagaattttcggcgttattaggaataggtcgtgggtacgggcgattaggtagatattcgcggttattatggttgcggcgtggattagcgcggagataggcgtcgggttcgttatcgcgtcggtaagttatgtttgtaacggtaattgcgtagatttatcgatcgtatcgtttagtagtattagcgtcgtttatattagtatgttattgtcgttagtaaagtgcgttggtgttagttttattatttcgcggaagtttagggtgtttagttcgttgtaaagaatgaatagtgcgaaagcgaggaatacgttatttatacgggttacgacgaacgtttttattgtcgttgcgttatttttcggatcggtgtaatagaattcgattagtagataggagtataggtttacgtttttttagtcgaggtatattagtagtaggttgtcggtaagtattagaat

SEQ ID NO: 27618 - DNA, 574 bp, Artificial Sequence
  chemically treated genomic DNA (Homo sapiens) CpG-island No: 27618
attctaatacttaccgacaacctactactaatatacctcgactaaaaaaacgtaaacctatactcctatctactaatcgaattctattacaccgatccgaaaaataacgcaacgacaataaaaacgttcgtcgtaacccgtataaataacgtattcctcgctttcgcactattcattctttacaacgaactaaacaccctaaacttccgcgaaataataaaactaacaccaacgcactttactaacgacaataacatactaatataaacgacgctaatactactaaacgatacgatcgataaatctacgcaattaccgttacaaacataacttaccgacgcgataacgaacccgacgcctatctccgcgctaatccacgccgcaaccataataaccgcgaatatctacctaatcgcccgtacccacgacctattcctaataacgccgaaaattctacatctaataaatattatcgaaacgattacgctactactaaccgattttaccgcgctaatacaaaccgacatcaaacgtattctcgcttactctaccataaaccaaattaacacatatt

SEQ ID NO: 27619 - DNA, 574 bp, Artificial Sequence
  chemically treated genomic DNA (Homo sapiens) CpG-island No: 27619
gttttggtgtttgtcgataatttgttgttgatgtatttcggttgggaaggcgtgggtttgtgtttttatttgttgatcgggttttattatatcgattcgaagaatggcgtagcggtaatgaaagcgttcgtcgtgattcgtgtgggtgacgtgtttttcgttttcgtattgtttattttttataacgaattgggtattttgaattttcgcgaaatggtggaattggtattagcgtattttgttgacggtaataatatgttgatgtgggcgacgttgatgttgttgggcggtgcggtcggtaaatttgcgtagttgtcgttgtagatatggtttgtcgacgcgatggcgggttcgacgtttgttttcgcgttgatttacgtcgtaattatggtaatcgcgggtgtttatttgatcgttcgtatttacggtttgtttttgatgacgtcggaagttttgtatttggtgggtattgtcggggcggttacgttgttgttggtcggttttgtcgcgttggtatagatcgatattaaacgtgttttcgtttattttattatgagttagattggtatatgtt

SEQ ID NO: 27620 - DNA, 574 bp, Artificial Sequence
  chemically treated genomic DNA (Homo sapiens) CpG-island No: 27620
aacatataccaatctaactcataataaaataaacgaaaacacgtttaatatcgatctataccaacgcgacaaaaccgaccaacaacaacgtaaccgccccgacaatacccaccaaatacaaaacttccgacgtcatcaaaaacaaaccgtaaatacgaacgatcaaataaacacccgcgattaccataattacgacgtaaatcaacgcgaaaacaaacgtcgaacccgccatcgcgtcgacaaaccatatctacaacgacaactacgcaaatttaccgaccgcaccgcccaacaacatcaacgtcgcccacatcaacatattattaccgtcaacaaaatacgctaataccaattccaccatttcgcgaaaattcaaaatacccaattcgttataaaaaataaacaatacgaaaacgaaaaacacgtcacccacacgaatcacgacgaacgctttcattaccgctacgccattcttcgaatcgatataataaaacccgatcaacaaataaaaacacaaacccacgccttcccaaccgaaatacatcaacaacaaattatcgacaaacaccaaaac

SEQ ID NO: 27621 - DNA, 577 bp, Artificial Sequence
  chemically treated genomic DNA (Homo sapiens) CpG-island No: 27621
atttgtcggtgcgcggatggggatagagggggcgtttcgtttatttttgcgagtttagcgtttagtttgcgagtttttggttaagcgtttagttttacgcgttttcgcgcggtcgtcggggagggagtggtgaggagggggggtttgagcgggggcgcgggcgatttttttcgagggcgggcgggcgggtgcgttcgggtttttcgggcgggttggggcggcggcgcggcggagcgcggcgttgtagttatggcgggcggcgtgcggttgttttgggtgtcgttattggtgttgttggcgtagttagggtcgtagtttggattgggtcggttcggagagcgttttcgcgtgcgttttatttcggtcgtgtgcggtttgcgttgcgtttatgggtcgatcggttttcgttgtatttcgatttgcgcgtttcgtaacgttattagcgtggatagcggcgttttcggcggggcggtttcggggggattcggttttcgcgtttgtgagtgcggggtggtggtttcgagagagcggtttcgggggggaggaggatttttggggatggaggagatagtttttt

SEQ ID NO: 27622 - DNA, 577 bp, Artificial Sequence
  chemically treated genomic DNA (Homo sapiens) CpG-island No: 27622
aaaaaactatctcctccatccccaaaaatcctcctcccccccgaaaccgctctctcgaaaccaccaccccgcactcacaaacgcgaaaaccgaatccccccgaaaccgccccgccgaaaacgccgctatccacgctaataacgttacgaaacgcgcaaatcgaaatacaacgaaaaccgatcgacccataaacgcaacgcaaaccgcacacgaccgaaataaaacgcacgcgaaaacgctctccgaaccgacccaatccaaactacgaccctaactacgccaacaacaccaataacgacacccaaaacaaccgcacgccgcccgccataactacaacgccgcgctccgccgcgccgccgccccaacccgcccgaaaaacccgaacgcacccgcccgcccgccctcgaaaaaaatcgcccgcgcccccgctcaaaccccccctcctcaccactccctccccgacgaccgcgcgaaaacgcgtaaaactaaacgcttaaccaaaaactcgcaaactaaacgctaaactcgcaaaaataaacgaaacgccccctctatccccatccgcgcaccgacaaat

SEQ ID NO: 27623 - DNA, 577 bp, Artificial Sequence
  chemically treated genomic DNA (Homo sapiens) CpG-island No: 27623
ggaggattgttttttttatttttagggatttttttttttttcggagtcgttttttcgggattattatttcgtatttataggcgcggaagtcgggttttttcggggtcgtttcgtcgggagcgtcgttgtttacgttggtggcgttgcggggcgcgtaggtcggggtatagcgggagtcggtcggtttatggacgtagcgtaggtcgtatacgatcggggtgaagcgtacgcggagacgtttttcgagtcggtttagtttaggttgcggttttagttgcgttagtagtattaatagcgatatttagagtagtcgtacgtcgttcgttatggttgtagcgtcgcgtttcgtcgcgtcgtcgttttagttcgttcgaggggttcggacgtattcgttcgttcgttttcgggggaggtcgttcgcgttttcgtttaggttttttttttttattatttttttttcggcggtcgcgcgggggcgcgtggggttgggcgtttagttagaggttcgtaggttgggcgttagattcgtaggggtgagcggggcgttttttttgtttttattcgcgtatcgataagt

SEQ ID NO: 27624 - DNA, 577 bp, Artificial Sequence
  chemically treated genomic DNA (Homo sapiens) CpG-island No: 27624
acttatcgatacgcgaataaaaacaaaaaaaacgccccgctcacccctacgaatctaacgcccaacctacgaacctctaactaaacgcccaaccccacgcgcccccgcgcgaccgccgaaaaaaaaataataaaaaaaaaaaacctaaacgaaaacgcgaacgacctcccccgaaaacgaacgaacgaatacgtccgaacccctcgaacgaactaaaacgacgacgcgacgaaacgcgacgctacaaccataacgaacgacgtacgactactctaaatatcgctattaatactactaacgcaactaaaaccgcaacctaaactaaaccgactcgaaaaacgtctccgcgtacgcttcaccccgatcgtatacgacctacgctacgtccataaaccgaccgactcccgctataccccgacctacgcgccccgcaacgccaccaacgtaaacaacgacgctcccgacgaaacgaccccgaaaaaacccgacttccgcgcctataaatacgaaataataatcccgaaaaaacgactccgaaaaaaaaaaaaatccctaaaaataaaaaaaacaatcctcc

SEQ ID NO: 27625 - DNA, 677 bp, Artificial Sequence
  chemically treated genomic DNA (Homo sapiens) CpG-island No: 27625
cggtaaggcgtttttagaagtaattttttcggacgcggagttggaggggatttgaggttaggtgttacggagggaaagggagtttaggttaggacggatcgggggaaaggattcggcgatgtttataggtatgtttagttcgggattggttaatgggcgtggcggggcggtggtcgcgtcggggaaggcgggatggtgtttgcgtgtgggcggggtttttaggttaaggggcggggcggggcgggatttttttgtatatacggtaggcggcgggttaatgggcggggtcggggcggggagtcgaggtcgagggacgttttttcgttttcggaacggaattttttcgggagtcgaggaggttcgcgcgcgtgtatttcgtattatttttcggtttcgggttttggtcggcgttagatcgagttgtcgtcgttattatcgtagtagtagtagtcggggagttaggtttagttagggtcgcgggaggcgggggcgttcgggttttggatgtttcgtagcgcggcggttagcgtgagaagggcgggagaggggggttcgggtcgggggcggcgtcgttgttgatgtggcggagggtgggaggcggtcgcggcgttcggatggagagagggtgttaaggttggagagggtggtttcgggtgggggtttaggaataggtttaa

SEQ ID NO: 27626 - DNA, 677 bp, Artificial Sequence
  chemically treated genomic DNA (Homo sapiens) CpG-island No: 27626
ttaaacctattcctaaacccccacccgaaaccaccctctccaaccttaacaccctctctccatccgaacgccgcgaccgcctcccaccctccgccacatcaacaacgacgccgcccccgacccgaacccccctctcccgcccttctcacgctaaccgccgcgctacgaaacatccaaaacccgaacgcccccgcctcccgcgaccctaactaaacctaactccccgactactactactacgataataacgacgacaactcgatctaacgccgaccaaaacccgaaaccgaaaaataatacgaaatacacgcgcgcgaacctcctcgactcccgaaaaaattccgttccgaaaacgaaaaaacgtccctcgacctcgactccccgccccgaccccgcccattaacccgccgcctaccgtatatacaaaaaaatcccgccccgccccgccccttaacctaaaaaccccgcccacacgcaaacaccatcccgccttccccgacgcgaccaccgccccgccacgcccattaaccaatcccgaactaaacatacctataaacatcgccgaatcctttcccccgatccgtcctaacctaaactccctttccctccgtaacacctaacctcaaatcccctccaactccgcgtccgaaaaaattacttctaaaaacgccttaccg

SEQ ID NO: 27627 - DNA, 677 bp, Artificial Sequence
  chemically treated genomic DNA (Homo sapiens) CpG-island No: 27627
ttgggtttgtttttggatttttattcgggattattttttttagttttggtattttttttttattcgggcgtcgcggtcgttttttatttttcgttatattagtagcggcgtcgttttcgattcgagtttttttttttcgttttttttacgttggtcgtcgcgttgcgggatatttagggttcgggcgttttcgtttttcgcggttttggttgggtttggtttttcgattgttgttgttgcggtggtggcggcggtagttcggtttgacgtcggttagggttcggggtcgggggatggtgcgggatgtacgcgcgcgagttttttcggttttcgggaggatttcgtttcgggggcgggggagcgtttttcggtttcggtttttcgtttcgatttcgtttattggttcgtcgtttgtcgtatatgtagaaaggtttcgtttcgtttcgttttttggtttgaagatttcgtttatacgtagatattatttcgtttttttcggcgcggttatcgtttcgttacgtttattggttagtttcgagttgagtatgtttatgaatatcgtcgagttttttttttcggttcgttttggtttgggtttttttttttttcgtgatatttgattttagattttttttagtttcgcgttcgaaagagttgtttttagaggcgttttgtcg

SEQ ID NO: 27628 - DNA, 677 bp, Artificial Sequence
  chemically treated genomic DNA (Homo sapiens) CpG-island No: 27628
cgacaaaacgcctctaaaaacaactctttcgaacgcgaaactaaaaaaaatctaaaatcaaatatcacgaaaaaaaaaaaaacccaaaccaaaacgaaccgaaaaaaaaaactcgacgatattcataaacatactcaactcgaaactaaccaataaacgtaacgaaacgataaccgcgccgaaaaaaacgaaataatatctacgtataaacgaaatcttcaaaccaaaaaacgaaacgaaacgaaacctttctacatatacgacaaacgacgaaccaataaacgaaatcgaaacgaaaaaccgaaaccgaaaaacgctcccccgcccccgaaacgaaatcctcccgaaaaccgaaaaaactcgcgcgcgtacatcccgcaccatcccccgaccccgaaccctaaccgacgtcaaaccgaactaccgccgccaccaccgcaacaacaacaatcgaaaaaccaaacccaaccaaaaccgcgaaaaacgaaaacgcccgaaccctaaatatcccgcaacgcgacgaccaacgtaaaaaaaacgaaaaaaaaaaactcgaatcgaaaacgacgccgctactaatataacgaaaaataaaaaacgaccgcgacgcccgaataaaaaaaaaataccaaaactaaaaaaaataatcccgaataaaaatccaaaaacaaacccaa

SEQ ID NO: 27629 - DNA, 886 bp, Artificial Sequence
  chemically treated genomic DNA (Homo sapiens) CpG-island No: 27629
ggagaagcggaggaggaaagatagaggtgggaggttaatcggcgagtcggggagtcgaagggaggagggattaggtcggggcggggttttttatcgaggtaggaggcgaggttcgggttagcgcggtgtttcggaggatagatgtattcgaaggagtcgtcggtgttggtatagatgtcgttttggtaaaggtttttttcgttgtattcgttaacgtttgcgggatagggcgttcgaaggttcggtttatttttcgtttcgtttaatattttaggttatatttttttatcgtttttcggtttttttaggttttttacgttttttttaatttgttttacgttatttttttttttgtaaatatcgtttttcgacgggtttagaatagtttttttataattacggtttaaatatttagattcggtttttttatttttacgtttcgtttttttttattgtttcgagatttttattagttgttttttgattttgttggaatatttcggttaaaaattcgttttttttttttcgttttttttttttcgtttcgtttttttttgttttaagtttatttttttcggggttaggattagttcgggtacgaatcgaggtaagaggtttcgcggggttcgggtcggtagttaggggtataagtataggtaaaggagtcgttagtgttgaggtattcgtcgtgagggaagtagaaatcgttttttaggtattcgtttacgtttagggtacgcgggagattgggcggagttacgggattcggttttttagataagtttcgtttatatcgtagtaatttcgtttttattaatgttaggtttttaagttttttttatagcgttttggtttcgtttttatttttttagtcggttttgttttg

SEQ ID NO: 27630 - DNA, 886 bp, Artificial Sequence
  chemically treated genomic DNA (Homo sapiens) CpG-island No: 27630
caaaacaaaaccgactaaaaaaataaaaacgaaaccaaaacgctataaaaaaaacttaaaaacctaacattaataaaaacgaaattactacgatataaacgaaacttatctaaaaaaccgaatcccgtaactccgcccaatctcccgcgtaccctaaacgtaaacgaatacctaaaaaacgatttctacttccctcacgacgaatacctcaacactaacgactcctttacctatacttatacccctaactaccgacccgaaccccgcgaaacctcttacctcgattcgtacccgaactaatcctaaccccgaaaaaaataaacttaaaacaaaaaaaaacgaaacgaaaaaaaaaaaacgaaaaaaaaaaaacgaatttttaaccgaaatattccaacaaaatcaaaaaacaactaataaaaatctcgaaacaataaaaaaaaacgaaacgtaaaaataaaaaaaccgaatctaaatatttaaaccgtaattataaaaaaactattctaaacccgtcgaaaaacgatatttacaaaaaaaaaaataacgtaaaacaaattaaaaaaaacgtaaaaaacctaaaaaaaccgaaaaacgataaaaaaatataacctaaaatattaaacgaaacgaaaaataaaccgaaccttcgaacgccctatcccgcaaacgttaacgaatacaacgaaaaaaacctttaccaaaacgacatctataccaacaccgacgactccttcgaatacatctatcctccgaaacaccgcgctaacccgaacctcgcctcctacctcgataaaaaaccccgccccgacctaatccctcctcccttcgactccccgactcgccgattaacctcccacctctatctttcctcctccgcttctcc

SEQ ID NO: 27631 - DNA, 886 bp, Artificial Sequence
  chemically treated genomic DNA (Homo sapiens) CpG-island No: 27631
tagggtaaagtcggttggaaaggtggaggcgggattaaggcgttgtgggaggagtttagaaatttggtattggtgggggcggggttattgcgatgtgggcggagtttgtttgggaggtcgggtttcgtgatttcgtttaatttttcgcgtattttagacgtgaacgagtgtttggagggcgatttttgttttttttacggcgagtgttttaatattgacggtttttttgtttgtatttgtgtttttggttatcgattcggatttcgcggagttttttgtttcggttcgtattcgggttgattttggtttcggaaagggtgggtttagggtaggaaaaggcgggacggggagaagagggcgaaaaggggaaaacgagtttttagtcggggtattttagtaggattagggggtagttggtgggagtttcgaggtagtgagggggggcggggcgtggagatgaaagggtcgagtttgggtatttggatcgtgattgtaaagaagttgttttaaattcgtcggggggcggtgtttgtagggagggaagtagcgtgaggtaggttggggaaggcgtgagaggtttaggagagtcgaggggcggtggaggggtgtggtttagaatgttaggcggagcgggaggtgggtcgggttttcggacgttttgtttcgtagacgttgacgagtgtagcgaggaggatttttgttagagcggtatttgtattaatatcgacggttttttcgagtgtatttgtttttcgggatatcgcgttggttcggatttcgttttttgtttcggtgagaggtttcgtttcggtttgatttttttttttttcgatttttcgattcgtcgattggttttttatttttgttttttttttttcgttttttt

SEQ ID NO: 27632 - DNA, 886 bp, Artificial Sequence
  chemically treated genomic DNA (Homo sapiens) CpG-island No: 27632
aaaaaaacgaaaaaaaaaaaacaaaaataaaaaaccaatcgacgaatcgaaaaatcgaaaaaaaaaaaaatcaaaccgaaacgaaacctctcaccgaaacaaaaaacgaaatccgaaccaacgcgatatcccgaaaaacaaatacactcgaaaaaaccgtcgatattaatacaaataccgctctaacaaaaatcctcctcgctacactcgtcaacgtctacgaaacaaaacgtccgaaaacccgacccacctcccgctccgcctaacattctaaaccacacccctccaccgcccctcgactctcctaaacctctcacgccttccccaacctacctcacgctacttccctccctacaaacaccgccccccgacgaatttaaaacaacttctttacaatcacgatccaaatacccaaactcgaccctttcatctccacgccccgccccccctcactacctcgaaactcccaccaactaccccctaatcctactaaaataccccgactaaaaactcgttttccccttttcgccctcttctccccgtcccgccttttcctaccctaaacccaccctttccgaaaccaaaatcaacccgaatacgaaccgaaacaaaaaactccgcgaaatccgaatcgataaccaaaaacacaaatacaaacaaaaaaaccgtcaatattaaaacactcgccgtaaaaaaaacaaaaatcgccctccaaacactcgttcacgtctaaaatacgcgaaaaattaaacgaaatcacgaaacccgacctcccaaacaaactccgcccacatcgcaataaccccgcccccaccaataccaaatttctaaactcctcccacaacgccttaatcccgcctccacctttccaaccgactttacccta

SEQ ID NO: 27633 - DNA, 570 bp, Artificial Sequence
  chemically treated genomic DNA (Homo sapiens) CpG-island No: 27633
tgatagtcgtgaacgttttaggttaagtcggtttttcggtagtagattttttgcgttcggagttcgggtagcggggacgcgtattgcggggaagtgttgggtgagcgcgttttcgcgcggaggtaagtttcgggtttttttttacgggtttttttttatttcgttttcgcgtagttttcgaaagtagtaatcgaagttcgaggtatttgagtagtcgttttttcgcggcgcgttttgtgttaatatcgtgtagggcgttgtcgttttcgttcgcgtcgtcgttttcgttcgcgttatcgttttagcgttcgtttttttttaagggttagatatacgttttatttggtgtattattatcgacgttttttgcgggtgttttacgtggacgtttattatagatgttacgtttaggggaggtacggtcgggtaaacggatgtttatacgggtttttacggggtggggttagataaggcggggagggcgagttgggtaaaggtgttcgggaaggcgggaaatatgagggttaggggtaaagtgaaatgtttgataggggtcggaggggattttgg

SEQ ID NO: 27634 - DNA, 570 bp, Artificial Sequence
  chemically treated genomic DNA (Homo sapiens) CpG-island No: 27634
ccaaaatcccctccgacccctatcaaacatttcactttacccctaaccctcatatttcccgccttcccgaacacctttacccaactcgccctccccgccttatctaaccccaccccgtaaaaacccgtataaacatccgtttacccgaccgtacctcccctaaacgtaacatctataataaacgtccacgtaaaacacccgcaaaaaacgtcgataataatacaccaaataaaacgtatatctaacccttaaaaaaaaacgaacgctaaaacgataacgcgaacgaaaacgacgacgcgaacgaaaacgacaacgccctacacgatattaacacaaaacgcgccgcgaaaaaacgactactcaaatacctcgaacttcgattactactttcgaaaactacgcgaaaacgaaataaaaaaaaacccgtaaaaaaaaacccgaaacttacctccgcgcgaaaacgcgctcacccaacacttccccgcaatacgcgtccccgctacccgaactccgaacgcaaaaaatctactaccgaaaaaccgacttaacctaaaacgttcacgactatca

SEQ ID NO: 27635 - DNA, 570 bp, Artificial Sequence
  chemically treated genomic DNA (Homo sapiens) CpG-island No: 27635
ttagagtttttttcgatttttgttaagtattttattttgtttttgatttttatatttttcgttttttcgagtatttttgtttagttcgtttttttcgttttgtttagttttatttcgtaagaattcgtgtagatattcgtttgttcggtcgtgttttttttaggcgtggtatttatggtgagcgtttacgtggagtattcgtaggaggcgtcggtggtggtgtattaggtggagcgtgtgtttggtttttgggaggaggcggacgttgaggcggtggcgcgggcggaagcggcggcgcgggcggaggcggtagcgttttatacggtgttggtatagagcgcgtcgcgggaggacggttatttagatgtttcgggtttcggttattgttttcgggagttgcgcggaggcgaagtgagaggaggttcgtggggaggggttcggagtttgttttcgcgcgggggcgcgtttatttaatattttttcgtagtgcgcgttttcgttgttcgggtttcggacgtaggaggtttgttgtcgaggggtcggtttggtttggggcgtttacgattgtta

SEQ ID NO: 27636 - DNA, 570 bp, Artificial Sequence
  chemically treated genomic DNA (Homo sapiens) CpG-island No: 27636
taacaatcgtaaacgccccaaaccaaaccgacccctcgacaacaaacctcctacgtccgaaacccgaacaacgaaaacgcgcactacgaaaaaatattaaataaacgcgcccccgcgcgaaaacaaactccgaacccctccccacgaacctcctctcacttcgcctccgcgcaactcccgaaaacaataaccgaaacccgaaacatctaaataaccgtcctcccgcgacgcgctctataccaacaccgtataaaacgctaccgcctccgcccgcgccgccgcttccgcccgcgccaccgcctcaacgtccgcctcctcccaaaaaccaaacacacgctccacctaatacaccaccaccgacgcctcctacgaatactccacgtaaacgctcaccataaataccacgcctaaaaaaaacacgaccgaacaaacgaatatctacacgaattcttacgaaataaaactaaacaaaacgaaaaaaacgaactaaacaaaaatactcgaaaaaacgaaaaatataaaaatcaaaaacaaaataaaatacttaacaaaaatcgaaaaaaactctaa

SEQ ID NO: 27637 - DNA, 522 bp, Artificial Sequence
  chemically treated genomic DNA (Homo sapiens) CpG-island No: 27637
ttttattcgtacgttttttacgatcgacgtggaaggttataattagatttgcgagtagtagtatagaagttagttttatcgttagtacgtaaggttcgaatagcgtaatatttattgttttagtattgattggcgtatcgtcgatattttgatcgttaatatcgaggatggcgtaaataattattattagtatgatggtcgataaaattgtcggattaatttatatttgcggttttagttattggcgtttttgttcgatttttgaatcgtttaggttgagtattattattacgaatacgaatagtattataatggtattcgcgtagacgataatttttagcgttatcggcgaagtaagcgtttagtgagaagaatatttcggaaatcgttagtagcgaaattattaggttatagtagtgcgtgttcggattggttgggtgattattcgtacggtttagtttggtattagtttcggtttttacggattttatggtttttttacggatagttttgatttattgg

SEQ ID NO: 27638 - DNA, 522 bp, Artificial Sequence
  chemically treated genomic DNA (Homo sapiens) CpG-island No: 27638
ccaataaatcaaaactatccgtaaaaaaaccataaaatccgtaaaaaccgaaactaataccaaactaaaccgtacgaataatcacccaaccaatccgaacacgcactactataacctaataatttcgctactaacgatttccgaaatattcttctcactaaacgcttacttcgccgataacgctaaaaattatcgtctacgcgaataccattataatactattcgtattcgtaataataatactcaacctaaacgattcaaaaatcgaacaaaaacgccaataactaaaaccgcaaatataaattaatccgacaattttatcgaccatcatactaataataattatttacgccatcctcgatattaacgatcaaaatatcgacgatacgccaatcaatactaaaacaataaatattacgctattcgaaccttacgtactaacgataaaactaacttctatactactactcgcaaatctaattataaccttccacgtcgatcgtaaaaaacgtacgaataaaa

SEQ ID NO: 27639 - DNA, 522 bp, Artificial Sequence
  chemically treated genomic DNA (Homo sapiens) CpG-island No: 27639
ttagtgagttagagttgttcgtagagaggttatggagttcgtggaaatcggggttgatattagattggatcgtgcgagtgattatttaattaattcggatacgtattgttgtaatttgatgatttcgttgttggcgattttcggggtgttttttttattgggcgtttatttcgtcggtggcgttggaaattatcgtttacgcgggtgttattatggtgttgttcgtgttcgtggtgatgatgtttaatttgggcggtttagaaatcgaataggaacgttagtggttgaaatcgtaggtgtggattggttcggtaattttgtcggttattatgttggtggtgattgtttacgttattttcggtgttaacgattagggtatcgacggtacgttaattagtgttaaagtagtgggtattacgttgttcgggttttacgtattggcggtggaattggtttttatgttgttgttcgtaggtttggttgtggttttttacgtcggtcgtgaagagcgtgcgggtgaag

SEQ ID NO: 27640 - DNA, 522 bp, Artificial Sequence
  chemically treated genomic DNA (Homo sapiens) CpG-island No: 27640
cttcacccgcacgctcttcacgaccgacgtaaaaaaccacaaccaaacctacgaacaacaacataaaaaccaattccaccgccaatacgtaaaacccgaacaacgtaatacccactactttaacactaattaacgtaccgtcgataccctaatcgttaacaccgaaaataacgtaaacaatcaccaccaacataataaccgacaaaattaccgaaccaatccacacctacgatttcaaccactaacgttcctattcgatttctaaaccgcccaaattaaacatcatcaccacgaacacgaacaacaccataataacacccgcgtaaacgataatttccaacgccaccgacgaaataaacgcccaataaaaaaaacaccccgaaaatcgccaacaacgaaatcatcaaattacaacaatacgtatccgaattaattaaataatcactcgcacgatccaatctaatatcaaccccgatttccacgaactccataacctctctacgaacaactctaactcactaa

SEQ ID NO: 27641 - DNA, 654 bp, Artificial Sequence
  chemically treated genomic DNA (Homo sapiens) CpG-island No: 27641
ttgcgagtgggtgggttgtgcgtgggttgcgcggatgtgggtgtgcgtggtatgtgggtggggtgcgttgcgcgaatttagtttgcgtgtttaggttagtcggtttggtacgtcgtatgtggtgcgtagatatgtagagattggcgaacgttgtattcggtagttgggtattggtatatttttaggtgatagtcgattgagtttttgttcggcggcgattagtagagagtgtgcgtgttacgttgggtattgattcgatcgtatgttttgattttcgatgagttaattcgcggtattgatgttggtgtttacgtcgagattattcgtttgattgaaacgttatgcgtcgatggtttggcgttgttggtgatttttttcgaattggaagagttggtgggttatgtcgatcgggtgattattatgcgcgatcgtatataggtggcggagatttcgttggtagagtttttcgtttcggcgattatgaacgttattgcggcgtaaggagaatagtgtgatgttttaatttttttcggatattagtacgttaaaaaggcgttttcgttggtcgacggggatgtcgtagttggtagtattattgttggtgttgttggtcgatagtttggtagtttcgtatttttggtaggtgtattgtat

SEQ ID NO: 27642 - DNA, 654 bp, Artificial Sequence
  chemically treated genomic DNA (Homo sapiens) CpG-island No: 27642
atacaatacacctaccaaaaatacgaaactaccaaactatcgaccaacaacaccaacaataatactaccaactacgacatccccgtcgaccaacgaaaacgcctttttaacgtactaatatccgaaaaaaattaaaacatcacactattctccttacgccgcaataacgttcataatcgccgaaacgaaaaactctaccaacgaaatctccgccacctatatacgatcgcgcataataatcacccgatcgacataacccaccaactcttccaattcgaaaaaaatcaccaacaacgccaaaccatcgacgcataacgtttcaatcaaacgaataatctcgacgtaaacaccaacatcaataccgcgaattaactcatcgaaaatcaaaacatacgatcgaatcaatacccaacgtaacacgcacactctctactaatcgccgccgaacaaaaactcaatcgactatcacctaaaaatataccaatacccaactaccgaatacaacgttcgccaatctctacatatctacgcaccacatacgacgtaccaaaccgactaacctaaacacgcaaactaaattcgcgcaacgcaccccacccacataccacgcacacccacatccgcgcaacccacgcacaacccacccactcgcaa

SEQ ID NO: 27643 - DNA, 654 bp, Artificial Sequence
  chemically treated genomic DNA (Homo sapiens) CpG-island No: 27643
gtgtagtatatttgttagaaatgcggggttattaggttatcgattagtagtattagtaatagtgttattagttgcggtattttcgtcggttagcgaaagcgtttttttggcgtattggtgttcggaagagattgaggtattatattgttttttttacgtcgtaatggcgtttatgatcgtcggaacggaaagttttgttagcgggattttcgttatttgtatgcgatcgcgtatgataattattcgatcggtatagtttattagtttttttagttcggaggagattattagtagcgttagattatcggcgtatagcgttttaattaggcggatgatttcggcgtgggtattaatattaatgtcgcgggttggtttatcgaggattagaatatgcggtcgggttagtatttaacgtgatacgtatattttttgttgatcgtcgtcggatagaaatttaatcggttgttatttgaaggtgtgttaatgtttagttgtcggatatagcgttcgttaatttttgtatgtttacgtattatatgcgacgtgttagatcggttggtttggatacgtagattaaattcgcgtaacgtattttatttatatattacgtatatttatattcgcgtaatttacgtataatttatttattcgtaa

SEQ ID NO: 27644 - DNA, 654 bp, Artificial Sequence
  chemically treated genomic DNA (Homo sapiens) CpG-island No: 27644
ttacgaataaataaattatacgtaaattacgcgaatataaatatacgtaatatataaataaaatacgttacgcgaatttaatctacgtatccaaaccaaccgatctaacacgtcgcatataatacgtaaacatacaaaaattaacgaacgctatatccgacaactaaacattaacacaccttcaaataacaaccgattaaatttctatccgacgacgatcaacaaaaaatatacgtatcacgttaaatactaacccgaccgcatattctaatcctcgataaaccaacccgcgacattaatattaatacccacgccgaaatcatccgcctaattaaaacgctatacgccgataatctaacgctactaataatctcctccgaactaaaaaaactaataaactataccgatcgaataattatcatacgcgatcgcatacaaataacgaaaatcccgctaacaaaactttccgttccgacgatcataaacgccattacgacgtaaaaaaaacaatataatacctcaatctcttccgaacaccaatacgccaaaaaaacgctttcgctaaccgacgaaaataccgcaactaataacactattactaatactactaatcgataacctaataaccccgcatttctaacaaatatactacac

SEQ ID NO: 27645 - DNA, 1250 bp, Artificial Sequence
  chemically treated genomic DNA (Homo sapiens) CpG-island No: 27645
gttatgttttagtggatggatcgtcgcgcggcgtttcggtaaagtttagcgtaaagcggtgcggaatgtaggtaaagttttttattattagtgggttattcggtaggttatttagatcgtagtcgattatgtttagcgcggtatagatttcgttgatacgtatttttagacgggaaataacgtcgtagttttgttcgttgtggatttttattggtagtaggttatagtcgataaacgggtgatcggcgcgggtattacgggcgtgatcgttggtacggattatcgggtcgacgttattgaagtcgcgagcgattttcgggtttagacgattaatgtcgatagtgcgttgttttatgttcggagtgtttagtagtatatttattagtttttgtattttacgacgtatttgttgtgttagttggcgggtttggattatgtcgttttttagtagatcgcgacgaatttcgtcgattaagtttaggtcgtaggttttacgcgtatcggtaaggatttttgttatttttatggaggttttacgtacgcggaagaattgtataaagtcggagtcgaagtcggtaaagtgataggttaggttaaggttgagtagatgcgagtgtaagcgttttatttttagtagaatggcgcggattatttgcgtacgttttggtatttgaatatttatcgcgttttttatcgacgtggtgtaggcggtgttgtgggtaaagtcgtagatttcgtatatacggttagagaggaaggttatttcgttataatttatacgggttttcgttagtttttttatgtcgcgatggacgtagaatagacggtagtcggcgtcgataatgttttcgttatcgacgaatagacggaagtggttcggtttattagaagtgacgtgtagcggattaatcggtacgacgttgttttttttgtcgtttagttcgttgatgaattcgtaggttttagtatcggtggtcggtgtcggacgttgacgataatttatgttgtttttacgtagcggataaagtttattcggttagttattcggtagtattagacgacgtttatttcggttagaatttaaaattcgggaaattgttagataacgtcgggtaattaatttatttttcggtagggtttaatttttgttaaatttggattttttttcggttattttaagtatttcggttcgtcggaacgcgcggcgttacggacggatatttcggttagttggcgttaatttcgacgcg

SEQ ID NO: 27646 - DNA, 1250 bp, Artificial Sequence
  chemically treated genomic DNA (Homo sapiens) CpG-island No: 27646
cgcgtcgaaattaacgccaactaaccgaaatatccgtccgtaacgccgcgcgttccgacgaaccgaaatacttaaaataaccgaaaaaaaatccaaatttaacaaaaattaaaccctaccgaaaaataaattaattacccgacgttatctaacaatttcccgaattttaaattctaaccgaaataaacgtcgtctaatactaccgaataactaaccgaataaactttatccgctacgtaaaaacaacataaattatcgtcaacgtccgacaccgaccaccgatactaaaacctacgaattcatcaacgaactaaacgacaaaaaaaacaacgtcgtaccgattaatccgctacacgtcacttctaataaaccgaaccacttccgtctattcgtcgataacgaaaacattatcgacgccgactaccgtctattctacgtccatcgcgacataaaaaaactaacgaaaacccgtataaattataacgaaataaccttcctctctaaccgtatatacgaaatctacgactttacccacaacaccgcctacaccacgtcgataaaaaacgcgataaatattcaaataccaaaacgtacgcaaataatccgcgccattctactaaaaataaaacgcttacactcgcatctactcaaccttaacctaacctatcactttaccgacttcgactccgactttatacaattcttccgcgtacgtaaaacctccataaaaataacaaaaatccttaccgatacgcgtaaaacctacgacctaaacttaatcgacgaaattcgtcgcgatctactaaaaaacgacataatccaaacccgccaactaacacaacaaatacgtcgtaaaatacaaaaactaataaatatactactaaacactccgaacataaaacaacgcactatcgacattaatcgtctaaacccgaaaatcgctcgcgacttcaataacgtcgacccgataatccgtaccaacgatcacgcccgtaatacccgcgccgatcacccgtttatcgactataacctactaccaataaaaatccacaacgaacaaaactacgacgttatttcccgtctaaaaatacgtatcaacgaaatctataccgcgctaaacataatcgactacgatctaaataacctaccgaataacccactaataataaaaaactttacctacattccgcaccgctttacgctaaactttaccgaaacgccgcgcgacgatccatccactaaaacataac

SEQ ID NO: 27647 - DNA, 1250 bp, Artificial Sequence
  chemically treated genomic DNA (Homo sapiens) CpG-island No: 27647
cgcgtcgaagttgacgttaattaatcggaatattcgttcgtgacgtcgcgcgtttcggcgggtcggggtatttggggtgatcggaaaagggtttaggtttggtaaaagttaggttttgtcgggaagtaaattggttattcggcgttatttggtaatttttcgggttttggattttggtcggaatgaacgtcgtttggtgttgtcggatgattggtcggatgaattttattcgttgcgtaaagatagtatggattatcgttagcgttcggtatcgattatcgatgttgaaatttacgagtttattaacgaattgggcgataagaaaaataacgtcgtgtcgattggttcgttgtacgttatttttgatgaatcgggttattttcgtttgttcgtcgatggcgaaaatattatcgacgtcgattatcgtttgttttacgtttatcgcggtatggaaaaattggcggaaattcgtatgggttataacgaagtgatttttttttttgatcgtgtgtgcgggatttgcggttttgtttatagtatcgtttatattacgtcggtggaaaacgcgatgggtatttaggtgttagaacgtgcgtagatgattcgcgttattttgttggaggtagaacgtttgtattcgtatttgtttaattttggtttggtttgttattttatcggtttcgatttcggttttatgtagttttttcgcgtgcgtgaaatttttatgaaaatggtagagatttttatcggtgcgcgtaaaatttacggtttgaatttgatcggcgggattcgtcgcgatttgttgaaagacgatatgatttagattcgttagttggtataatagatgcgtcgtgaagtgtaggagttggtggatgtgttgttgagtatttcgaatatggaatagcgtattgtcggtattggtcgtttggattcggaaatcgttcgcgattttagtaacgtcggttcgatggttcgtgttagcggttacgttcgtgatattcgcgtcgattattcgtttgtcggttatggtttgttgttaatggaagtttatagcgagtagggttgcgacgttatttttcgtttgaaagtgcgtattaacgaagtttatatcgcgttgaatatgatcgattacggtttggataatttgtcgggtggtttattgatggtggaaggttttatttatatttcgtatcgttttgcgttgggttttgtcgaagcgtcgcgcggcgatttatttattggagtatgat

SEQ ID NO: 27648 - DNA, 1250 bp, Artificial Sequence
  chemically treated genomic DNA (Homo sapiens) CpG-island No: 27648
atcatactccaataaataaatcgccgcgcgacgcttcgacaaaacccaacgcaaaacgatacgaaatataaataaaaccttccaccatcaataaaccacccgacaaattatccaaaccgtaatcgatcatattcaacgcgatataaacttcgttaatacgcactttcaaacgaaaaataacgtcgcaaccctactcgctataaacttccattaacaacaaaccataaccgacaaacgaataatcgacgcgaatatcacgaacgtaaccgctaacacgaaccatcgaaccgacgttactaaaatcgcgaacgatttccgaatccaaacgaccaataccgacaatacgctattccatattcgaaatactcaacaacacatccaccaactcctacacttcacgacgcatctattataccaactaacgaatctaaatcatatcgtctttcaacaaatcgcgacgaatcccgccgatcaaattcaaaccgtaaattttacgcgcaccgataaaaatctctaccattttcataaaaatttcacgcacgcgaaaaaactacataaaaccgaaatcgaaaccgataaaataacaaaccaaaccaaaattaaacaaatacgaatacaaacgttctacctccaacaaaataacgcgaatcatctacgcacgttctaacacctaaatacccatcgcgttttccaccgacgtaatataaacgatactataaacaaaaccgcaaatcccgcacacacgatcaaaaaaaaaaatcacttcgttataacccatacgaatttccgccaatttttccataccgcgataaacgtaaaacaaacgataatcgacgtcgataatattttcgccatcgacgaacaaacgaaaataacccgattcatcaaaaataacgtacaacgaaccaatcgacacgacgttatttttcttatcgcccaattcgttaataaactcgtaaatttcaacatcgataatcgataccgaacgctaacgataatccatactatctttacgcaacgaataaaattcatccgaccaatcatccgacaacaccaaacgacgttcattccgaccaaaatccaaaacccgaaaaattaccaaataacgccgaataaccaatttacttcccgacaaaacctaacttttaccaaacctaaacccttttccgatcaccccaaataccccgacccgccgaaacgcgcgacgtcacgaacgaatattccgattaattaacgtcaacttcgacgcg

SEQ ID NO: 27649 - DNA, 541 bp, Artificial Sequence
  chemically treated genomic DNA (Homo sapiens) CpG-island No: 27649
tttcgagagtgtttaatatttttaaattaatcgaagtattattatattttaatatatacgatcgaatgattataatatcgattaacgtatacgttatttaaaaattcgcgtttttatagaaacggttttatacgagtttaacgtcgattaagcgttcgacggtatttttagttacgtatttacgtacgtataacggtaagtaattatttcggacggaatattatattacgatattatgatacgtaatcgcggaaatttatagcgatttattatttgcggtttttttttttatataattattcgaggaggcgtaggtggatattacgttcgacgacgacgcgcgcgagtaggacgaaaggcgaggtatattatcgagacggcgtgttacgtatagcgcgaggaataggacgacgttacgtatatataattatcgattcgcggcgacgttttaggacgatatgaggagaagtcgattttatagcgaggcgaaagtaaatcgtaggttcgggttcggcgcgggcgtattttaagttcgtattgg

SEQ ID NO: 27650 - DNA, 541 bp, Artificial Sequence
  chemically treated genomic DNA (Homo sapiens) CpG-island No: 27650
ccaatacgaacttaaaatacgcccgcgccgaacccgaacctacgatttactttcgcctcgctataaaatcgacttctcctcatatcgtcctaaaacgtcgccgcgaatcgataattatatatacgtaacgtcgtcctattcctcgcgctatacgtaacacgccgtctcgataatatacctcgcctttcgtcctactcgcgcgcgtcgtcgtcgaacgtaatatccacctacgcctcctcgaataattatataaaaaaaaaaaccgcaaataataaatcgctataaatttccgcgattacgtatcataatatcgtaatataatattccgtccgaaataattacttaccgttatacgtacgtaaatacgtaactaaaaataccgtcgaacgcttaatcgacgttaaactcgtataaaaccgtttctataaaaacgcgaatttttaaataacgtatacgttaatcgatattataatcattcgatcgtatatattaaaatataataatacttcgattaatttaaaaatattaaacactctcgaaa

SEQ ID NO: 27651 - DNA, 541 bp, Artificial Sequence
  chemically treated genomic DNA (Homo sapiens) CpG-island No: 27651
ttagtgcgggtttaggatgcgttcgcgtcgggttcgggtttgcggtttgttttcgtttcgttgtggggtcggtttttttttatatcgttttggggcgtcgtcgcgggtcggtggttgtgtgtgcgtggcgtcgttttgtttttcgcgttgtgcgtgatacgtcgtttcggtggtgtgtttcgtttttcgttttgttcgcgcgcgtcgtcgtcgggcgtggtgtttatttgcgttttttcgggtggttgtgtggggggggaaatcgtaggtggtaggtcgttgtgagttttcgcggttgcgtgttatgatgtcgtggtgtggtatttcgttcgggatggttgtttgtcgttgtgcgtgcgtggatgcgtgattgggggtgtcgtcgggcgtttggtcggcgttgggttcgtgtgaggtcgtttttgtgagggcgcgggtttttgggtagcgtgtgcgttggtcggtgttgtggttattcggtcgtgtgtgttggggtgtggtggtatttcgattggtttagggatgttaggtattttcggag

SEQ ID NO: 27652 - DNA, 541 bp, Artificial Sequence
  chemically treated genomic DNA (Homo sapiens) CpG-island No: 27652
ctccgaaaatacctaacatccctaaaccaatcgaaataccaccacaccccaacacacacgaccgaataaccacaacaccgaccaacgcacacgctacccaaaaacccgcgccctcacaaaaacgacctcacacgaacccaacgccgaccaaacgcccgacgacacccccaatcacgcatccacgcacgcacaacgacaaacaaccatcccgaacgaaataccacaccacgacatcataacacgcaaccgcgaaaactcacaacgacctaccacctacgatttccccccccacacaaccacccgaaaaaacgcaaataaacaccacgcccgacgacgacgcgcgcgaacaaaacgaaaaacgaaacacaccaccgaaacgacgtatcacgcacaacgcgaaaaacaaaacgacgccacgcacacacaaccaccgacccgcgacgacgccccaaaacgatataaaaaaaaaccgaccccacaacgaaacgaaaacaaaccgcaaacccgaacccgacgcgaacgcatcctaaacccgcactaa

SEQ ID NO: 27653 - DNA, 707 bp, Artificial Sequence
  chemically treated genomic DNA (Homo sapiens) CpG-island No: 27653
ttcgtcggtgtattacgtgtatttatgtatcgatttgattgattggttagggacgttttaagtatcgttaaacgtgcgaggttagaggttcgtaggatgcgacgaaatacgttggacggataggtgattatattattacgagagaacggtagaacgttatttaaagagcgttagtatagtattatgttaatatatttgttttcggattatattcgcgatagacgtagttaggaacgttacgttaggttaaggtaatgtggcgtttatgacggcggattttcgagaaggttttattatcgtgtgtcgcgttggttttcggtatattagttgaattagttgaataatataaggttattttagtttcgagtaacgatcggacggtataggtacgttcgtagatatggttgtgtgtgttttgaaatgtacggattttttcgtcggtgaaagttcgtttcgggtagttttcgtttcgattggaaggataagaagcggtttagagaggtaataaaagggttgaatttttttttgagacgatttttttaggaagttaaacgggttatgcgggacggaacgtgagtgaatattgggtaggtagtcgaatgtcgcgaaggtggggtagttatagtacggggaagcgagaataacgggagatatgaaagtttcgtaattatcgggggggggttaggatatagtgacggggtttagat

SEQ ID NO: 27654 - DNA, 707 bp, Artificial Sequence
  chemically treated genomic DNA (Homo sapiens) CpG-island No: 27654
atctaaaccccgtcactatatcctaacccccccccgataattacgaaactttcatatctcccgttattctcgcttccccgtactataactaccccaccttcgcgacattcgactacctacccaatattcactcacgttccgtcccgcataacccgtttaacttcctaaaaaaatcgtctcaaaaaaaaattcaacccttttattacctctctaaaccgcttcttatccttccaatcgaaacgaaaactacccgaaacgaactttcaccgacgaaaaaatccgtacatttcaaaacacacacaaccatatctacgaacgtacctataccgtccgatcgttactcgaaactaaaataaccttatattattcaactaattcaactaatataccgaaaaccaacgcgacacacgataataaaaccttctcgaaaatccgccgtcataaacgccacattaccttaacctaacgtaacgttcctaactacgtctatcgcgaatataatccgaaaacaaatatattaacataatactatactaacgctctttaaataacgttctaccgttctctcgtaataatataatcacctatccgtccaacgtatttcgtcgcatcctacgaacctctaacctcgcacgtttaacgatacttaaaacgtccctaaccaatcaatcaaatcgatacataaatacacgtaatacaccgacgaa

SEQ ID NO: 27655 - DNA, 707 bp, Artificial Sequence
  chemically treated genomic DNA (Homo sapiens) CpG-island No: 27655
gtttgggtttcgttattgtgttttgattttttttcggtggttgcgaggtttttatgtttttcgttattttcgttttttcgtattgtggttgttttattttcgcggtattcgattgtttgtttagtgtttatttacgtttcgtttcgtataattcgtttgattttttgaagaagtcgttttagggagagatttagtttttttgttatttttttggatcgttttttgtttttttagtcggagcgagagttattcggggcggatttttatcgacggaaagattcgtgtattttaaggtatatataattatatttgcgagcgtgtttatatcgttcggtcgttattcgggattgaaatggttttgtgttgtttagttggtttagttggtgtatcgggaattagcgcggtatacgataatgaggttttttcgggaattcgtcgttatggacgttatattgttttggtttggcgtgacgtttttgattgcgtttgtcgcggatgtggttcggaggtagatgtattggtatgatgttatattagcgttttttgagtggcgttttatcgttttttcgtggtaatgtgattatttgttcgtttagcgtgtttcgtcgtattttgcgagtttttaatttcgtacgtttggcgatatttggagcgtttttgattaattagttaaatcgatgtatagatgtacgtagtatatcggcggg

SEQ ID NO: 27656 - DNA, 707 bp, Artificial Sequence
  chemically treated genomic DNA (Homo sapiens) CpG-island No: 27656
cccgccgatatactacgtacatctatacatcgatttaactaattaatcaaaaacgctccaaatatcgccaaacgtacgaaattaaaaactcgcaaaatacgacgaaacacgctaaacgaacaaataatcacattaccacgaaaaaacgataaaacgccactcaaaaaacgctaatataacatcataccaatacatctacctccgaaccacatccgcgacaaacgcaatcaaaaacgtcacgccaaaccaaaacaatataacgtccataacgacgaattcccgaaaaaacctcattatcgtataccgcgctaattcccgatacaccaactaaaccaactaaacaacacaaaaccatttcaatcccgaataacgaccgaacgatataaacacgctcgcaaatataattatatataccttaaaatacacgaatctttccgtcgataaaaatccgccccgaataactctcgctccgactaaaaaaacaaaaaacgatccaaaaaaataacaaaaaaactaaatctctccctaaaacgacttcttcaaaaaatcaaacgaattatacgaaacgaaacgtaaataaacactaaacaaacaatcgaataccgcgaaaataaaacaaccacaatacgaaaaaacgaaaataacgaaaaacataaaaacctcgcaaccaccgaaaaaaaatcaaaacacaataacgaaacccaaac

SEQ ID NO: 27657 - DNA, 619 bp, Artificial Sequence
  chemically treated genomic DNA (Homo sapiens) CpG-island No: 27657
acgttatttatagcggtgcggagatggaaatcggttttaacgttagttatgtgttggatgttttgaacgcgttgaaatgcgaaaacgttcgtatgatgttgatcgattcggtttttagcgtgtagattgaagatgcggttagttagagcgcggtttatgttgttatgttaatgagattgtaatgttttttattcgtttgttgattcgcgattttcgtaatattgaaatcgcggatttcgttttatttttcggttttaattttttggtaggtgttaacggtagtggtaaaattagcgtgttggaagttatttatacgttcggttatggtcgggcgtttcgtagtttgtagattggtcgcgttattcgttatgagtaggaggcgtatgttttttacgggcgattatagggcgaagagcgcgagatagcgatcggtttaattaaagataaatagggcgatagtaaagttcgtatcgacggtatagacgggtataaggtcgcggaattggcgtatttgatgttaatgtagttgataacgttagaagggtttattttatttaacggcgggtttaaatatagaagagtatttttcgattgggggatgtttttataacgaatcggg

SEQ ID NO: 27658 - DNA, 619 bp, Artificial Sequence
  chemically treated genomic DNA (Homo sapiens) CpG-island No: 27658
cccgattcgttataaaaacatcccccaatcgaaaaatactcttctatatttaaacccgccgttaaataaaataaacccttctaacgttatcaactacattaacatcaaatacgccaattccgcgaccttatacccgtctataccgtcgatacgaactttactatcgccctatttatctttaattaaaccgatcgctatctcgcgctcttcgccctataatcgcccgtaaaaaacatacgcctcctactcataacgaataacgcgaccaatctacaaactacgaaacgcccgaccataaccgaacgtataaataacttccaacacgctaattttaccactaccgttaacacctaccaaaaaattaaaaccgaaaaataaaacgaaatccgcgatttcaatattacgaaaatcgcgaatcaacaaacgaataaaaaacattacaatctcattaacataacaacataaaccgcgctctaactaaccgcatcttcaatctacacgctaaaaaccgaatcgatcaacatcatacgaacgttttcgcatttcaacgcgttcaaaacatccaacacataactaacgttaaaaccgatttccatctccgcaccgctataaataacgt

SEQ ID NO: 27659 - DNA, 619 bp, Artificial Sequence
  chemically treated genomic DNA (Homo sapiens) CpG-island No: 27659
ttcggttcgttgtgaaagtattttttagtcgaggaatgtttttttgtatttgggttcgtcgttgagtaaagtaaatttttttggcgttattaattgtattggtattaggtgcgttagtttcgcgattttatgttcgtttgtatcgtcgatgcggattttgttgtcgttttgtttgtttttggttaagtcgatcgttgtttcgcgtttttcgttttgtaatcgttcgtggagaatatacgttttttgtttatggcgaatgacgcgattaatttgtaaattgcgaaacgttcgattatggtcgagcgtatagatggtttttagtacgttggttttgttattgtcgttggtatttattagaaagttaaagtcgggagataaggcgagattcgcggttttaatgttgcggaaatcgcggattaataagcgggtgagggatattatagttttattggtatgataatataagtcgcgttttggttggtcgtatttttaatttgtacgttggaaatcgaatcggttagtattatgcggacgttttcgtattttagcgcgtttagaatatttagtatataattgacgttgaagtcgatttttattttcgtatcgttataggtaacgt

SEQ ID NO: 27660 - DNA, 619 bp, Artificial Sequence
  chemically treated genomic DNA (Homo sapiens) CpG-island No: 27660
acgttacctataacgatacgaaaataaaaatcgacttcaacgtcaattatatactaaatattctaaacgcgctaaaatacgaaaacgtccgcataatactaaccgattcgatttccaacgtacaaattaaaaatacgaccaaccaaaacgcgacttatattatcataccaataaaactataatatccctcacccgcttattaatccgcgatttccgcaacattaaaaccgcgaatctcgccttatctcccgactttaactttctaataaataccaacgacaataacaaaaccaacgtactaaaaaccatctatacgctcgaccataatcgaacgtttcgcaatttacaaattaatcgcgtcattcgccataaacaaaaaacgtatattctccacgaacgattacaaaacgaaaaacgcgaaacaacgatcgacttaaccaaaaacaaacaaaacgacaacaaaatccgcatcgacgatacaaacgaacataaaatcgcgaaactaacgcacctaataccaatacaattaataacgccaaaaaaatttactttactcaacgacgaacccaaatacaaaaaaacattcctcgactaaaaaatactttcacaacgaaccgaa

SEQ ID NO: 27661 - DNA, 758 bp, Artificial Sequence
  chemically treated genomic DNA (Homo sapiens) CpG-island No: 27661
taagttgcgcggcgtatacgttatgatggcgggtttgacggaagaatagaaagcgtacggcgtgattattgtttttgcgggtaattacgcgtagggcgtcgcgtttttttttgcgcggttaggcgtgaaggttttgatcgttatgttaatcgttatcgtcgatattaaagtcgacgcggtgcgcggtttcggcggcgaagtgttgttttacggcgcgaattttgatgaagcgaaagttaaagcgatcgaattgttatagtagtaggggtttatttgggtgtcgtcgttcgattattcgatggtgattgtcgggtaaggtacgttggcgttggaattgttttagtaggacgtttatttcgatcgcgtatttgtgttagtcggcggcggcggtttggttgttggcgtggcggtgttgattaaataattgatgtcgtaaattaaagtgatcgtcgtagaagcggaagatttcgtttgtttgaaagtagcgttggatgcgggttattcggttgatttgtcgcgcgtagggttatttgttgaaggcgtagcggtaaaacgtatcggtgacgaaatttttcgtttatgttaggagtatttcgacgatattattatcgtcgatagcgatgcgatttgtgcggcgatgaaggattattcgaagatgtgcgcgcggtggggaatttttgggggttggggttggggaatgaaaatttttgtttgaaaattgggggaacgttggtaattttcgggttacgaaatttgag

SEQ ID NO: 27662 - DNA, 758 bp, Artificial Sequence
  chemically treated genomic DNA (Homo sapiens) CpG-island No: 27662
ctcaaatttcgtaacccgaaaattaccaacgttcccccaattttcaaacaaaaattttcattccccaaccccaacccccaaaaattccccaccgcgcgcacatcttcgaataatccttcatcgccgcacaaatcgcatcgctatcgacgataataatatcgtcgaaatactcctaacataaacgaaaaatttcgtcaccgatacgttttaccgctacgccttcaacaaataaccctacgcgcgacaaatcaaccgaataacccgcatccaacgctactttcaaacaaacgaaatcttccgcttctacgacgatcactttaatttacgacatcaattatttaatcaacaccgccacgccaacaaccaaaccgccgccgccgactaacacaaatacgcgatcgaaataaacgtcctactaaaacaattccaacgccaacgtaccttacccgacaatcaccatcgaataatcgaacgacgacacccaaataaacccctactactataacaattcgatcgctttaactttcgcttcatcaaaattcgcgccgtaaaacaacacttcgccgccgaaaccgcgcaccgcgtcgactttaatatcgacgataacgattaacataacgatcaaaaccttcacgcctaaccgcgcaaaaaaaaacgcgacgccctacgcgtaattacccgcaaaaacaataatcacgccgtacgctttctattcttccgtcaaacccgccatcataacgtatacgccgcgcaactta

SEQ ID NO: 27663 - DNA, 758 bp, Artificial Sequence
  chemically treated genomic DNA (Homo sapiens) CpG-island No: 27663
tttagatttcgtggttcggagattgttagcgtttttttaatttttaggtaaaaatttttattttttagttttagtttttagaggttttttatcgcgcgtatattttcgaataattttttatcgtcgtatagatcgtatcgttatcgacggtgatgatgtcgtcgagatatttttggtataaacggaaggtttcgttatcgatgcgttttatcgttacgtttttagtaaatagttttacgcgcggtagattaatcggatgattcgtatttagcgttgtttttaggtaggcggagtttttcgtttttacggcgattattttgatttgcggtattagttgtttgattagtatcgttacgttagtagttagatcgtcgtcgtcgattggtataaatacgcggtcgagatgggcgttttgttggagtagttttagcgttagcgtgttttgttcggtaattattatcggatggtcgaacggcggtatttaggtgaatttttgttgttgtgatagttcgatcgttttggttttcgttttattaaagttcgcgtcgtggagtagtatttcgtcgtcgaagtcgcgtatcgcgtcgattttgatgtcggcggtggcggttggtataacgattagggtttttacgtttaatcgcgtagaagaaaacgcgacgttttgcgcgtggttattcgtagaagtagtgattacgtcgtgcgttttttgttttttcgttaggttcgttattatggcgtatgcgtcgcgtagttta

SEQ ID NO: 27664 - DNA, 758 bp, Artificial Sequence
  chemically treated genomic DNA (Homo sapiens) CpG-island No: 27664
taaactacgcgacgcatacgccataataacgaacctaacgaaaaaacaaaaaacgcacgacgtaatcactacttctacgaataaccacgcgcaaaacgtcgcgttttcttctacgcgattaaacgtaaaaaccctaatcgttataccaaccgccaccgccgacatcaaaatcgacgcgatacgcgacttcgacgacgaaatactactccacgacgcgaactttaataaaacgaaaaccaaaacgatcgaactatcacaacaacaaaaattcacctaaataccgccgttcgaccatccgataataattaccgaacaaaacacgctaacgctaaaactactccaacaaaacgcccatctcgaccgcgtatttataccaatcgacgacgacgatctaactactaacgtaacgatactaatcaaacaactaataccgcaaatcaaaataatcgccgtaaaaacgaaaaactccgcctacctaaaaacaacgctaaatacgaatcatccgattaatctaccgcgcgtaaaactatttactaaaaacgtaacgataaaacgcatcgataacgaaaccttccgtttataccaaaaatatctcgacgacatcatcaccgtcgataacgatacgatctatacgacgataaaaaattattcgaaaatatacgcgcgataaaaaacctctaaaaactaaaactaaaaaataaaaatttttacctaaaaattaaaaaaacgctaacaatctccgaaccacgaaatctaaa

SEQ ID NO: 27665 - DNA, 634 bp, Artificial Sequence
  chemically treated genomic DNA (Homo sapiens) CpG-island No: 27665
ttcgttcggagcgtttcggcggttattgggtatgtttcgttgttaggtaagttcggggttgtaggtagtttgcgcgtcgggcggattttagttgcggtcgcgcgtatttttttttttaagtagggagcgggcgtatgatggcggtcgcggcggtagcggttgcggggagttttagtagcggcggcggcggcggcggcggtagcggtagcggtagtagtagtagcgatacgtttagtatcggcgaggaggaaaggatgcggcgttttttttagacgtgcgacggcgacggggacggatatattagtaggtacgcggggaggtacgaggaaatcgataggagcgagattagttttttcgcgcgtttttgatttttgttttgttttttcgttttaatttgcggtaagttgtttagaagttcgcgggaaaagttgtcgcgatttcgagagcgcgtagtcggttcggttacgaaggtcgaggggattgttttgttcgttttgcgggggtgttagttggtttaattttttttagcgttgtttttgtttaggcgttgggagatatttttttaggatgcgtattttttcgggggttcggagtgtttttttttgtgggaaaaggagttttggtcgtttgtttt

SEQ ID NO: 27666 - DNA, 634 bp, Artificial Sequence
  chemically treated genomic DNA (Homo sapiens) CpG-island No: 27666
aaaacaaacgaccaaaactccttttcccacaaaaaaaaacactccgaacccccgaaaaaatacgcatcctaaaaaaatatctcccaacgcctaaacaaaaacaacgctaaaaaaaattaaaccaactaacacccccgcaaaacgaacaaaacaatcccctcgaccttcgtaaccgaaccgactacgcgctctcgaaatcgcgacaacttttcccgcgaacttctaaacaacttaccgcaaattaaaacgaaaaaacaaaacaaaaatcaaaaacgcgcgaaaaaactaatctcgctcctatcgatttcctcgtacctccccgcgtacctactaatatatccgtccccgtcgccgtcgcacgtctaaaaaaaacgccgcatcctttcctcctcgccgatactaaacgtatcgctactactactaccgctaccgctaccgccgccgccgccgccgccgctactaaaactccccgcaaccgctaccgccgcgaccgccatcatacgcccgctccctacttaaaaaaaaaaatacgcgcgaccgcaactaaaatccgcccgacgcgcaaactacctacaaccccgaacttacctaacaacgaaacatacccaataaccgccgaaacgctccgaacgaa

SEQ ID NO: 27667 - DNA, 634 bp, Artificial Sequence
  chemically treated genomic DNA (Homo sapiens) CpG-island No: 27667
gggataagcggttagaatttttttttttatagggaagaatatttcgagttttcggaagagtgcgtattttaaggagatgttttttaacgtttagataaagatagcgttgggaaaagttggattaattggtattttcgtaaggcgaatagagtagttttttcggttttcgtggtcgagtcggttacgcgttttcggagtcgcggtaatttttttcgcgagtttttgagtaatttgtcgtaagttggggcgagggggtagagtaggggttaagggcgcgcggagggattgatttcgtttttgtcggttttttcgtattttttcgcgtatttgttgatgtattcgttttcgtcgtcgtcgtacgtttggaagaggcgtcgtattttttttttttcgtcggtgttggacgtgtcgttgttgttgttgtcgttgtcgttgtcgtcgtcgtcgtcgtcgtcgttgttggagtttttcgtagtcgttgtcgtcgcggtcgttattatgcgttcgttttttatttgggaggaggagtacgcgcgatcgtagttggaattcgttcggcgcgtaagttgtttgtagtttcgaatttgtttgataacggagtatgtttagtggtcgtcggggcgtttcgggcgag

SEQ ID NO: 27668 - DNA, 634 bp, Artificial Sequence
  chemically treated genomic DNA (Homo sapiens) CpG-island No: 27668
ctcgcccgaaacgccccgacgaccactaaacatactccgttatcaaacaaattcgaaactacaaacaacttacgcgccgaacgaattccaactacgatcgcgcgtactcctcctcccaaataaaaaacgaacgcataataacgaccgcgacgacaacgactacgaaaaactccaacaacgacgacgacgacgacgacgacaacgacaacgacaacaacaacaacgacacgtccaacaccgacgaaaaaaaaaaaatacgacgcctcttccaaacgtacgacgacgacgaaaacgaatacatcaacaaatacgcgaaaaaatacgaaaaaaccgacaaaaacgaaatcaatccctccgcgcgcccttaacccctactctaccccctcgccccaacttacgacaaattactcaaaaactcgcgaaaaaaattaccgcgactccgaaaacgcgtaaccgactcgaccacgaaaaccgaaaaaactactctattcgccttacgaaaataccaattaatccaacttttcccaacgctatctttatctaaacgttaaaaaacatctccttaaaatacgcactcttccgaaaactcgaaatattcttccctataaaaaaaaaaattctaaccgcttatccc

SEQ ID NO: 27669 - DNA, 993 bp, Artificial Sequence
  chemically treated genomic DNA (Homo sapiens) CpG-island No: 27669
ggtatgttggtcgttaagacgacggtgtcggtgttgggcgtgtcggtggttagtcgttatttgtagggcgtcgattttttgtattttatcgtgtagatgtttaagggtatttcggtcgttattttcgttatcggtacggtcggcgcggttaatgcggcgttgttcgtcgtggttatgttggcgatcggtaatgtggttttgttggttaagttggatgtttttcgcgcgaagtagacggcggcggtttaggttatgagcgaggaattgcgttgatggcggttttggttttcggcgtcgttattttcggcgttttcggtggcggttagttcggtcgtatgttcgtttacgtcgtttaggttttgggttatcgttgtatcgtgttcgatttcgacgttattagtttcgtcggcgtcgtggcggagaagtatgtgagggtcgattatttcgattttttcggtttggtttagatggcgcgcgattgtgacgttattattatcgagttcgagaacgtgtcggtcgtggttttggagattttggtcggtatgcgtacgggtcgtttcggtcgcggcggtcgtcgtcgtttgttaggatcgggtcgtcgagaaggtttatttcgaggtcgtcggcgtgttttgcgtttcgtatgtcgttattacgaacgagatcgagttggtcgtcgtcgatttcggtttgttgttcggtattttgaagattagtcgtatgggttatgacggtaagggttaggtgcgcgtgtttagcgtcgtcgagttggttcgggtttgggacgatttggggcgcgtgttttgcgtgttggagtagttgttgtcgttgaagttcgagtttagcgtgttggtggcgcgcggcgtcgacggttagatcgttaattttttcgtgtagtagaatttgtatcgcggcggtattttggtcgttatcgaggtttcggttttcgatgtgtcggtcgaggtcgagaagttggtcgtcgttgtcgcgcgt

SEQ ID NO: 27670 - DNA, 993 bp, Artificial Sequence
  chemically treated genomic DNA (Homo sapiens) CpG-island No: 27670
acgcgcgacaacgacgaccaacttctcgacctcgaccgacacatcgaaaaccgaaacctcgataacgaccaaaataccgccgcgatacaaattctactacacgaaaaaattaacgatctaaccgtcgacgccgcgcgccaccaacacgctaaactcgaacttcaacgacaacaactactccaacacgcaaaacacgcgccccaaatcgtcccaaacccgaaccaactcgacgacgctaaacacgcgcacctaacccttaccgtcataacccatacgactaatcttcaaaataccgaacaacaaaccgaaatcgacgacgaccaactcgatctcgttcgtaataacgacatacgaaacgcaaaacacgccgacgacctcgaaataaaccttctcgacgacccgatcctaacaaacgacgacgaccgccgcgaccgaaacgacccgtacgcataccgaccaaaatctccaaaaccacgaccgacacgttctcgaactcgataataataacgtcacaatcgcgcgccatctaaaccaaaccgaaaaaatcgaaataatcgaccctcacatacttctccgccacgacgccgacgaaactaataacgtcgaaatcgaacacgatacaacgataacccaaaacctaaacgacgtaaacgaacatacgaccgaactaaccgccaccgaaaacgccgaaaataacgacgccgaaaaccaaaaccgccatcaacgcaattcctcgctcataacctaaaccgccgccgtctacttcgcgcgaaaaacatccaacttaaccaacaaaaccacattaccgatcgccaacataaccacgacgaacaacgccgcattaaccgcgccgaccgtaccgataacgaaaataacgaccgaaatacccttaaacatctacacgataaaatacaaaaaatcgacgccctacaaataacgactaaccaccgacacgcccaacaccgacaccgtcgtcttaacgaccaacatacc

SEQ ID NO: 27671 - DNA, 993 bp, Artificial Sequence
  chemically treated genomic DNA (Homo sapiens) CpG-island No: 27671
gcgcgcggtagcgacggttagtttttcgatttcggtcggtatatcgggggtcgggatttcggtgacggttaggatgtcgtcgcggtgtaggttttgttgtacggggaagttgacgatttggtcgtcggcgtcgcgcgttattagtacgttgagttcgaattttagcggtagtagttgttttagtacgtagggtacgcgttttaggtcgttttaggttcgggttagttcggcggcgttggatacgcgtatttggtttttgtcgttatagtttatgcggttggtttttaggatgtcgggtagtaggtcggggtcgacggcggttagttcgatttcgttcgtgatgacggtatgcggggcgtagggtacgtcggcggtttcgaaatgagttttttcgacggttcggttttggtagacggcgacggtcgtcgcggtcggggcgattcgtgcgtatgtcggttagggtttttagggttacggtcggtacgttttcgaattcggtggtgatggcgttatagtcgcgcgttatttgggttaggtcgaaggaatcgaggtagtcggtttttatatgttttttcgttacggcgtcggcggggttgatggcgtcgggatcgagtacgatgtagcgatagtttagggtttgggcggcgtggacgaatatgcggtcgagttggtcgttatcgaggacgtcgagggtggcggcgtcgggaattagagtcgttattagcgtagtttttcgtttatggtttgggtcgtcgtcgtttgtttcgcgcggaaggtatttagtttggttagtagggttatattgtcggtcgttagtatggttacggcgaatagcgtcgtattggtcgcgtcggtcgtgtcgatggcgaaggtggcgatcgggatgtttttgggtatttgtacgatggaatgtagggagtcgacgttttgtagatggcggttggttatcggtacgtttagtatcggtatcgtcgttttggcggttagtatgtt

SEQ ID NO: 27672 - DNA, 993 bp, Artificial Sequence
  chemically treated genomic DNA (Homo sapiens) CpG-island No: 27672
aacatactaaccgccaaaacgacgataccgatactaaacgtaccgataaccaaccgccatctacaaaacgtcgactccctacattccatcgtacaaatacccaaaaacatcccgatcgccaccttcgccatcgacacgaccgacgcgaccaatacgacgctattcgccgtaaccatactaacgaccgacaatataaccctactaaccaaactaaataccttccgcgcgaaacaaacgacgacgacccaaaccataaacgaaaaactacgctaataacgactctaattcccgacgccgccaccctcgacgtcctcgataacgaccaactcgaccgcatattcgtccacgccgcccaaaccctaaactatcgctacatcgtactcgatcccgacgccatcaaccccgccgacgccgtaacgaaaaaacatataaaaaccgactacctcgattccttcgacctaacccaaataacgcgcgactataacgccatcaccaccgaattcgaaaacgtaccgaccgtaaccctaaaaaccctaaccgacatacgcacgaatcgccccgaccgcgacgaccgtcgccgtctaccaaaaccgaaccgtcgaaaaaactcatttcgaaaccgccgacgtaccctacgccccgcataccgtcatcacgaacgaaatcgaactaaccgccgtcgaccccgacctactacccgacatcctaaaaaccaaccgcataaactataacgacaaaaaccaaatacgcgtatccaacgccgccgaactaacccgaacctaaaacgacctaaaacgcgtaccctacgtactaaaacaactactaccgctaaaattcgaactcaacgtactaataacgcgcgacgccgacgaccaaatcgtcaacttccccgtacaacaaaacctacaccgcgacgacatcctaaccgtcaccgaaatcccgacccccgatataccgaccgaaatcgaaaaactaaccgtcgctaccgcgcgc

SEQ ID NO: 27673 - DNA, 669 bp, Artificial Sequence
  chemically treated genomic DNA (Homo sapiens) CpG-island No: 27673
tacgcgggaagggtgttgtaataatatttgttagcgttagcgatcgttacgtttaggtgttagagtcggaatcggatcgagaatttatagtttttcgtttgttagtgggttggagaggattagattacgtagttgttgtaggaataatggcgcgtgttgattgttatgatttttcgtacgtataattatatggttggtttacggcggtagttgtattattcgtcgtttagttagcgtttgttcggtaaaggcgtcgtagtttttatagagtaacgtttgtaatagaggatgtttcggatggtgcgtttgtagtattatttcgttttgtttattcgtacgttcggtacgatcggcgatttgggtgtaaagttgagcgaaacgttttgtcgagcgaaaatcggtagaaaatagcgcgtcgtttacgtttagtaatgtaattagcgttatattcgggaaatggtgatttttcgttagtatttgtgtattaattaaaattcgcgcgtcgtcgcgatgtatttttgttagttgttgttttagcgtttttttgcggttggtggtatcgcggtcgatacgagaaatgggtacgtcggggaataacggcgcgagcgtttgtttaagttgttcggtgtttagttttcggggattcgtgcgttgattcggagaaagttt

SEQ ID NO: 27674 - DNA, 669 bp, Artificial Sequence
  chemically treated genomic DNA (Homo sapiens) CpG-island No: 27674
aaactttctccgaatcaacgcacgaatccccgaaaactaaacaccgaacaacttaaacaaacgctcgcgccgttattccccgacgtacccatttctcgtatcgaccgcgataccaccaaccgcaaaaaaacgctaaaacaacaactaacaaaaatacatcgcgacgacgcgcgaattttaattaatacacaaatactaacgaaaaatcaccatttcccgaatataacgctaattacattactaaacgtaaacgacgcgctattttctaccgattttcgctcgacaaaacgtttcgctcaactttacacccaaatcgccgatcgtaccgaacgtacgaataaacaaaacgaaataatactacaaacgcaccatccgaaacatcctctattacaaacgttactctataaaaactacgacgcctttaccgaacaaacgctaactaaacgacgaataatacaactaccgccgtaaaccaaccatataattatacgtacgaaaaatcataacaatcaacacgcgccattattcctacaacaactacgtaatctaatcctctccaacccactaacaaacgaaaaactataaattctcgatccgattccgactctaacacctaaacgtaacgatcgctaacgctaacaaatattattacaacacccttcccgcgta

SEQ ID NO: 27675 - DNA, 669 bp, Artificial Sequence
  chemically treated genomic DNA (Homo sapiens) CpG-island No: 27675
gggtttttttcgggttaacgtacgggttttcgggggttgggtatcgaatagtttgaatagacgttcgcgtcgttgtttttcggcgtgtttatttttcgtatcgatcgcgatattattagtcgtaaaggggcgttggaatagtaattggtagaagtatatcgcggcggcgcgcggattttgattggtatataaatgttggcgaaaggttattatttttcggatgtgacgttggttgtattattggacgtggacggcgcgttgttttttgtcgattttcgttcggtagagcgtttcgtttagttttatatttaggtcgtcggtcgtgtcgggcgtgcgggtaaatagggcgaagtggtgttgtaaacgtattattcggaatattttttgttgtaaacgttgttttataaaggttacgacgtttttgtcgaataggcgttggttgagcggcgaatgatgtagttatcgtcgtggattagttatgtgattgtgcgtgcggaagattataataattagtacgcgttattgtttttgtaataattgcgtaatttgattttttttagtttattggtagacgagaaattgtgggttttcggttcggtttcggttttggtatttaaacgtggcggtcgttggcgttggtagatattgttgtagtatttttttcgcgtg

SEQ ID NO: 27676 - DNA, 669 bp, Artificial Sequence
  chemically treated genomic DNA (Homo sapiens) CpG-island No: 27676
cacgcgaaaaaaatactacaacaatatctaccaacgccaacgaccgccacgtttaaataccaaaaccgaaaccgaaccgaaaacccacaatttctcgtctaccaataaactaaaaaaaatcaaattacgcaattattacaaaaacaataacgcgtactaattattataatcttccgcacgcacaatcacataactaatccacgacgataactacatcattcgccgctcaaccaacgcctattcgacaaaaacgtcgtaacctttataaaacaacgtttacaacaaaaaatattccgaataatacgtttacaacaccacttcgccctatttacccgcacgcccgacacgaccgacgacctaaatataaaactaaacgaaacgctctaccgaacgaaaatcgacaaaaaacaacgcgccgtccacgtccaataatacaaccaacgtcacatccgaaaaataataacctttcgccaacatttatataccaatcaaaatccgcgcgccgccgcgatatacttctaccaattactattccaacgcccctttacgactaataatatcgcgatcgatacgaaaaataaacacgccgaaaaacaacgacgcgaacgtctattcaaactattcgatacccaacccccgaaaacccgtacgttaacccgaaaaaaaccc

SEQ ID NO: 27677 - DNA, 740 bp, Artificial Sequence
  chemically treated genomic DNA (Homo sapiens) CpG-island No: 27677
ggtaggcgggcgagaaggaaatttagaaaataatacgggcggagacgcgaattaaagaattaggcgggcgaatttagttgagaattttagagtgacgtgtatcgggtcgggaaggagaatcgaggttcggttcgggcggggacgagaagtagcgttcgggcgagcgaggatcgaggtcggcgcgggcgggcgcggtttttgtttttttttttcgcgcgtttcgcggttgtatcggttttatgagttcgcggtttttcgtcgttcgggtcgttcgtagtttttgatttgatttgttttcgttatggtcgaggtcgttttcggcgtcgggggtacgtttttggagggcgagcgtggtaagaggttttcgtcggagggcgagtttgtagtttcggcgttcggagttttgggtatgtgtgcggcggttggattagatagggttgtaggtgtttggggagttcgcgttaattatacggggaggaggattagggttaaacgtaatttggcgtggtgtttggacgaggggtcggtttttttcggtattgcggttgcggttcggcgggcggggttgggacggtgtttcgggttggggtttcggcgcggagacgcggatacgttttttcgagagttttaggtttgggttgcgttttgttattttcgggttgcgggatcgcggcgggttagggatgtgtttgagagagttttttcgcgaagaatatagaattatacggttttgggtttaa

SEQ ID NO: 27678 - DNA, 740 bp, Artificial Sequence
  chemically treated genomic DNA (Homo sapiens) CpG-island No: 27678
ttaaacccaaaaccgtataattctatattcttcgcgaaaaaactctctcaaacacatccctaacccgccgcgatcccgcaacccgaaaataacaaaacgcaacccaaacctaaaactctcgaaaaaacgtatccgcgtctccgcgccgaaaccccaacccgaaacaccgtcccaaccccgcccgccgaaccgcaaccgcaataccgaaaaaaaccgacccctcgtccaaacaccacgccaaattacgtttaaccctaatcctcctccccgtataattaacgcgaactccccaaacacctacaaccctatctaatccaaccgccgcacacatacccaaaactccgaacgccgaaactacaaactcgccctccgacgaaaacctcttaccacgctcgccctccaaaaacgtacccccgacgccgaaaacgacctcgaccataacgaaaacaaatcaaatcaaaaactacgaacgacccgaacgacgaaaaaccgcgaactcataaaaccgatacaaccgcgaaacgcgcgaaaaaaaaaaacaaaaaccgcgcccgcccgcgccgacctcgatcctcgctcgcccgaacgctacttctcgtccccgcccgaaccgaacctcgattctccttcccgacccgatacacgtcactctaaaattctcaactaaattcgcccgcctaattctttaattcgcgtctccgcccgtattattttctaaatttccttctcgcccgcctacc

SEQ ID NO: 27679 - DNA, 740 bp, Artificial Sequence
  chemically treated genomic DNA (Homo sapiens) CpG-island No: 27679
ttgaatttaggatcgtatgattttgtatttttcgcggagaggtttttttaagtatatttttggttcgtcgcgatttcgtagttcgggggtggtagggcgtagtttaagtttggggttttcggaggggcgtgttcgcgttttcgcgtcgggattttagttcgaagtatcgttttagtttcgttcgtcgggtcgtagtcgtagtgtcgggaggagtcggtttttcgtttagatattacgttaggttacgtttgattttgattttttttttcgtgtagttgacgcgggttttttaggtatttgtaattttgtttggtttagtcgtcgtatatatatttagaatttcggacgtcggggttgtaggttcgtttttcggcgggggttttttgttacgttcgttttttagggacgtgttttcggcgtcggaggcggtttcggttatggcgaggataggttaggttaggggttacggacggttcgggcgacggggagtcgcgggtttatggggtcggtgtagtcgcggagcgcgcgggaggaggagataaaggtcgcgttcgttcgcgtcggtttcggttttcgttcgttcgagcgttgtttttcgttttcgttcgagtcgaatttcgattttttttttcggttcgatgtacgttattttagggtttttagttgagttcgttcgtttagttttttggttcgcgttttcgttcgtgttgttttttgggtttttttttcgttcgtttatt

SEQ ID NO: 27680 - DNA, 740 bp, Artificial Sequence
  chemically treated genomic DNA (Homo sapiens) CpG-island No: 27680
aataaacgaacgaaaaaaaaacccaaaaaacaacacgaacgaaaacgcgaaccaaaaaactaaacgaacgaactcaactaaaaaccctaaaataacgtacatcgaaccgaaaaaaaaaatcgaaattcgactcgaacgaaaacgaaaaacaacgctcgaacgaacgaaaaccgaaaccgacgcgaacgaacgcgacctttatctcctcctcccgcgcgctccgcgactacaccgaccccataaacccgcgactccccgtcgcccgaaccgtccgtaacccctaacctaacctatcctcgccataaccgaaaccgcctccgacgccgaaaacacgtccctaaaaaacgaacgtaacaaaaaacccccgccgaaaaacgaacctacaaccccgacgtccgaaattctaaatatatatacgacgactaaaccaaacaaaattacaaatacctaaaaaacccgcgtcaactacacgaaaaaaaaaatcaaaatcaaacgtaacctaacgtaatatctaaacgaaaaaccgactcctcccgacactacgactacgacccgacgaacgaaactaaaacgatacttcgaactaaaatcccgacgcgaaaacgcgaacacgcccctccgaaaaccccaaacttaaactacgccctaccacccccgaactacgaaatcgcgacgaaccaaaaatatacttaaaaaaacctctccgcgaaaaatacaaaatcatacgatcctaaattcaa

SEQ ID NO: 27681 - DNA, 981 bp, Artificial Sequence
  chemically treated genomic DNA (Homo sapiens) CpG-island No: 27681
gcgttttttttttgtttgtcgtttttttatttgttcgtttatttgttcgtcggtttttttatagtttttgttcgttttgtttttgttttagagtttcgagcggtagttgtaggcggtgttggtttcgttcgcggttttgcggtttcgtttgtttttttttttttttcggggttttttgttcgcggttcgggttaaagtacgggtaggtggcgagttcgtgggttttcgtcggggtgggtagcgtggttgtgttgggggtttggcgcgtcgagttgagggcgtatgcgcggagggaatttggggtcgggggcggttagtaagtaggtgtaggcggttgggggcgtacgcggtttagtgtatcgatagagttcgcggtggggtggagacgcgttgggtttgttcgtgaggtgggcgaggagcgttgcgcgtgttaggttgtattttgtggttgagcgttgggggtttcgcgtcgaggcgcgtttaaagtagcggagttaggaatcggattcggcgtgtgtttgggtacggtgtttcggcggggcgtttagggagggtgagtttttcgatttcggcgtttcgtttgttttttacgcgttttttttttttttttttttgtttttagatgttggttacgttgttgattattcgttagtttttttagaacgtgcgcgaggttttgtagtcgtatttgtatcggcgtttgggtcgcggcgagttgggtttgcgggtcgtttgggagttggttcgagttttgtttggttttttgagttttcggcgttttgcgtttcgtcgtttcgaattttaggcggatgagggcgggggcggcggtagcgggggcgggggtcgtaggtgttttagcgggggttgcggggcgtcggaggaggaggaggaggcggcgttggtggagcggcggcgggcgggggaaggcggggaggagggggacgggtttttagggggtaaggaggaggacgaggacgacga

SEQ ID NO: 27682 - DNA, 981 bp, Artificial Sequence
  chemically treated genomic DNA (Homo sapiens) CpG-island No: 27682
tcgtcgtcctcgtcctcctccttaccccctaaaaacccgtccccctcctccccgccttcccccgcccgccgccgctccaccaacgccgcctcctcctcctcctccgacgccccgcaacccccgctaaaacacctacgacccccgcccccgctaccgccgcccccgccctcatccgcctaaaattcgaaacgacgaaacgcaaaacgccgaaaactcaaaaaaccaaacaaaactcgaaccaactcccaaacgacccgcaaacccaactcgccgcgacccaaacgccgatacaaatacgactacaaaacctcgcgcacgttctaaaaaaactaacgaataatcaacaacgtaaccaacatctaaaaacaaaaaaaaaaaaaaaaaaaacgcgtaaaaaacaaacgaaacgccgaaatcgaaaaactcaccctccctaaacgccccgccgaaacaccgtacccaaacacacgccgaatccgattcctaactccgctactttaaacgcgcctcgacgcgaaacccccaacgctcaaccacaaaatacaacctaacacgcgcaacgctcctcgcccacctcacgaacaaacccaacgcgtctccaccccaccgcgaactctatcgatacactaaaccgcgtacgcccccaaccgcctacacctacttactaaccgcccccgaccccaaattccctccgcgcatacgccctcaactcgacgcgccaaacccccaacacaaccacgctacccaccccgacgaaaacccacgaactcgccacctacccgtactttaacccgaaccgcgaacaaaaaaccccgaaaaaaaaaaaaaaacaaacgaaaccgcaaaaccgcgaacgaaaccaacaccgcctacaactaccgctcgaaactctaaaacaaaaacaaaacgaacaaaaactataaaaaaaccgacgaacaaataaacgaacaaataaaaaaacgacaaacaaaaaaaaaacgc

SEQ ID NO: 27683 - DNA, 981 bp, Artificial Sequence
  chemically treated genomic DNA (Homo sapiens) CpG-island No: 27683
tcgtcgttttcgtttttttttttgttttttggaggttcgtttttttttttttcgttttttttcgttcgtcgtcgttttattagcgtcgttttttttttttttttcggcgtttcgtagttttcgttgaggtatttgcggttttcgttttcgttgtcgtcgttttcgtttttattcgtttggggttcgaggcggcggggcgtagggcgtcggaggtttaggaggttaagtagggttcgggttagtttttagacggttcgtaggtttagttcgtcgcggtttaggcgtcggtataggtgcggttgtaggatttcgcgtacgttttggaggaattggcgggtgattagtagcgtggttagtatttgggggtaggaaggggaaggagagaggcgcgtggggggtaagcggggcgtcgggatcgggggatttattttttttgggcgtttcgtcggagtatcgtgtttagatatacgtcgaattcggtttttaatttcgttgttttggacgcgtttcgacgcgaggtttttagcgtttagttataaaatatagtttggtacgcgtagcgtttttcgtttattttacgggtaggtttagcgcgtttttattttatcgcgggttttgtcggtgtattgggtcgcgtgcgtttttagtcgtttgtatttgtttgttggtcgttttcgattttagatttttttcgcgtatgcgtttttagttcggcgcgttaggtttttagtatagttacgttgtttatttcggcgaggatttacgggttcgttatttgttcgtattttggttcgggtcgcgagtaggaggtttcggagggagaggaggagtaggcggaatcgtagggtcgcgagcgggattagtatcgtttgtagttgtcgttcgaggttttgggatagggataggacgagtaggagttgtgaagggatcgacggatagatggacggatagatggggggacgataggtagagagaggacgt

SEQ ID NO: 27684 - DNA, 981 bp, Artificial Sequence
  chemically treated genomic DNA (Homo sapiens) CpG-island No: 27684
acgtcctctctctacctatcgtccccccatctatccgtccatctatccgtcgatcccttcacaactcctactcgtcctatccctatcccaaaacctcgaacgacaactacaaacgatactaatcccgctcgcgaccctacgattccgcctactcctcctctccctccgaaacctcctactcgcgacccgaaccaaaatacgaacaaataacgaacccgtaaatcctcgccgaaataaacaacgtaactatactaaaaacctaacgcgccgaactaaaaacgcatacgcgaaaaaaatctaaaatcgaaaacgaccaacaaacaaatacaaacgactaaaaacgcacgcgacccaatacaccgacaaaacccgcgataaaataaaaacgcgctaaacctacccgtaaaataaacgaaaaacgctacgcgtaccaaactatattttataactaaacgctaaaaacctcgcgtcgaaacgcgtccaaaacaacgaaattaaaaaccgaattcgacgtatatctaaacacgatactccgacgaaacgcccaaaaaaaataaatcccccgatcccgacgccccgcttaccccccacgcgcctctctccttccccttcctacccccaaatactaaccacgctactaatcacccgccaattcctccaaaacgtacgcgaaatcctacaaccgcacctataccgacgcctaaaccgcgacgaactaaacctacgaaccgtctaaaaactaacccgaaccctacttaacctcctaaacctccgacgccctacgccccgccgcctcgaaccccaaacgaataaaaacgaaaacgacgacaacgaaaacgaaaaccgcaaatacctcaacgaaaactacgaaacgccgaaaaaaaaaaaaaaaacgacgctaataaaacgacgacgaacgaaaaaaaacgaaaaaaaaaaaaacgaacctccaaaaaacaaaaaaaaaaacgaaaacgacga

SEQ ID NO: 27685 - DNA, 524 bp, Artificial Sequence
  chemically treated genomic DNA (Homo sapiens) CpG-island No: 27685
ggcgtagcgtcgcgtatagttcgcgtttcggggtcgtttagaggtttatcgcgtcgtcgtcgtcgggtttttattcgttcgtttcgatttttttcggtgggcgttgagtcgggtaggtttttgggtttcgcggttcgatcgtttttttcggttgtttttgcgcgttcgcggttttttcggggagggcgcggcggttatttgttgcgggttttcggagcgagtgaagattagcgattcggcgtagttcgttcgcgggtcggatttttgttagcgttaggcgttttttttcgtcgtttagcgttaattatagttggagtttcggggaggaaggtcggttcggagatgcgcggttttttaaaggggtagcgcgttttttcggggttgcggttttaggttttagtttgggtatcggtttagcgcgttacgcgcgaatttttcggagcgaagtaacgttttgttggttttgttttattgttgtttttttataggtttggtttttaatttataagatgaatttttaggcg

SEQ ID NO: 27686 - DNA, 524 bp, Artificial Sequence
  chemically treated genomic DNA (Homo sapiens) CpG-island No: 27686
cgcctaaaaattcatcttataaattaaaaaccaaacctataaaaaaacaacaataaaacaaaaccaacaaaacgttacttcgctccgaaaaattcgcgcgtaacgcgctaaaccgatacccaaactaaaacctaaaaccgcaaccccgaaaaaacgcgctacccctttaaaaaaccgcgcatctccgaaccgaccttcctccccgaaactccaactataattaacgctaaacgacgaaaaaaaacgcctaacgctaacaaaaatccgacccgcgaacgaactacgccgaatcgctaatcttcactcgctccgaaaacccgcaacaaataaccgccgcgccctccccgaaaaaaccgcgaacgcgcaaaaacaaccgaaaaaaacgatcgaaccgcgaaacccaaaaacctacccgactcaacgcccaccgaaaaaaatcgaaacgaacgaataaaaacccgacgacgacgacgcgataaacctctaaacgaccccgaaacgcgaactatacgcgacgctacgcc

SEQ ID NO: 27687 - DNA, 524 bp, Artificial Sequence
  chemically treated genomic DNA (Homo sapiens) CpG-island No: 27687
cgtttggaagtttattttatagattgggggttaagtttgtaaaagaataatagtaaaatagagttaataggacgttgtttcgtttcgaagggttcgcgcgtagcgcgttgagtcggtgtttaggttggggtttggagtcgtagtttcgaaaaggcgcgttgtttttttaaaaggtcgcgtattttcgggtcggttttttttttcggggttttagttgtgattgacgttgggcggcgagaggaggcgtttggcgttaataaaagttcggttcgcgggcgagttgcgtcgggtcgttagtttttattcgtttcggggattcgtaataagtggtcgtcgcgtttttttcggggaagtcgcgggcgcgtaggggtagtcgaaggaggcggtcgagtcgcggagtttaggggtttgttcggtttagcgtttatcggaggggatcggggcgggcggatggggattcggcggcggcggcgcggtgagtttttgggcggtttcggggcgcgggttgtgcgcggcgttgcgtt

SEQ ID NO: 27688 - DNA, 524 bp, Artificial Sequence
  chemically treated genomic DNA (Homo sapiens) CpG-island No: 27688
aacgcaacgccgcgcacaacccgcgccccgaaaccgcccaaaaactcaccgcgccgccgccgccgaatccccatccgcccgccccgatcccctccgataaacgctaaaccgaacaaacccctaaactccgcgactcgaccgcctccttcgactacccctacgcgcccgcgacttccccgaaaaaaacgcgacgaccacttattacgaatccccgaaacgaataaaaactaacgacccgacgcaactcgcccgcgaaccgaacttttattaacgccaaacgcctcctctcgccgcccaacgtcaatcacaactaaaaccccgaaaaaaaaaaccgacccgaaaatacgcgaccttttaaaaaaacaacgcgccttttcgaaactacgactccaaaccccaacctaaacaccgactcaacgcgctacgcgcgaacccttcgaaacgaaacaacgtcctattaactctattttactattattcttttacaaacttaacccccaatctataaaataaacttccaaacg

SEQ ID NO: 27689 - DNA, 593 bp, Artificial Sequence
  chemically treated genomic DNA (Homo sapiens) CpG-island No: 27689
ttttatatcggtttttaatgttgtttcgttttttcgattttttttatcggttttattgcggttttggtttttgcggtttatagtatcggttttagtgcggtttcgttttttcggtttcgttatcgtttttattgtggtttagtattttggattttttttttcgagatttattttggtcgtaggggttgcgaataaggttgcgttcgatgggtttgcgcgcgtagaagcggtttagggggtaaggtttggcgttacgggcgggagattggtagttgcgggcgaggtgtagtagcgcgcggtcggtggcgtcgtggtcgcgggttaggattagtagttatagggtttggtcgtttattagggttcgttagtttcggtatatttggcggtagcgttcgagtagcgtgcgcggggggacgtggtttagtattattagaagtagttttgggggtagttggtttaggtttagcgttttttcgggtttcggtttcggcgcggggattcgggcggttcggtttttggagatcgaggcgtttatggttttttcgttaggttcggttgtggttgcgggagaggaagggttaaggcgttaggga

SEQ ID NO: 27690 - DNA, 593 bp, Artificial Sequence
  chemically treated genomic DNA (Homo sapiens) CpG-island No: 27690
tccctaacgccttaacccttcctctcccgcaaccacaaccgaacctaacgaaaaaaccataaacgcctcgatctccaaaaaccgaaccgcccgaatccccgcgccgaaaccgaaacccgaaaaaacgctaaacctaaaccaactacccccaaaactacttctaataatactaaaccacgtccccccgcgcacgctactcgaacgctaccgccaaatataccgaaactaacgaaccctaataaacgaccaaaccctataactactaatcctaacccgcgaccacgacgccaccgaccgcgcgctactacacctcgcccgcaactaccaatctcccgcccgtaacgccaaaccttaccccctaaaccgcttctacgcgcgcaaacccatcgaacgcaaccttattcgcaacccctacgaccaaaataaatctcgaaaaaaaaaatccaaaatactaaaccacaataaaaacgataacgaaaccgaaaaaacgaaaccgcactaaaaccgatactataaaccgcaaaaaccaaaaccgcaataaaaccgataaaaaaaatcgaaaaaacgaaacaacattaaaaaccgatataaaa

SEQ ID NO: 27691 - DNA, 593 bp, Artificial Sequence
  chemically treated genomic DNA (Homo sapiens) CpG-island No: 27691
tttttgacgttttgattttttttttttcgtagttatagtcgggtttggcggggggattatgggcgtttcggtttttaggggtcgggtcgttcgggttttcgcgtcggagtcggaattcgaagaggcgttggatttgagttaattatttttagagttgtttttggtggtgttgagttacgttttttcgcgtacgttgttcgggcgttgtcgttaagtgtgtcggggttggcgagttttggtggacggttaggttttgtggttgttgattttggttcgcgattacggcgttatcggtcgcgcgttgttgtatttcgttcgtagttgttagtttttcgttcgtaacgttaggttttgttttttgggtcgtttttgcgcgcgtagatttatcggacgtaattttattcgtaatttttgcggttaaggtggatttcggaagaggaagtttaggatgttgggttatagtgggagcggtagcggggtcggaggggcggggtcgtattgggatcggtattatgggtcgtaggggttagggtcgtagtgggatcggtgggaggagtcggagaggcggggtagtattgggagtcggtgtgagg

SEQ ID NO: 27692 - DNA, 593 bp, Artificial Sequence
  chemically treated genomic DNA (Homo sapiens) CpG-island No: 27692
cctcacaccgactcccaatactaccccgcctctccgactcctcccaccgatcccactacgaccctaacccctacgacccataataccgatcccaatacgaccccgcccctccgaccccgctaccgctcccactataacccaacatcctaaacttcctcttccgaaatccaccttaaccgcaaaaattacgaataaaattacgtccgataaatctacgcgcgcaaaaacgacccaaaaaacaaaacctaacgttacgaacgaaaaactaacaactacgaacgaaatacaacaacgcgcgaccgataacgccgtaatcgcgaaccaaaatcaacaaccacaaaacctaaccgtccaccaaaactcgccaaccccgacacacttaacgacaacgcccgaacaacgtacgcgaaaaaacgtaactcaacaccaccaaaaacaactctaaaaataattaactcaaatccaacgcctcttcgaattccgactccgacgcgaaaacccgaacgacccgacccctaaaaaccgaaacgcccataatccccccgccaaacccgactataactacgaaaaaaaaaaaatcaaaacgtcaaaaa

SEQ ID NO: 27693 - DNA, 534 bp, Artificial Sequence
  chemically treated genomic DNA (Homo sapiens) CpG-island No: 27693
ggcgttttcgtgtgcgtaagtaaggtagaggcgggattttcggcgttttttagtagcgattatttttattggcgttagggagtttttggagcgttgtgttgggatcgtggtggtgattggatttaggaggtcgagagtcgtttttttttttgtatagacgtgattttgtagttttttaacggcgttcgttgtttttaatttagtttattttacgtggttttatggcggcggtcgcgttaaggtttttcgtttaggtaattgtggcgtttttcgtgtttttcggttattttttagttatataagttttaaagtagcgagggagcggtatttgtttacggttttgtaattcggattcggcgtcgggatattgaggcgttttcgggagggatttttgttttagatattcgtgggatgcggtggggagagcgataggtatagggaggggcgcgggtaatggtttggagatggacggattcgggaggatggaatttggggtttataggcgtttgtagggaataatttgtgaggcggaat

SEQ ID NO: 27694 - DNA, 534 bp, Artificial Sequence
  chemically treated genomic DNA (Homo sapiens) CpG-island No: 27694
attccgcctcacaaattattccctacaaacgcctataaaccccaaattccatcctcccgaatccgtccatctccaaaccattacccgcgcccctccctatacctatcgctctccccaccgcatcccacgaatatctaaaacaaaaatccctcccgaaaacgcctcaatatcccgacgccgaatccgaattacaaaaccgtaaacaaataccgctccctcgctactttaaaacttatataactaaaaaataaccgaaaaacacgaaaaacgccacaattacctaaacgaaaaaccttaacgcgaccgccgccataaaaccacgtaaaataaactaaattaaaaacaacgaacgccgttaaaaaactacaaaatcacgtctatacaaaaaaaaaaacgactctcgacctcctaaatccaatcaccaccacgatcccaacacaacgctccaaaaactccctaacgccaataaaaataatcgctactaaaaaacgccgaaaatcccgcctctaccttacttacgcacacgaaaacgcc

SEQ ID NO: 27695 - DNA, 534 bp, Artificial Sequence
  chemically treated genomic DNA (Homo sapiens) CpG-island No: 27695
gtttcgttttataggttgttttttataggcgtttgtggattttaggttttattttttcggattcgtttatttttaggttattgttcgcgtttttttttgtatttgtcgttttttttatcgtattttacgggtgtttgaaatagggatttttttcgagagcgttttagtgtttcgacgtcgggttcgggttgtagagtcgtaaataggtgtcgttttttcgttgttttaggatttgtgtgattaggaggtgatcggagagtacggaaggcgttataattatttgaacggggaattttagcgcggtcgtcgttatgggattacgtggggtaagttgggttgagagtagcgggcgtcgttaaagagttgtagagttacgtttgtgtaaagagaagaacgattttcgattttttggatttagttattattacggttttaatatagcgttttaaggattttttaacgttaatggaaatggtcgttattaaagggcgtcgggagtttcgtttttattttatttgcgtatacggaaacgtt

SEQ ID NO: 27696 - DNA, 534 bp, Artificial Sequence
  chemically treated genomic DNA (Homo sapiens) CpG-island No: 27696
aacgtttccgtatacgcaaataaaataaaaacgaaactcccgacgccctttaataacgaccatttccattaacgttaaaaaatccttaaaacgctatattaaaaccgtaataataactaaatccaaaaaatcgaaaatcgttcttctctttacacaaacgtaactctacaactctttaacgacgcccgctactctcaacccaacttaccccacgtaatcccataacgacgaccgcgctaaaattccccgttcaaataattataacgccttccgtactctccgatcacctcctaatcacacaaatcctaaaacaacgaaaaaacgacacctatttacgactctacaacccgaacccgacgtcgaaacactaaaacgctctcgaaaaaaatccctatttcaaacacccgtaaaatacgataaaaaaaacgacaaatacaaaaaaaaacgcgaacaataacctaaaaataaacgaatccgaaaaaataaaacctaaaatccacaaacgcctataaaaaacaacctataaaacgaaac

SEQ ID NO: 27697 - DNA, 1031 bp, Artificial Sequence
  chemically treated genomic DNA (Homo sapiens) CpG-island No: 27697
tttagagatacgtggaatcgaggggttaatttcggtttaggttttttatcgtatcggattttggaatttacgattacgaaagttttattgtttcgcgattggttttcgggtcgtatgatattatagcgtttgatttatttttcgggtttcgattggttggtcgcgttattgtgacgttacggttagtttacgttttgattgtagatagtcggcgtttttttttttttatcgcgcgggttttagttatcggtgtttttttttatattcgtttttgcgtcggttgttattcgcgtttttttcgtcgtcgtcgttttgttgttgtttaaagttgttgtcgttttttgcgtataaaggtaaagtcgttagtttcgggaaatttcgtcgggggtcgtcgttcggttatgatattcgcgcgagcgcgcggtcgggaagcggttagagagaattgtcgttaggtttcggatttggtgtcgagaaagagttgtcggggtaattcgcgtttcgttcgcggtttttagtttcgtcggtttcggggtatagttcggtttttcgggcgcggggaaaggggtgcgggtgcgggcgcgggcggttcgttttacgtcgaggttgaggtagggcgttcgggagcgttttttgtgttgcggttttatttgtgcgcgttgataggcgtcgcggggtacgatatcgtgtttatattagacgcggagggatggatttgttcgtttgggttttttcgttttgggggtcggagcgcgcggcgggagagtcgggggagcgttttcggagggagcgcgttttttttggagtcggcgaaattcgggtgagttcgaagagtttgtgcgagggtttgcgggtatcgggcgtcgttggggggatttttcggttttttttttttgttttgtttttttcgttttcgttaattttgcggatttttcgttcgtttttcggagggaagtttgttagttcgggatcgttttagtttttattgaaattagataacggtagtttttggtatttagggagggatgagg

SEQ ID NO: 27698 - DNA, 1031 bp, Artificial Sequence
  chemically treated genomic DNA (Homo sapiens) CpG-island No: 27698
cctcatccctccctaaataccaaaaactaccgttatctaatttcaataaaaactaaaacgatcccgaactaacaaacttccctccgaaaaacgaacgaaaaatccgcaaaattaacgaaaacgaaaaaaacaaaacaaaaaaaaaaaaccgaaaaatccccccaacgacgcccgatacccgcaaaccctcgcacaaactcttcgaactcacccgaatttcgccgactccaaaaaaaacgcgctccctccgaaaacgctcccccgactctcccgccgcgcgctccgacccccaaaacgaaaaaacccaaacgaacaaatccatccctccgcgtctaatataaacacgatatcgtaccccgcgacgcctatcaacgcgcacaaataaaaccgcaacacaaaaaacgctcccgaacgccctacctcaacctcgacgtaaaacgaaccgcccgcgcccgcacccgcacccctttccccgcgcccgaaaaaccgaactataccccgaaaccgacgaaactaaaaaccgcgaacgaaacgcgaattaccccgacaactctttctcgacaccaaatccgaaacctaacgacaattctctctaaccgcttcccgaccgcgcgctcgcgcgaatatcataaccgaacgacgacccccgacgaaatttcccgaaactaacgactttacctttatacgcaaaaaacgacaacaactttaaacaacaacaaaacgacgacgacgaaaaaaacgcgaataacaaccgacgcaaaaacgaatataaaaaaaaacaccgataactaaaacccgcgcgataaaaaaaaaaaaacgccgactatctacaatcaaaacgtaaactaaccgtaacgtcacaataacgcgaccaaccaatcgaaacccgaaaaataaatcaaacgctataatatcatacgacccgaaaaccaatcgcgaaacaataaaactttcgtaatcgtaaattccaaaatccgatacgataaaaaacctaaaccgaaattaacccctcgattccacgtatctctaaa

SEQ ID NO: 27699 - DNA, 1031 bp, Artificial Sequence
  chemically treated genomic DNA (Homo sapiens) CpG-island No: 27699
ttttatttttttttgagtattaagggttgtcgttgtttggttttaataaaaattgaagcggtttcgagttagtaggttttttttcgaggggcggacggaaggttcgtagggttaacggaagcggagagaataggataaaaaggaaaggtcggagagtttttttagcggcgttcggtgttcgtagattttcgtataggtttttcgaatttattcgggtttcgtcgattttaaagaaagcgcgtttttttcgagagcgttttttcggttttttcgtcgcgcgtttcggtttttagggcgggaggatttaggcggatagatttattttttcgcgtttggtgtgggtacggtgtcgtgtttcgcggcgtttgttagcgcgtataggtgggatcgtagtatagagaacgttttcgagcgttttgttttagtttcggcgtggggcgagtcgttcgcgttcgtattcgtattttttttttcgcgttcgaggagtcgggttgtatttcggagtcggcggagttggaggtcgcgggcggagcgcgggttgtttcggtagttttttttcggtattaggttcgagatttaacggtagttttttttgatcgtttttcggtcgcgcgttcgcgcgggtgttatggtcgagcggcggttttcgacgaagtttttcggagttgacggttttatttttatacgtaaggggcggtagtagttttgagtagtagtaaggcggcggcggcggagggagcgcgggtggtagtcggcgtagaggcggatgtagaaggagatatcggtggttaggattcgcgcgatgggaagaggaaggcgtcggttatttataattagaacgtgggttgatcgtgacgttataatggcgcggttagttaatcgggattcgaaggatgaattaagcgttatgatgttatgcggttcgggagttaatcgcgggataatagaattttcgtgatcgtaaattttagaattcgatgcggtggagagtttaggtcggggttggtttttcggttttacgtgtttttggg

SEQ ID NO: 27700 - DNA, 1031 bp, Artificial Sequence
  chemically treated genomic DNA (Homo sapiens) CpG-island No: 27700
cccaaaaacacgtaaaaccgaaaaaccaaccccgacctaaactctccaccgcatcgaattctaaaatttacgatcacgaaaattctattatcccgcgattaactcccgaaccgcataacatcataacgcttaattcatccttcgaatcccgattaactaaccgcgccattataacgtcacgatcaacccacgttctaattataaataaccgacgccttcctcttcccatcgcgcgaatcctaaccaccgatatctccttctacatccgcctctacgccgactaccacccgcgctccctccgccgccgccgccttactactactcaaaactactaccgccccttacgtataaaaataaaaccgtcaactccgaaaaacttcgtcgaaaaccgccgctcgaccataacacccgcgcgaacgcgcgaccgaaaaacgatcaaaaaaaactaccgttaaatctcgaacctaataccgaaaaaaaactaccgaaacaacccgcgctccgcccgcgacctccaactccgccgactccgaaatacaacccgactcctcgaacgcgaaaaaaaaaatacgaatacgaacgcgaacgactcgccccacgccgaaactaaaacaaaacgctcgaaaacgttctctatactacgatcccacctatacgcgctaacaaacgccgcgaaacacgacaccgtacccacaccaaacgcgaaaaaataaatctatccgcctaaatcctcccgccctaaaaaccgaaacgcgcgacgaaaaaaccgaaaaaacgctctcgaaaaaaacgcgctttctttaaaatcgacgaaacccgaataaattcgaaaaacctatacgaaaatctacgaacaccgaacgccgctaaaaaaactctccgacctttcctttttatcctattctctccgcttccgttaaccctacgaaccttccgtccgcccctcgaaaaaaaacctactaactcgaaaccgcttcaatttttattaaaaccaaacaacgacaacccttaatactcaaaaaaaaataaaa

SEQ ID NO: 27701 - DNA, 539 bp, Artificial Sequence
  chemically treated genomic DNA (Homo sapiens) CpG-island No: 27701
aacgcggtgggtatattcgcgttaggcgggtattagggtttgtttggggtttttttttttattcgcgcgggtggatatcgttaattgtttgtggttagggcggtgcgtcgttattttcgcggtattcggtttttttcgttagttttgcgttattcggtttttttcgttcgtttcgcgttttcggcggggttcgtttcgttttttcgcggcggttattttatttatttcgcggttgtatttattaattatcgtttattaatagcgtcgtatttggcgatggggcggggtttcgcgaggagtacgttcgcgtttttttcgttttgagttcgttttcgggtcgggtaattttcgggtaatgattagatttcgttttcgcgttgattttttttggggatatcgggtgggggtggaggaggcgttgagttagggagaggagggttgtgcggttcggattacgtaattttgggatcggagggtggttgaggttttgagggaagaatggaaggcggttttgatttttggtgtttttacgtttttta

SEQ ID NO: 27702 - DNA, 539 bp, Artificial Sequence
  chemically treated genomic DNA (Homo sapiens) CpG-island No: 27702
taaaaaacgtaaaaacaccaaaaatcaaaaccgccttccattcttccctcaaaacctcaaccaccctccgatcccaaaattacgtaatccgaaccgcacaaccctcctctccctaactcaacgcctcctccacccccacccgatatccccaaaaaaaatcaacgcgaaaacgaaatctaatcattacccgaaaattacccgacccgaaaacgaactcaaaacgaaaaaaacgcgaacgtactcctcgcgaaaccccgccccatcgccaaatacgacgctattaataaacgataattaataaatacaaccgcgaaataaataaaataaccgccgcgaaaaaacgaaacgaaccccgccgaaaacgcgaaacgaacgaaaaaaaccgaataacgcaaaactaacgaaaaaaaccgaataccgcgaaaataacgacgcaccgccctaaccacaaacaattaacgatatccacccgcgcgaataaaaaaaaaaaccccaaacaaaccctaatacccgcctaacgcgaatatacccaccgcgtt

SEQ ID NO: 27703 - DNA, 539 bp, Artificial Sequence
  chemically treated genomic DNA (Homo sapiens) CpG-island No: 27703
tgaagggcgtggaagtattagaagttaaggtcgttttttattttttttttaaggttttaattatttttcgattttaaggttgcgtggttcgggtcgtataatttttttttttttagtttagcgttttttttatttttattcgatgtttttaggaagggttagcgcggggacgaggtttggttattgttcgggaattattcggttcgggagcgagtttaaggcggggagggcgcgagcgtgtttttcgcgaggtttcgttttatcgttagatgcggcgttgttggtgagcggtgattggtgggtgtagtcgcggaatgaatggggtgatcgtcgcgggggagcggggcgggtttcgtcgagggcgcggggcgggcgaaaggagtcgagtggcgtagggttggcgagaggagtcgagtgtcgcgggggtggcggcgtatcgttttgattataggtagttaacggtgtttattcgcgcgagtggaggagggggttttaggtaggttttggtattcgtttggcgcgagtgtgtttatcgcgtt

SEQ ID NO: 27704 - DNA, 539 bp, Artificial Sequence
  chemically treated genomic DNA (Homo sapiens) CpG-island No: 27704
aacgcgataaacacactcgcgccaaacgaataccaaaacctacctaaaaccccctcctccactcgcgcgaataaacaccgttaactacctataatcaaaacgatacgccgccacccccgcgacactcgactcctctcgccaaccctacgccactcgactcctttcgcccgccccgcgccctcgacgaaacccgccccgctcccccgcgacgatcaccccattcattccgcgactacacccaccaatcaccgctcaccaacaacgccgcatctaacgataaaacgaaacctcgcgaaaaacacgctcgcgccctccccgccttaaactcgctcccgaaccgaataattcccgaacaataaccaaacctcgtccccgcgctaacccttcctaaaaacatcgaataaaaataaaaaaaacgctaaactaaaaaaaaaaaaattatacgacccgaaccacgcaaccttaaaatcgaaaaataattaaaaccttaaaaaaaaaataaaaaacgaccttaacttctaatacttccacgcccttca

SEQ ID NO: 27705 - DNA, 819 bp, Artificial Sequence
  chemically treated genomic DNA (Homo sapiens) CpG-island No: 27705
tcgttttcgtagttcgacggttaatgaagaggcgggtcgcggtttgggcggttaatgggcgcggtggggcggtgcgggttacggtttggggttttcgcgcgtttttcgttcgtagtggaagtcgacgtcgcgttcgtatgttcgtaggcgtcgcgtagtcgtcgttatcgtcgttagttcgtgcgttttcggcgcgtattcgtcgcgtttttattttcgtcgtcggttaggggcgcgttcggtcgtttcggatagtgtttcgttgcggtttcgcggcgatggttattaagatcgataaagaggtttgtcgggcggcgtataatttggtgcgcgacgacggttcggtcgttatttggtaggaattttttattcgtttttacgtttcgtttttcgggttcgcgcggggtttcgtgtatcgagtcggtttttaggcgggacggattcgggtttttcgcgttgtttttttcgttttatttcgggacggcgtgttaggttttcgcgggttttttcgtggttagcgcgtttgttagattgttttttgtaagcgtcgcgtcgcgcggttattagcgttgatgtgtgtgtgtgtttttttttttttttaatttaaagggtgatttttaaatatgacggttttattatcgttttcggcgagtagggagcggagtattagtattttatttagtagtgtataggtagggaggcgcgtttgcgggcggatgcgcggtcgttgggaggttgtttgtattcggggagtttcggttagagcgaattcgggaggaatcgtggttatatggggtgtttttggttatggcgtgggag

SEQ ID NO: 27706 - DNA, 819 bp, Artificial Sequence
  chemically treated genomic DNA (Homo sapiens) CpG-island No: 27706
ctcccacgccataaccaaaaacaccccatataaccacgattcctcccgaattcgctctaaccgaaactccccgaatacaaacaacctcccaacgaccgcgcatccgcccgcaaacgcgcctccctacctatacactactaaataaaatactaatactccgctccctactcgccgaaaacgataataaaaccgtcatatttaaaaatcaccctttaaattaaaaaaaaaaaaaaacacacacacacatcaacgctaataaccgcgcgacgcgacgcttacaaaaaacaatctaacaaacgcgctaaccacgaaaaaacccgcgaaaacctaacacgccgtcccgaaataaaacgaaaaaaacaacgcgaaaaacccgaatccgtcccgcctaaaaaccgactcgatacacgaaaccccgcgcgaacccgaaaaacgaaacgtaaaaacgaataaaaaattcctaccaaataacgaccgaaccgtcgtcgcgcaccaaattatacgccgcccgacaaacctctttatcgatcttaataaccatcgccgcgaaaccgcaacgaaacactatccgaaacgaccgaacgcgcccctaaccgacgacgaaaataaaaacgcgacgaatacgcgccgaaaacgcacgaactaacgacgataacgacgactacgcgacgcctacgaacatacgaacgcgacgtcgacttccactacgaacgaaaaacgcgcgaaaaccccaaaccgtaacccgcaccgccccaccgcgcccattaaccgcccaaaccgcgacccgcctcttcattaaccgtcgaactacgaaaacga

SEQ ID NO: 27707 - DNA, 819 bp, Artificial Sequence
  chemically treated genomic DNA (Homo sapiens) CpG-island No: 27707
tttttacgttatggttaggggtattttatgtggttacggtttttttcgggttcgttttggtcggggtttttcgggtgtagataattttttaacgatcgcgtattcgttcgtaggcgcgtttttttatttgtgtattgttggatgaagtgttggtatttcgttttttgttcgtcggggacgatggtggagtcgttatatttaaaagttattttttgggttgggagaagaaaaaaatatatatatatattagcgttggtggtcgcgcgacgcggcgtttgtagaggataatttaatagacgcgttggttacggagaagttcgcgggggtttggtacgtcgtttcggaataaggcgaggaagatagcgcgggaggttcgaattcgtttcgtttggaggtcggttcggtgtacgaggtttcgcgcgagttcggggagcggggcgtggagacgaatgaaaagtttttattagatgacggtcgagtcgtcgtcgcgtattaggttgtacgtcgttcggtaagtttttttgtcgattttggtggttatcgtcgcggagtcgtagcgggatattgttcggggcggtcgagcgcgtttttggtcggcggcggggatgggagcgcggcgggtacgcgtcgagggcgtacgggttggcggcggtggcgacggttacgcggcgtttgcgagtatgcgagcgcggcgtcggtttttattgcggacggagagcgcgcggggattttaggtcgtggttcgtatcgttttatcgcgtttattggtcgtttaggtcgcggttcgtttttttattggtcgtcgggttgcgggggcgg

SEQ ID NO: 27708 - DNA, 819 bp, Artificial Sequence
  chemically treated genomic DNA (Homo sapiens) CpG-island No: 27708
ccgcccccgcaacccgacgaccaataaaaaaacgaaccgcgacctaaacgaccaataaacgcgataaaacgatacgaaccacgacctaaaatccccgcgcgctctccgtccgcaataaaaaccgacgccgcgctcgcatactcgcaaacgccgcgtaaccgtcgccaccgccgccaacccgtacgccctcgacgcgtacccgccgcgctcccatccccgccgccgaccaaaaacgcgctcgaccgccccgaacaatatcccgctacgactccgcgacgataaccaccaaaatcgacaaaaaaacttaccgaacgacgtacaacctaatacgcgacgacgactcgaccgtcatctaataaaaacttttcattcgtctccacgccccgctccccgaactcgcgcgaaacctcgtacaccgaaccgacctccaaacgaaacgaattcgaacctcccgcgctatcttcctcgccttattccgaaacgacgtaccaaacccccgcgaacttctccgtaaccaacgcgtctattaaattatcctctacaaacgccgcgtcgcgcgaccaccaacgctaatatatatatatatttttttcttctcccaacccaaaaaataacttttaaatataacgactccaccatcgtccccgacgaacaaaaaacgaaataccaacacttcatccaacaatacacaaataaaaaaacgcgcctacgaacgaatacgcgatcgttaaaaaattatctacacccgaaaaaccccgaccaaaacgaacccgaaaaaaaccgtaaccacataaaatacccctaaccataacgtaaaaa

SEQ ID NO: 27709 - DNA, 648 bp, Artificial Sequence
  chemically treated genomic DNA (Homo sapiens) CpG-island No: 27709
  unsure (227, 263)
cgttaacgagacgagggcggtttatattattataaagagtaattagtcgaaagttataatatattcgtataacgacgttagaatagacgattagaaacgtcgtaatattatatagataggaagtacgaatatacgatataataaattaacgcgtatcgcggtataacgtaattacgagaacgaacgtatacgacgacgataaagaaataagcgcgtataaataacgnagcgagaaatcgttaaaagaacgaagtatagcgcgncgttaaattagcgtaacggaatagagaagattacgacgacgatcgataatcgtacgacgtatagtattcgcggcggaaagatagtaagaaggaataagattaggcgaaacgacgaaaaggagacgcgtagcgattcggaagttatacgacgaagtattaagcgtcgcgtagaaattataaaagagagaggaaacgcgtatataagtaagacgaaagtatagagttttagcgcgatattatacgtaaatatatattacgaaagaagtagcggcgtattacgtatacggttagacgagcgcgtaggtacggagtaataatagatatatacgtaaaagagaagtagaatagaacgaaagagaaatacgaaaatatatagatagttaaa

SEQ ID NO: 27710 - DNA, 648 bp, Artificial Sequence
  chemically treated genomic DNA (Homo sapiens) CpG-island No: 27710
  unsure (386, 422)
tttaactatctatatattttcgtatttctctttcgttctattctacttctcttttacgtatatatctattattactccgtacctacgcgctcgtctaaccgtatacgtaatacgccgctacttctttcgtaatatatatttacgtataatatcgcgctaaaactctatactttcgtcttacttatatacgcgtttcctctctcttttataatttctacgcgacgcttaatacttcgtcgtataacttccgaatcgctacgcgtctccttttcgtcgtttcgcctaatcttattccttcttactatctttccgccgcgaatactatacgtcgtacgattatcgatcgtcgtcgtaatcttctctattccgttacgctaatttaacgncgcgctatacttcgttcttttaacgatttctcgctncgttatttatacgcgcttatttctttatcgtcgtcgtatacgttcgttctcgtaattacgttataccgcgatacgcgttaatttattatatcgtatattcgtacttcctatctatataatattacgacgtttctaatcgtctattctaacgtcgttatacgaatatattataactttcgactaattactctttataataatataaaccgccctcgtctcgttaacg

SEQ ID NO: 27711 - DNA, 648 bp, Artificial Sequence
  chemically treated genomic DNA (Homo sapiens) CpG-island No: 27711
  unsure (386, 422)
tttggttgtttgtgtgttttcgtgtttttttttcgttttgttttgttttttttttgcgtgtgtgtttgttgttgtttcgtgtttgcgcgttcgtttggtcgtgtgcgtggtgcgtcgttgtttttttcgtggtgtgtgtttgcgtgtggtgtcgcgttggggttttgtgttttcgttttgtttgtgtgcgcgtttttttttttttttgtggtttttgcgcggcgtttggtgtttcgtcgtgtggttttcgggtcgttgcgcgtttttttttcgtcgtttcgtttggttttgtttttttttgttgttttttcgtcgcgggtgttgtgcgtcgtgcggttgtcggtcgtcgtcgtggttttttttgtttcgttgcgttggtttggcgncgcgttgtgtttcgtttttttggcggtttttcgttncgttgtttgtgcgcgtttgtttttttgtcgtcgtcgtgtgcgttcgttttcgtggttgcgttgtgtcgcggtgcgcgttggtttgttgtgtcgtgtgttcgtgttttttgtttgtgtggtgttgcggcgtttttggtcgtttgttttggcgtcgttgtgcgggtgtgttgtggttttcggttggttgttttttgtggtggtgtgggtcgttttcgtttcgttggcg

SEQ ID NO: 27712 - DNA, 648 bp, Artificial Sequence
  chemically treated genomic DNA (Homo sapiens) CpG-island No: 27712
  unsure (227, 263)
cgccaacgaaacgaaaacgacccacaccaccacaaaaaacaaccaaccgaaaaccacaacacacccgcacaacgacgccaaaacaaacgaccaaaaacgccgcaacaccacacaaacaaaaaacacgaacacacgacacaacaaaccaacgcgcaccgcgacacaacgcaaccacgaaaacgaacgcacacgacgacgacaaaaaaacaaacgcgcacaaacaacgnaacgaaaaaccgccaaaaaaacgaaacacaacgcgncgccaaaccaacgcaacgaaacaaaaaaaaccacgacgacgaccgacaaccgcacgacgcacaacacccgcgacgaaaaaacaacaaaaaaaaacaaaaccaaacgaaacgacgaaaaaaaaacgcgcaacgacccgaaaaccacacgacgaaacaccaaacgccgcgcaaaaaccacaaaaaaaaaaaaaaacgcgcacacaaacaaaacgaaaacacaaaaccccaacgcgacaccacacgcaaacacacaccacgaaaaaaacaacgacgcaccacgcacacgaccaaacgaacgcgcaaacacgaaacaacaacaaacacacacgcaaaaaaaaaacaaaacaaaacgaaaaaaaaacacgaaaacacacaaacaaccaaa

SEQ ID NO: 27713 - DNA, 983 bp, Artificial Sequence
  chemically treated genomic DNA (Homo sapiens) CpG-island No: 27713
tcgtttttttatttttaataatattacgtatcgtttcgttattttttagtatttgcgtatcggtgtcgattagagcgggaaaattatcgttattttatatgaaagttggtttggaaatttgttcggcggtacgtcggaaacggcggtatagtaaagcgaattattttacgtcggggcgaatcgttatatcggtttgcggttcgttacgtttgatttgtcggaagggaacgttatgcgtgcgttcggcgaagttttcggtttgatggcgttcgaaatcgcgatcgacgaattggcggaaaaagcgggtatcgatttcgtcgagtttcgtattttgaatgatatttaggttgatttcgtcgattcgacgcgttgtttttttcgtcgttagtttatcgagtgtttgcgtatcggagcggataaatttggttggaagtagcgtaacgttattatcgggataggtgcgcgacggggagtggttagtcggttacggtgttgcggcgggttttcgtaataattttgttggaaaaatcgggtgttcgggtttatttcgaataaaacggtatcgttatcgtagaaacggatatgatcgatattggtatcggtagttatattattttggtttagacggtagcggaaatgtttggcgtatcgttggagtaggttgcggtttatttcggcgattttagtttttcggtttttgcgggttttggtggataatggggcgcgaatatttttattttcggcgtttacgtcgtttgtatgaagtttcgcgaaatgattgtttcggtagtcgggtttgattttgagtagtcgtagtttgtcgacggtaagattattaacggtattcgaagcgttacgttatatgaagttatcgtaggcggtagattgatagcggaagagagtattgaattcggaatattgagtaaagagtattagtagtcgatttttgtcgggtattttgtggaggtcggcgtgtatagcgt

SEQ ID NO: 27714 - DNA, 983 bp, Artificial Sequence
  chemically treated genomic DNA (Homo sapiens) CpG-island No: 27714
acgctatacacgccgacctccacaaaatacccgacaaaaatcgactactaatactctttactcaatattccgaattcaatactctcttccgctatcaatctaccgcctacgataacttcatataacgtaacgcttcgaataccgttaataatcttaccgtcgacaaactacgactactcaaaatcaaacccgactaccgaaacaatcatttcgcgaaacttcatacaaacgacgtaaacgccgaaaataaaaatattcgcgccccattatccaccaaaacccgcaaaaaccgaaaaactaaaatcgccgaaataaaccgcaacctactccaacgatacgccaaacatttccgctaccgtctaaaccaaaataatataactaccgataccaatatcgatcatatccgtttctacgataacgataccgttttattcgaaataaacccgaacacccgatttttccaacaaaattattacgaaaacccgccgcaacaccgtaaccgactaaccactccccgtcgcgcacctatcccgataataacgttacgctacttccaaccaaatttatccgctccgatacgcaaacactcgataaactaacgacgaaaaaaacaacgcgtcgaatcgacgaaatcaacctaaatatcattcaaaatacgaaactcgacgaaatcgatacccgctttttccgccaattcgtcgatcgcgatttcgaacgccatcaaaccgaaaacttcgccgaacgcacgcataacgttcccttccgacaaatcaaacgtaacgaaccgcaaaccgatataacgattcgccccgacgtaaaataattcgctttactataccgccgtttccgacgtaccgccgaacaaatttccaaaccaactttcatataaaataacgataattttcccgctctaatcgacaccgatacgcaaatactaaaaaataacgaaacgatacgtaatattattaaaaataaaaaaacga

SEQ ID NO: 27715 - DNA, 983 bp, Artificial Sequence
  chemically treated genomic DNA (Homo sapiens) CpG-island No: 27715
gcgttatgtacgtcgatttttataaaatgttcggtaaaggtcgattgttggtattttttgtttagtgtttcgaatttaatgttttttttcgttgttagtttgtcgtttgcggtggttttatgtagcgtggcgtttcgggtatcgttggtaattttgtcgtcggtaaattgcgattgtttaggattaaattcgattgtcgaggtaattatttcgcgaagttttatataggcggcgtaaacgtcggaggtggaggtattcgcgttttattgtttattagaattcgtagaaatcgggaaattggaatcgtcgaggtgaatcgtaatttgttttagcggtacgttaagtattttcgttgtcgtttgggttagaatggtgtagttgtcggtgttaatgtcggttatgttcgtttttacggtaacggtgtcgttttgttcgaggtgaattcgagtattcgatttttttagtaagattattgcgaaagttcgtcgtaatatcgtggtcgattagttatttttcgtcgcgtatttgtttcggtggtggcgttgcgttgtttttagttaaatttattcgtttcggtgcgtaagtattcgataagttgacggcgagagaagtagcgcgtcgggtcggcggggttaatttgagtgttatttaggatgcgaaattcgacgggatcgatgttcgtttttttcgttagttcgtcgatcgcgatttcgagcgttattagatcgggggtttcgtcgggcgtacgtatggcgttttttttcggtaaattaagcgtggcgagtcgtaggtcggtatgacgattcgtttcggcgtagagtaattcgttttgttgtatcgtcgttttcggcgtgtcgtcgggtaggtttttagattagtttttatgtgagatagcggtgattttttcgttttggtcggtatcgatacgtaagtgttgaagggtggcggggcggtgcgtggtgttattgggaatagaggggcgg

SEQ ID NO: 27716 - DNA, 983 bp, Artificial Sequence
  chemically treated genomic DNA (Homo sapiens) CpG-island No: 27716
ccgcccctctattcccaataacaccacgcaccgccccgccacccttcaacacttacgtatcgataccgaccaaaacgaaaaaatcaccgctatctcacataaaaactaatctaaaaacctacccgacgacacgccgaaaacgacgatacaacaaaacgaattactctacgccgaaacgaatcgtcataccgacctacgactcgccacgcttaatttaccgaaaaaaaacgccatacgtacgcccgacgaaacccccgatctaataacgctcgaaatcgcgatcgacgaactaacgaaaaaaacgaacatcgatcccgtcgaatttcgcatcctaaataacactcaaattaaccccgccgacccgacgcgctacttctctcgccgtcaacttatcgaatacttacgcaccgaaacgaataaatttaactaaaaacaacgcaacgccaccaccgaaacaaatacgcgacgaaaaataactaatcgaccacgatattacgacgaactttcgcaataatcttactaaaaaaatcgaatactcgaattcacctcgaacaaaacgacaccgttaccgtaaaaacgaacataaccgacattaacaccgacaactacaccattctaacccaaacgacaacgaaaatacttaacgtaccgctaaaacaaattacgattcacctcgacgattccaatttcccgatttctacgaattctaataaacaataaaacgcgaatacctccacctccgacgtttacgccgcctatataaaacttcgcgaaataattacctcgacaatcgaatttaatcctaaacaatcgcaatttaccgacgacaaaattaccaacgatacccgaaacgccacgctacataaaaccaccgcaaacgacaaactaacaacgaaaaaaaacattaaattcgaaacactaaacaaaaaataccaacaatcgacctttaccgaacattttataaaaatcgacgtacataacgc

SEQ ID NO: 27717 - DNA, 1151 bp, Artificial Sequence
  chemically treated genomic DNA (Homo sapiens) CpG-island No: 27717
tatgaatacggtcgagcgtagtttttttcgggtcgtttattttataggtcgggttcgcgacgtcgttatttttcgggatttttatatttggagagtttaatttcgttgggggcgttttcggcgacgtttcggttttatcgtttgttttaggagtaaacgtttcgtcgcggacgatcgagcggatttttcggggggcgtcgattttcgtcggttcgggcgagcgttcggggggttgggggcgttcgggaggtttttcgtcgcggttaatagtttcgtttagggttggtcgttgttcggcgttcgcgagggttcgtattgggcgtttttcgagtcggttcgcgatttttaaggtggtcgtcggggttcggtaggcgttttttttttcgtaaacgtttgttcgagcgcgcgtttcgtttcgagtgtttttagcgttcggttcgcggggcggcgcggcggcgggggttttacggggttttcggcggtcgaggcggcgtaggtcgtaggtttcgggtcggggggttttcgaaggtgtcgggtttcgggcggcgcgtttttttcgtcgcggtcgtcgcgcgtgtggaggaggcggagcggcgaggggggtttagtttatttaaggtcgcggtagtaagtgtcgttattcgcgtttttttcgtcgtttcgcgttttattcgcgggcgtttcgggtcgtttttttttttcgcgttcgatacgtcgtcgttattttgtttatttttttttttttttttgcgtcgtcgcggatatcgtacgttcggtcgtagggtacgttttttcgcgaggacgacgtgtttattcgttggttgaatttgttattttcggttttttgttcgtttcgtcgtcgttgacgattggagcgtttggattcggtcgggcgttcgagcggcgattggtcggcgtttggtttcgttcgaggggtggatatagcgcgtttattggttttcggagacgttcgttacgggtagggggcgggaagtaggtatggggagacgaggttacggttgtgatttcggtggggttcgggaagggggtcgtaggttacgggtgttaacggtttttttgaacggtcgtagggtgggttgagttcggtgggcgggaatttgggtttgcggatttggaaggagcggggttat

SEQ ID NO: 27718 - DNA, 1151 bp, Artificial Sequence
  chemically treated genomic DNA (Homo sapiens) CpG-island No: 27718
ataaccccgctccttccaaatccgcaaacccaaattcccgcccaccgaactcaacccaccctacgaccgttcaaaaaaaccgttaacacccgtaacctacgacccccttcccgaaccccaccgaaatcacaaccgtaacctcgtctccccatacctacttcccgccccctacccgtaacgaacgtctccgaaaaccaataaacgcgctatatccacccctcgaacgaaaccaaacgccgaccaatcgccgctcgaacgcccgaccgaatccaaacgctccaatcgtcaacgacgacgaaacgaacaaaaaaccgaaaataacaaattcaaccaacgaataaacacgtcgtcctcgcgaaaaaacgtaccctacgaccgaacgtacgatatccgcgacgacgcaaaaaaaaaaaaaaaaataaacaaaataacgacgacgtatcgaacgcgaaaaaaaaaaacgacccgaaacgcccgcgaataaaacgcgaaacgacgaaaaaaacgcgaataacgacacttactaccgcgaccttaaataaactaaacccccctcgccgctccgcctcctccacacgcgcgacgaccgcgacgaaaaaaacgcgccgcccgaaacccgacaccttcgaaaaccccccgacccgaaacctacgacctacgccgcctcgaccgccgaaaaccccgtaaaacccccgccgccgcgccgccccgcgaaccgaacgctaaaaacactcgaaacgaaacgcgcgctcgaacaaacgtttacgaaaaaaaaaacgcctaccgaaccccgacgaccaccttaaaaatcgcgaaccgactcgaaaaacgcccaatacgaaccctcgcgaacgccgaacaacgaccaaccctaaacgaaactattaaccgcgacgaaaaacctcccgaacgcccccaaccccccgaacgctcgcccgaaccgacgaaaatcgacgccccccgaaaaatccgctcgatcgtccgcgacgaaacgtttactcctaaaacaaacgataaaaccgaaacgtcgccgaaaacgcccccaacgaaattaaactctccaaatataaaaatcccgaaaaataacgacgtcgcgaacccgacctataaaataaacgacccgaaaaaaactacgctcgaccgtattcata

SEQ ID NO: 27719 - DNA, 1151 bp, Artificial Sequence
  chemically treated genomic DNA (Homo sapiens) CpG-island No: 27719
gtggtttcgttttttttaggttcgtaagtttaggttttcgtttatcgggtttagtttattttgcggtcgtttagggaggtcgttggtattcgtgatttacgatttttttttcgagttttatcgaggttatagtcgtggtttcgtttttttatgtttgtttttcgttttttgttcgtgacgggcgttttcgaggattaatgagcgcgttgtatttatttttcgggcggggttaagcgtcgattaatcgtcgttcgggcgttcggtcgggtttaaacgttttaatcgttagcggcggcggggcgggtagagggtcggggatggtaggtttaattaacgggtgggtacgtcgttttcgcgaggaggcgtgttttgcggtcgggcgtgcggtgttcgcggcggcgtagggagggggagggaggtaaataagatggcggcggcgtgtcgggcgcggaagggggaggcggttcggggcgttcgcgagtgaggcgcggggcggcgaagggagcgcgggtggcggtatttgttgtcgcggttttggatgggttgggtttttttcgtcgtttcgttttttttatacgcgcggcggtcgcggcgagggggacgcgtcgttcggggttcggtattttcgggaatttttcggttcggagtttgcggtttgcgtcgtttcggtcgtcgggagtttcgtggagttttcgtcgtcgcgtcgtttcgcggatcggacgttgagggtattcggggcggggcgcgcgttcgggtagacgtttgcggggaggggggcgtttgtcgggtttcggcgattattttgggggtcgcgggtcggttcggggggcgtttagtgcgggttttcgcgggcgtcgggtagcgattagttttgagcggagttgttggtcgcggcgggaggtttttcggacgtttttagtttttcgaacgttcgttcgggtcggcgggagtcggcgtttttcgggaggttcgttcggtcgttcgcggcggagcgtttgtttttgggataggcggtgggatcggggcgtcgtcggagacgtttttagcgaagttgggttttttaggtgtgggggtttcggggggtagcgacgtcgcggattcggtttgtgggatgggcggttcggagaagattgcgttcggtcgtgtttata

SEQ ID NO: 27720 - DNA, 1151 bp, Artificial Sequence
  chemically treated genomic DNA (Homo sapiens) CpG-island No: 27720
tataaacacgaccgaacgcaatcttctccgaaccgcccatcccacaaaccgaatccgcgacgtcgctaccccccgaaacccccacacctaaaaaacccaacttcgctaaaaacgtctccgacgacgccccgatcccaccgcctatcccaaaaacaaacgctccgccgcgaacgaccgaacgaacctcccgaaaaacgccgactcccgccgacccgaacgaacgttcgaaaaactaaaaacgtccgaaaaacctcccgccgcgaccaacaactccgctcaaaactaatcgctacccgacgcccgcgaaaacccgcactaaacgccccccgaaccgacccgcgacccccaaaataatcgccgaaacccgacaaacgcccccctccccgcaaacgtctacccgaacgcgcgccccgccccgaataccctcaacgtccgatccgcgaaacgacgcgacgacgaaaactccacgaaactcccgacgaccgaaacgacgcaaaccgcaaactccgaaccgaaaaattcccgaaaataccgaaccccgaacgacgcgtccccctcgccgcgaccgccgcgcgtataaaaaaaacgaaacgacgaaaaaaacccaacccatccaaaaccgcgacaacaaataccgccacccgcgctcccttcgccgccccgcgcctcactcgcgaacgccccgaaccgcctcccccttccgcgcccgacacgccgccgccatcttatttacctccctccccctccctacgccgccgcgaacaccgcacgcccgaccgcaaaacacgcctcctcgcgaaaacgacgtacccacccgttaattaaacctaccatccccgaccctctacccgccccgccgccgctaacgattaaaacgtttaaacccgaccgaacgcccgaacgacgattaatcgacgcttaaccccgcccgaaaaataaatacaacgcgctcattaatcctcgaaaacgcccgtcacgaacaaaaaacgaaaaacaaacataaaaaaacgaaaccacgactataacctcgataaaactcgaaaaaaaaatcgtaaatcacgaataccaacgacctccctaaacgaccgcaaaataaactaaacccgataaacgaaaacctaaacttacgaacctaaaaaaaacgaaaccac

SEQ ID NO: 27721 - DNA, 508 bp, Artificial Sequence
  chemically treated genomic DNA (Homo sapiens) CpG-island No: 27721
gcgtataacgttaggtttgcggcgattacgcgaagtggcgcgggggagtttggtagtttcgagtttaatttttaggaaagatgagttgtgaggcgtttttttttacgtcgttagttcgcggatcgttgttattcgtcgttatcgtcgcgtcgcgtcgcgcgttattattagcgtcgtcggaagtagaagcgcggagtaacggtcgcggaaggggcgtggtttcgggaggggtttcgaggggtgggcggggtcgggagtgcgagtcggacggggcgtagcgaggggatcggttggtgaggttttggaggtttttcgttatcgaggggcgttttgtattttttttttttttttatgtttttcgtcgcgtagacgttttggggtaggtttttacgtttttttggacggaggaggttagatgagatgtaggaacgtttgttgatggagagtagggtagtcggtttcgaaagtatcgggtttaattttttttatcgatttaaatttttaaaat

SEQ ID NO: 27722 - DNA, 508 bp, Artificial Sequence
  chemically treated genomic DNA (Homo sapiens) CpG-island No: 27722
attttaaaaatttaaatcgataaaaaaaattaaacccgatactttcgaaaccgactaccctactctccatcaacaaacgttcctacatctcatctaacctcctccgtccaaaaaaacgtaaaaacctaccccaaaacgtctacgcgacgaaaaacataaaaaaaaaaaaaaaatacaaaacgcccctcgataacgaaaaacctccaaaacctcaccaaccgatcccctcgctacgccccgtccgactcgcactcccgaccccgcccacccctcgaaacccctcccgaaaccacgccccttccgcgaccgttactccgcgcttctacttccgacgacgctaataataacgcgcgacgcgacgcgacgataacgacgaataacaacgatccgcgaactaacgacgtaaaaaaaaacgcctcacaactcatctttcctaaaaattaaactcgaaactaccaaactcccccgcgccacttcgcgtaatcgccgcaaacctaacgttatacgc

SEQ ID NO: 27723 - DNA, 508 bp, Artificial Sequence
  chemically treated genomic DNA (Homo sapiens) CpG-island No: 27723
attttagaagtttaagtcggtgaaggaaattggattcggtattttcggagtcggttgttttgttttttattagtaggcgtttttgtattttatttgatttttttcgtttagaaaggcgtagggatttgttttaggacgtttgcgcggcgaggagtatgggagaagagagggagtgtagggcgtttttcggtggcggggagtttttaggattttattaatcggttttttcgttgcgtttcgttcggttcgtattttcggtttcgtttatttttcggggtttttttcgagattacgtttttttcgcggtcgttgtttcgcgtttttgttttcggcggcgttggtggtggcgcgcggcgcggcgcggcgatggcggcgggtggtagcgattcgcgggttggcgacgtagaggaggacgttttatagtttattttttttaaaggttgggttcggggttgttagattttttcgcgttatttcgcgtggtcgtcgtaggtttggcgttatgcgt

SEQ ID NO: 27724 - DNA, 508 bp, Artificial Sequence
  chemically treated genomic DNA (Homo sapiens) CpG-island No: 27724
acgcataacgccaaacctacgacgaccacgcgaaataacgcgaaaaaatctaacaaccccgaacccaacctttaaaaaaaataaactataaaacgtcctcctctacgtcgccaacccgcgaatcgctaccacccgccgccatcgccgcgccgcgccgcgcgccaccaccaacgccgccgaaaacaaaaacgcgaaacaacgaccgcgaaaaaaacgtaatctcgaaaaaaaccccgaaaaataaacgaaaccgaaaatacgaaccgaacgaaacgcaacgaaaaaaccgattaataaaatcctaaaaactccccgccaccgaaaaacgccctacactccctctcttctcccatactcctcgccgcgcaaacgtcctaaaacaaatccctacgcctttctaaacgaaaaaaatcaaataaaatacaaaaacgcctactaataaaaaacaaaacaaccgactccgaaaataccgaatccaatttccttcaccgacttaaacttctaaaat

SEQ ID NO: 27725 - DNA, 954 bp, Artificial Sequence
  chemically treated genomic DNA (Homo sapiens) CpG-island No: 27725
aaaaagagaagaggaggaggagaaagtgcgcgtgtgaagagtgttaagaaaacgataggatagagcggggaggggaaaagcgggtcgagggatagggtgaaaggtgagaaacgagggtatgaggaaagagggttcggggcgttggggagttggggagacgatggagcgacgggtagagtagtttgggtcgagtcgcgggggtggaatttagacgtcgggcgggggagggggcggcggggcggcgggacggtgggtgggggttattaggcggcgtcggagattattaaattttatagcgagcgagtttgttttttggagggagtgtagataaggattaggagcgggagtcgagtttcgcggttcggggtacggcgtcgttcgttttttttcggtagtgtttttcgattttttgtttttcgttgggatatggtttgaggtttcgttcgtcgttcgggatttttttttttcgttgttttcggattttcgttttaggatcgcggggttttttttcggtttcgtcgttcgtttcggcgagaataggttcggcgggtaaggcggcggcggatcgagggaggtttggttcggtagcggggagaagggtgcggcgtagttcgagttttttatttttttttttggtttagacgcggttggggcggacgggatttttcgcgttttgttttttttttttgttttatggagttatgcgtttgggtgggggttttcgagagaagttggtttgcgggcgggtcggacgcgttgcgcggacggggcggggcgaaggaggtcggcgggcggaggaggaagcggcggggcggcggcggcggcggcggtcgggaagaattagaggtatttttcgggcggttggaggattgagtcgagtcgggattcgagtttttcggtattttagtagttatcggaggtagtgaggtaatggaggaagaatgtagggagttt

SEQ ID NO: 27726 - DNA, 954 bp, Artificial Sequence
  chemically treated genomic DNA (Homo sapiens) CpG-island No: 27726
aaactccctacattcttcctccattacctcactacctccgataactactaaaataccgaaaaactcgaatcccgactcgactcaatcctccaaccgcccgaaaaatacctctaattcttcccgaccgccgccgccgccgccgccccgccgcttcctcctccgcccgccgacctccttcgccccgccccgtccgcgcaacgcgtccgacccgcccgcaaaccaacttctctcgaaaacccccacccaaacgcataactccataaaacaaaaaaaaaaaacaaaacgcgaaaaatcccgtccgccccaaccgcgtctaaaccaaaaaaaaaaataaaaaactcgaactacgccgcacccttctccccgctaccgaaccaaacctccctcgatccgccgccgccttacccgccgaacctattctcgccgaaacgaacgacgaaaccgaaaaaaaaccccgcgatcctaaaacgaaaatccgaaaacaacgaaaaaaaaaaatcccgaacgacgaacgaaacctcaaaccatatcccaacgaaaaacaaaaaatcgaaaaacactaccgaaaaaaaacgaacgacgccgtaccccgaaccgcgaaactcgactcccgctcctaatccttatctacactccctccaaaaaacaaactcgctcgctataaaatttaataatctccgacgccgcctaataacccccacccaccgtcccgccgccccgccgccccctcccccgcccgacgtctaaattccacccccgcgactcgacccaaactactctacccgtcgctccatcgtctccccaactccccaacgccccgaaccctctttcctcataccctcgtttctcacctttcaccctatccctcgacccgcttttcccctccccgctctatcctatcgttttcttaacactcttcacacgcgcactttctcctcctcctcttctcttttt

SEQ ID NO: 27727 - DNA, 954 bp, Artificial Sequence
  chemically treated genomic DNA (Homo sapiens) CpG-island No: 27727
ggattttttatattttttttttattattttattgttttcggtggttgttgggatatcggaggattcgggtttcggttcgatttagttttttagtcgttcggggaatatttttagtttttttcggtcgtcgtcgtcgtcgtcgtttcgtcgttttttttttcgttcgtcggtttttttcgtttcgtttcgttcgcgtagcgcgttcggttcgttcgtaggttagtttttttcgggagtttttatttaggcgtatggttttatgaagtaagaggaggaggtagagcgcgagaggtttcgttcgttttagtcgcgtttgggttaggagaaaaggtgggaaattcgggttgcgtcgtattttttttttcgttgtcgggttaggtttttttcggttcgtcgtcgttttgttcgtcgggtttgttttcgtcggggcgggcggcggggtcgggaagagatttcgcggttttggggcgagggttcgggggtagcgggggggaggagtttcgggcggcgggcggggttttaggttatgttttagcggagggtagggggtcgggaggtattgtcggggaggggcgggcggcgtcgtgtttcgggtcgcgaggttcggttttcgtttttggtttttgtttgtattttttttaggaagtaggttcgttcgttgtaaagtttggtggttttcggcgtcgtttggtggtttttatttatcgtttcgtcgtttcgtcgttttttttttcgttcggcgtttggattttattttcgcggttcggtttaagttgttttattcgtcgttttatcgtttttttaattttttagcgtttcggattttttttttttatattttcgttttttattttttattttgtttttcggttcgtttttttttttttcgttttgttttgtcgtttttttaatattttttatacgcgtatttttttttttttttttttttttttt

SEQ ID NO: 27728 - DNA, 954 bp, Artificial Sequence
  chemically treated genomic DNA (Homo sapiens) CpG-island No: 27728
aaaaaaaaaaaaaaaaaaaaaaaaaatacgcgtataaaaaatattaaaaaaacgacaaaacaaaacgaaaaaaaaaaaaacgaaccgaaaaacaaaataaaaaataaaaaacgaaaatataaaaaaaaaaaatccgaaacgctaaaaaattaaaaaaacgataaaacgacgaataaaacaacttaaaccgaaccgcgaaaataaaatccaaacgccgaacgaaaaaaaaaacgacgaaacgacgaaacgataaataaaaaccaccaaacgacgccgaaaaccaccaaactttacaacgaacgaacctacttcctaaaaaaaatacaaacaaaaaccaaaaacgaaaaccgaacctcgcgacccgaaacacgacgccgcccgcccctccccgacaatacctcccgaccccctaccctccgctaaaacataacctaaaaccccgcccgccgcccgaaactcctcccccccgctacccccgaaccctcgccccaaaaccgcgaaatctcttcccgaccccgccgcccgccccgacgaaaacaaacccgacgaacaaaacgacgacgaaccgaaaaaaacctaacccgacaacgaaaaaaaaaatacgacgcaacccgaatttcccaccttttctcctaacccaaacgcgactaaaacgaacgaaacctctcgcgctctacctcctcctcttacttcataaaaccatacgcctaaataaaaactcccgaaaaaaactaacctacgaacgaaccgaacgcgctacgcgaacgaaacgaaacgaaaaaaaccgacgaacgaaaaaaaaaacgacgaaacgacgacgacgacgacgaccgaaaaaaactaaaaatattccccgaacgactaaaaaactaaatcgaaccgaaacccgaatcctccgatatcccaacaaccaccgaaaacaataaaataataaaaaaaaaatataaaaaatcc

SEQ ID NO: 27729 - DNA, 678 bp, Artificial Sequence
  chemically treated genomic DNA (Homo sapiens) CpG-island No: 27729
tttattcgtgcgttttattggttggtgttggttttacggggttgaattttggacgttgtttgttattcgtgggatcgagttttaggtagttggaataaagagagatatcgggggaaagtcgcgagaaggttagcgtttttggttgggagtagagttagtcgagtagggcgttcggttgttaaaattggtcggcgtagtgtacgttgggtcgtttcggagcggtcgtagagttcgtcgggagtcgtagttcgggacgggttcgtagtattgttcgcgacgtagttcgggattcgcgtcgggttgtcggtcgggttgttgttaggtatcgtcgagcgttagttatttagtattgagttgttagcggttgttttttttaagtattttcgtttacgtcgtttcgtttcgtttcgtttgatcggtcgtagttttggatattagttttaaatcgagtcgattacggtttagtttcgttcgcggcgaagtgcgcggggttcggtgttagtcgttcgtttttggtcgggttagttttttgatgtatcggggacggcgcgtttattcgatttttcgaggggcggtagggttttatttgtgtttttcgttttcgagtttttagttagagttggttttagcggaatatttattgtgtaggattatttaataagtcgattgattatattt

SEQ ID NO: 27730 - DNA, 678 bp, Artificial Sequence
  chemically treated genomic DNA (Homo sapiens) CpG-island No: 27730
aaatataatcaatcgacttattaaataatcctacacaataaatattccgctaaaaccaactctaactaaaaactcgaaaacgaaaaacacaaataaaaccctaccgcccctcgaaaaatcgaataaacgcgccgtccccgatacatcaaaaaactaacccgaccaaaaacgaacgactaacaccgaaccccgcgcacttcgccgcgaacgaaactaaaccgtaatcgactcgatttaaaactaatatccaaaactacgaccgatcaaacgaaacgaaacgaaacgacgtaaacgaaaatacttaaaaaaaacaaccgctaacaactcaatactaaataactaacgctcgacgatacctaacaacaacccgaccgacaacccgacgcgaatcccgaactacgtcgcgaacaatactacgaacccgtcccgaactacgactcccgacgaactctacgaccgctccgaaacgacccaacgtacactacgccgaccaattttaacaaccgaacgccctactcgactaactctactcccaaccaaaaacgctaaccttctcgcgactttcccccgatatctctctttattccaactacctaaaactcgatcccacgaataacaaacaacgtccaaaattcaaccccgtaaaaccaacaccaaccaataaaacgcacgaataaa

SEQ ID NO: 27731 - DNA, 678 bp, Artificial Sequence
  chemically treated genomic DNA (Homo sapiens) CpG-island No: 27731
gaatgtgattaatcggtttgttgaataattttgtatagtaggtatttcgttgaagttaattttagttgggggttcgagagcgaaagatatagatggggttttgtcgtttttcgaagagtcggatgggcgcgtcgttttcggtgtattaagaggttggttcggttaggggcgagcggttggtatcgaatttcgcgtatttcgtcgcgggcggggttgggtcgtagtcggttcgatttaaggttggtatttaaggttgcggtcggttaggcgaggcgaggcgaggcgacgtgagcgagggtgtttagggagaatagtcgttggtagtttaatgttgggtggttaacgttcgacggtgtttggtagtaattcggtcgataattcgacgcggatttcgagttgcgtcgcggataatgttgcgggttcgtttcggattacgattttcgacgggttttgcgatcgtttcggggcggtttagcgtgtattgcgtcggttagttttgatagtcgggcgttttattcggttagttttgtttttagttagggacgttggttttttcgcggttttttttcgatgtttttttttattttagttgtttgaaattcggttttacgaatggtaggtagcgtttaaaatttaatttcgtaaagttagtattagttaataaagcgtacggatgga

SEQ ID NO: 27732 - DNA, 678 bp, Artificial Sequence
  chemically treated genomic DNA (Homo sapiens) CpG-island No: 27732
tccatccgtacgctttattaactaatactaactttacgaaattaaattttaaacgctacctaccattcgtaaaaccgaatttcaaacaactaaaataaaaaaaaacatcgaaaaaaaaccgcgaaaaaaccaacgtccctaactaaaaacaaaactaaccgaataaaacgcccgactatcaaaactaaccgacgcaatacacgctaaaccgccccgaaacgatcgcaaaacccgtcgaaaatcgtaatccgaaacgaacccgcaacattatccgcgacgcaactcgaaatccgcgtcgaattatcgaccgaattactaccaaacaccgtcgaacgttaaccacccaacattaaactaccaacgactattctccctaaacaccctcgctcacgtcgcctcgcctcgcctcgcctaaccgaccgcaaccttaaataccaaccttaaatcgaaccgactacgacccaaccccgcccgcgacgaaatacgcgaaattcgataccaaccgctcgcccctaaccgaaccaacctcttaatacaccgaaaacgacgcgcccatccgactcttcgaaaaacgacaaaaccccatctatatctttcgctctcgaacccccaactaaaattaacttcaacgaaatacctactatacaaaattattcaacaaaccgattaatcacattc

SEQ ID NO: 27733 - DNA, 514 bp, Artificial Sequence
  chemically treated genomic DNA (Homo sapiens) CpG-island No: 27733
cggcgagttcgttgtttttttttgagtgtgtttgcgcgtaagtcggggagcgggtgagtgtatcggtcgttgtagttagttcggcgggttcggagtcgggagcgggggttttgggaatttcgatttgggggtgggcggtgggcgggcggcggcgttttggcgcggttgggatgtattttgagcggcgtttttcgttgtagcgcgcgggcggttcgagtttcggcggcggcggtagcggcggcggcgacgttgatattttttattatggatagtttcgatttagttttgttttaggaatgggatttcgagttattgtggtaagttttcgtgtcggtcgtttcgggcgggcgggagcgggcgaggggcggcgcgcggttcgcgcggtttttatttgggtcgggggttatcggcggtcggtcgtcgtgggggtggggtgggtcgggggcgtttgtttcgttagtttttttttgttttttcgggtgggatgcgtggtcgtttgttcgtttgttttttt

SEQ ID NO: 27734 - DNA, 514 bp, Artificial Sequence
  chemically treated genomic DNA (Homo sapiens) CpG-island No: 27734
aaaaaaacaaacgaacaaacgaccacgcatcccacccgaaaaaacaaaaaaaaactaacgaaacaaacgcccccgacccaccccacccccacgacgaccgaccgccgataacccccgacccaaataaaaaccgcgcgaaccgcgcgccgcccctcgcccgctcccgcccgcccgaaacgaccgacacgaaaacttaccacaataactcgaaatcccattcctaaaacaaaactaaatcgaaactatccataataaaaaatatcaacgtcgccgccgccgctaccgccgccgccgaaactcgaaccgcccgcgcgctacaacgaaaaacgccgctcaaaatacatcccaaccgcgccaaaacgccgccgcccgcccaccgcccacccccaaatcgaaattcccaaaacccccgctcccgactccgaacccgccgaactaactacaacgaccgatacactcacccgctccccgacttacgcgcaaacacactcaaaaaaaaacaacgaactcgccg

SEQ ID NO: 27735 - DNA, 514 bp, Artificial Sequence
  chemically treated genomic DNA (Homo sapiens) CpG-island No: 27735
ggggaaatagacgggtaggcggttacgtattttattcggggaggtagaaaagggttggcgaggtaggcgttttcgatttattttatttttacggcggtcggtcgtcggtagttttcggtttaggtgaggatcgcgcgggtcgcgcgtcgtttttcgttcgttttcgttcgttcgaagcggtcggtacggggatttattatagtgattcgaggttttatttttggagtagggttaagtcgaagttgtttatggtgggaggtgttagcgtcgtcgtcgtcgttatcgtcgtcgtcgaggttcgggtcgttcgcgcgttgtaacgaaaggcgtcgtttaaggtgtattttagtcgcgttagagcgtcgtcgttcgtttatcgtttatttttaggtcggggtttttaaggttttcgttttcgatttcgggttcgtcgggttggttgtagcggtcggtgtatttattcgtttttcggtttgcgcgtaggtatatttaagagagagtagcgagttcgtcg

SEQ ID NO: 27736 - DNA, 514 bp, Artificial Sequence
  chemically treated genomic DNA (Homo sapiens) CpG-island No: 27736
cgacgaactcgctactctctcttaaatatacctacgcgcaaaccgaaaaacgaataaatacaccgaccgctacaaccaacccgacgaacccgaaatcgaaaacgaaaaccttaaaaaccccgacctaaaaataaacgataaacgaacgacgacgctctaacgcgactaaaatacaccttaaacgacgcctttcgttacaacgcgcgaacgacccgaacctcgacgacgacgataacgacgacgacgacgctaacacctcccaccataaacaacttcgacttaaccctactccaaaaataaaacctcgaatcactataataaatccccgtaccgaccgcttcgaacgaacgaaaacgaacgaaaaacgacgcgcgacccgcgcgatcctcacctaaaccgaaaactaccgacgaccgaccgccgtaaaaataaaataaatcgaaaacgcctacctcgccaacccttttctacctccccgaataaaatacgtaaccgcctacccgtctatttcccc

SEQ ID NO: 27737 - DNA, 652 bp, Artificial Sequence
  chemically treated genomic DNA (Homo sapiens) CpG-island No: 27737
tcggttgcgggcgcgggggttcgggggtagatcgagagaattttttttgggcgagggtatttttcggatcgttagcgggagggtagggaagacgggagaggaaaggaaagggtttttggttcggtaagagggcggagggtcgttgttttgcggcgtggagaagcggggttcggcgtcgggtatatcgtttttttcgggggtggtagcggtcggtcgtacgttttttgtaagttagaggcggcgataagtcggttggggttcgggagtacgtttttttttcgagtttggttttgagggagggcgtaggttgtcgaggcggtaattttttttttcgtttaatttcggagagcgtgaggtcggtcggtttcgggttgtcgcgcggggatgttcgtcgttcgggtgggggaggcgcgaggtcggtttcggttcgttttttttttacgcggtcgcgttcggcggttcgttcgcgttttttttttcgttcgcgtcgtcgcggggtcgggtcgtcgatttcggtcggtcgggcgtggggttaggcggcgacggcggcgggcgtgtcggcggtttggggttttatttgaggttgtgtattagttttcggcgtgattggtttttcggtagattattcggttggatattttggtgtttgtgt

SEQ ID NO: 27738 - DNA, 652 bp, Artificial Sequence
  chemically treated genomic DNA (Homo sapiens) CpG-island No: 27738
acacaaacaccaaaatatccaaccgaataatctaccgaaaaaccaatcacgccgaaaactaatacacaacctcaaataaaaccccaaaccgccgacacgcccgccgccgtcgccgcctaaccccacgcccgaccgaccgaaatcgacgacccgaccccgcgacgacgcgaacgaaaaaaaaaacgcgaacgaaccgccgaacgcgaccgcgtaaaaaaaaaacgaaccgaaaccgacctcgcgcctcccccacccgaacgacgaacatccccgcgcgacaacccgaaaccgaccgacctcacgctctccgaaattaaacgaaaaaaaaaattaccgcctcgacaacctacgccctccctcaaaaccaaactcgaaaaaaaaacgtactcccgaaccccaaccgacttatcgccgcctctaacttacaaaaaacgtacgaccgaccgctaccacccccgaaaaaaacgatatacccgacgccgaaccccgcttctccacgccgcaaaacaacgaccctccgccctcttaccgaaccaaaaaccctttcctttcctctcccgtcttccctaccctcccgctaacgatccgaaaaataccctcgcccaaaaaaaattctctcgatctacccccgaacccccgcgcccgcaaccga

SEQ ID NO: 27739 - DNA, 652 bp, Artificial Sequence
  chemically treated genomic DNA (Homo sapiens) CpG-island No: 27739
gtataggtattaagatgtttaatcgagtggtttgtcgagaagttagttacgtcgggagttggtatatagttttaggtagggttttaggtcgtcggtacgttcgtcgtcgtcgtcgtttggttttacgttcggtcggtcgaggtcggcggttcggtttcgcggcggcgcgggcggggaagagggcgcggacgggtcgtcgggcgcgatcgcgtggggagggagcgagtcgaggtcggtttcgcgttttttttattcgggcggcgggtattttcgcgcggtagttcggggtcggtcggttttacgtttttcggagttgggcgagagggagagttgtcgtttcggtagtttgcgtttttttttaggattaggttcgaggaaggaacgtgttttcggattttagtcgatttgtcgtcgtttttggtttgtaggaagcgtgcggtcggtcgttgttattttcgggaaggacggtgtgttcggcgtcgagtttcgtttttttacgtcgtagggtagcgatttttcgtttttttgtcgagttagggattttttttttttttttttcgttttttttgttttttcgttggcggttcggggagtgttttcgtttagagggagttttttcggtttgttttcgagttttcgcgttcgtagtcgg

SEQ ID NO: 27740 - DNA, 652 bp, Artificial Sequence
  chemically treated genomic DNA (Homo sapiens) CpG-island No: 27740
ccgactacgaacgcgaaaactcgaaaacaaaccgaaaaaactccctctaaacgaaaacactccccgaaccgccaacgaaaaaacaaaaaaaacgaaaaaaaaaaaaaaaaaatccctaactcgacaaaaaaacgaaaaatcgctaccctacgacgtaaaaaaacgaaactcgacgccgaacacaccgtccttcccgaaaataacaacgaccgaccgcacgcttcctacaaaccaaaaacgacgacaaatcgactaaaatccgaaaacacgttccttcctcgaacctaatcctaaaaaaaaacgcaaactaccgaaacgacaactctccctctcgcccaactccgaaaaacgtaaaaccgaccgaccccgaactaccgcgcgaaaatacccgccgcccgaataaaaaaaacgcgaaaccgacctcgactcgctccctccccacgcgatcgcgcccgacgacccgtccgcgccctcttccccgcccgcgccgccgcgaaaccgaaccgccgacctcgaccgaccgaacgtaaaaccaaacgacgacgacgacgaacgtaccgacgacctaaaaccctacctaaaactatataccaactcccgacgtaactaacttctcgacaaaccactcgattaaacatcttaatacctatac

SEQ ID NO: 27741 - DNA, 587 bp, Artificial Sequence
  chemically treated genomic DNA (Homo sapiens) CpG-island No: 27741
gtttcggagcggattgtagggttcgcggggcggcgggagttataaagttattgtgtaaaaatttattagtttcgggaagtcggagtgggggtgttaggtttttcgttttagtcgtcgaggatttcgggggcgggggagttgtaagtttttcgagagggagcggagatcgtcgggaggttattcgtacgtttttggttttcggagttgttattagttcgtcgattttaggcgtgcgttcgttagttcgtagtagtttttgttttttttttattttaataagtagggaagtttcgcgttttaacgtcgaaaggttagcgagtcgttgtattttacgttaagtttatttaataagcgttttcgttcgtatttttagtttcgggttttacgttgtttttgaggggtattttcgttttatttcgcgattaaatttattcgtttgggttgtgttttttcggttatttttttgtttatttagacgtttgtttcgcggcgggtagttttgttttttttatttttttgttcgttcgttttttttttttatattttcggagatcgtttgatttggggagggggggcggttagagatg

SEQ ID NO: 27742 - DNA, 587 bp, Artificial Sequence
  chemically treated genomic DNA (Homo sapiens) CpG-island No: 27742
catctctaaccgccccccctccccaaatcaaacgatctccgaaaatataaaaaaaaaaaacgaacgaacaaaaaaataaaaaaaacaaaactacccgccgcgaaacaaacgtctaaataaacaaaaaaataaccgaaaaaacacaacccaaacgaataaatttaatcgcgaaataaaacgaaaatacccctcaaaaacaacgtaaaacccgaaactaaaaatacgaacgaaaacgcttattaaataaacttaacgtaaaatacaacgactcgctaacctttcgacgttaaaacgcgaaacttccctacttattaaaataaaaaaaaaacaaaaactactacgaactaacgaacgcacgcctaaaatcgacgaactaataacaactccgaaaaccaaaaacgtacgaataacctcccgacgatctccgctccctctcgaaaaacttacaactcccccgcccccgaaatcctcgacgactaaaacgaaaaacctaacacccccactccgacttcccgaaactaataaatttttacacaataactttataactcccgccgccccgcgaaccctacaatccgctccgaaac

SEQ ID NO: 27743 - DNA, 587 bp, Artificial Sequence
  chemically treated genomic DNA (Homo sapiens) CpG-island No: 27743
tatttttagtcgttttttttttttaaattaggcgattttcggagatgtgaagaaggggggcgagcggataggaagatgaagggagtaaagttgttcgtcgcgggataggcgtttaggtgaataagaaaatgatcgaagaaatatagtttagacgagtaagtttggtcgcggggtggaacgagggtgttttttaggagtagcgtggggttcggggttgaggatgcggacggagacgtttattgggtgaatttggcgtggggtgtagcgattcgttgatttttcggcgttgggacgcgaggtttttttgtttgttgaagtgaggagagggtaaaaattgttgcgggttggcgggcgtacgtttagggtcggcgggttggtggtagtttcgggggttaagggcgtgcgggtgatttttcggcggttttcgttttttttcggaggatttatagttttttcgttttcgaaattttcggcggttagagcggaagatttgatatttttatttcggtttttcggggttggtgggtttttgtatagtgattttgtgattttcgtcgtttcgcgagttttgtagttcgtttcggagt

SEQ ID NO: 27744 - DNA, 587 bp, Artificial Sequence
  chemically treated genomic DNA (Homo sapiens) CpG-island No: 27744
actccgaaacgaactacaaaactcgcgaaacgacgaaaatcacaaaatcactatacaaaaacccaccaaccccgaaaaaccgaaataaaaatatcaaatcttccgctctaaccgccgaaaatttcgaaaacgaaaaaactataaatcctccgaaaaaaaacgaaaaccgccgaaaaatcacccgcacgcccttaacccccgaaactaccaccaacccgccgaccctaaacgtacgcccgccaacccgcaacaatttttaccctctcctcacttcaacaaacaaaaaaacctcgcgtcccaacgccgaaaaatcaacgaatcgctacaccccacgccaaattcacccaataaacgtctccgtccgcatcctcaaccccgaaccccacgctactcctaaaaaacaccctcgttccaccccgcgaccaaacttactcgtctaaactatatttcttcgatcattttcttattcacctaaacgcctatcccgcgacgaacaactttactcccttcatcttcctatccgctcgccccccttcttcacatctccgaaaatcgcctaatttaaaaaaaaaaaacgactaaaaata

SEQ ID NO: 27745 - DNA, 527 bp, Artificial Sequence
  chemically treated genomic DNA (Homo sapiens) CpG-island No: 27745
gagggcgtcgtagtagaaggggaagtagggcgcgggatagggtttgggggaaggggtgtaaaggtaggttgcgcggggagtgaacgtcgtagcgtcgtgcgggagaggcgggcggaggtttcgggggttcgggagcgggtagagggggcgagatttgggaaggggacggcggtgggggagagtaggagaaaaataagcgcgtttcggagcggtagggattgttgcgaggaggaggagagcgtcggtcgcgggtgggggggtttagttcggggtcgttttcggggggtcgggttaattacggtttcggggagcggtcggcggtcgggggaggtgcgtttgggaggcggtgtagggcgtttcgttcgagttttatttttcgattttatcgatttattttatattggatttttatcgtcgttaataggaggaggaagtagggcggaagcgatgacgtttttttagcggttagaggtggtggagtgtaaaaagttttttatttgcgatcgaaaaaaagggagaagaaaaaa

SEQ ID NO: 27746 - DNA, 527 bp, Artificial Sequence
  chemically treated genomic DNA (Homo sapiens) CpG-island No: 27746
ttttttcttctccctttttttcgatcgcaaataaaaaactttttacactccaccacctctaaccgctaaaaaaacgtcatcgcttccgccctacttcctcctcctattaacgacgataaaaatccaatataaaataaatcgataaaatcgaaaaataaaactcgaacgaaacgccctacaccgcctcccaaacgcacctcccccgaccgccgaccgctccccgaaaccgtaattaacccgaccccccgaaaacgaccccgaactaaacccccccacccgcgaccgacgctctcctcctcctcgcaacaatccctaccgctccgaaacgcgcttatttttctcctactctcccccaccgccgtccccttcccaaatctcgccccctctacccgctcccgaacccccgaaacctccgcccgcctctcccgcacgacgctacgacgttcactccccgcgcaacctacctttacaccccttcccccaaaccctatcccgcgccctacttccccttctactacgacgccctc

SEQ ID NO: 27747 - DNA, 527 bp, Artificial Sequence
  chemically treated genomic DNA (Homo sapiens) CpG-island No: 27747
tttttttttttttttttttttcggtcgtaagtaggaagttttttgtattttattatttttggtcgttgggaagacgttatcgttttcgttttattttttttttttgttggcggcggtgagaatttaatatggagtaaatcggtggagtcgagagatggggttcggacggggcgttttgtatcgttttttaggcgtatttttttcggtcgtcgatcgtttttcggaatcgtgattggttcggtttttcgggggcgatttcggattgagtttttttattcgcggtcggcgtttttttttttttcgtagtagtttttgtcgtttcgaggcgcgtttgttttttttttgtttttttttatcgtcgttttttttttaaatttcgttttttttgttcgttttcgagttttcggagttttcgttcgtttttttcgtacggcgttgcggcgtttatttttcgcgtagtttgtttttgtatttttttttttaaattttatttcgcgttttgtttttttttttgttgcggcgttttt

SEQ ID NO: 27748 - DNA, 527 bp, Artificial Sequence
  chemically treated genomic DNA (Homo sapiens) CpG-island No: 27748
aaaaacgccgcaacaaaaaaaaaaacaaaacgcgaaataaaatttaaaaaaaaaaatacaaaaacaaactacgcgaaaaataaacgccgcaacgccgtacgaaaaaaacgaacgaaaactccgaaaactcgaaaacgaacaaaaaaaacgaaatttaaaaaaaaaacgacgataaaaaaaaacaaaaaaaaaacaaacgcgcctcgaaacgacaaaaactactacgaaaaaaaaaaaaacgccgaccgcgaataaaaaaactcaatccgaaatcgcccccgaaaaaccgaaccaatcacgattccgaaaaacgatcgacgaccgaaaaaaatacgcctaaaaaacgatacaaaacgccccgtccgaaccccatctctcgactccaccgatttactccatattaaattctcaccgccgccaacaaaaaaaaaaaataaaacgaaaacgataacgtcttcccaacgaccaaaaataataaaatacaaaaaacttcctacttacgaccgaaaaaaaaaaaaaaaaaaaaa

SEQ ID NO: 27749 - DNA, 808 bp, Artificial Sequence
  chemically treated genomic DNA (Homo sapiens) CpG-island No: 27749
tttttaaaggcgttcgcggttcgggcggttcgggttggggaggcggtggcggcgggagttgtttttttttcgggcggcggcgttgattgatttcgcgaattgggtttttgtgtaaattgaggttaaataaatatagatggagcgtagcgggcgttttttagaaatgttggtaaggaggtagcgattttagatgatattttgagcgtttcgggaacggatagttcggcgtttttcgaagtcggcggcgtagttgttcggggcgagggggagaaagggagagagggagggggagggcgggcgaagcgggagagttagagatttttcggcgttgaggcggcggcggttcgggtagttttacgtttttgtttcgcgcgtcgttcgcgttatgaagtatatttcggttttcgaggacgggtcgtggaagatcgtgtgcgtgaaggagttgaacggttttaagaagtttaagcggaaaggtaaggagtcgcggcgcgcgaacggttataaaatttttcgattggatttggaagcgttcgagtttcgcgtcgtagttattaacgggttgcgggataggatttatcggttgtagcggtttcggtatcggttcggtgttagttttagtggcgtcggtcgtttttttaagagggggtacggatatagtcggggagcgcgggggttttcgggcgtacgaggttttcgacgcgcggaaacgttcgttgttttaggcgtagtggggttaggattttttacgtcgtcgtcgtcgtcgttttttgcgttttagagttaggtatttgggggtttagaggtatag

SEQ ID NO: 27750 - DNA, 808 bp, Artificial Sequence
  chemically treated genomic DNA (Homo sapiens) CpG-island No: 27750
ctatacctctaaacccccaaatacctaactctaaaacgcaaaaaacgacgacgacgacgacgtaaaaaatcctaaccccactacgcctaaaacaacgaacgtttccgcgcgtcgaaaacctcgtacgcccgaaaacccccgcgctccccgactatatccgtaccccctcttaaaaaaacgaccgacgccactaaaactaacaccgaaccgataccgaaaccgctacaaccgataaatcctatcccgcaacccgttaataactacgacgcgaaactcgaacgcttccaaatccaatcgaaaaattttataaccgttcgcgcgccgcgactccttacctttccgcttaaacttcttaaaaccgttcaactccttcacgcacacgatcttccacgacccgtcctcgaaaaccgaaatatacttcataacgcgaacgacgcgcgaaacaaaaacgtaaaactacccgaaccgccgccgcctcaacgccgaaaaatctctaactctcccgcttcgcccgccctccccctccctctctccctttctccccctcgccccgaacaactacgccgccgacttcgaaaaacgccgaactatccgttcccgaaacgctcaaaatatcatctaaaatcgctacctccttaccaacatttctaaaaaacgcccgctacgctccatctatatttatttaacctcaatttacacaaaaacccaattcgcgaaatcaatcaacgccgccgcccgaaaaaaaaacaactcccgccgccaccgcctccccaacccgaaccgcccgaaccgcgaacgcctttaaaaa

SEQ ID NO: 27751 - DNA, 808 bp, Artificial Sequence
  chemically treated genomic DNA (Homo sapiens) CpG-island No: 27751
ttgtgtttttgggtttttaggtgtttggttttggggcgtaggaggcggcggcggcggcggcgtggggagttttggttttattgcgtttagggtaacgagcgttttcgcgcgtcggagatttcgtgcgttcgagagttttcgcgtttttcggttgtgttcgtgtttttttttgggggaacggtcggcgttattgggattggtatcggatcggtatcgggatcgttgtagtcgatgggttttgtttcgtagttcgttggtggttacggcgcggggttcgggcgtttttaagtttagtcggaaagttttatagtcgttcgcgcgtcgcggttttttgttttttcgtttgagttttttaaggtcgtttagtttttttacgtatacggttttttacggttcgttttcgaggatcgggatgtgttttatggcgcgggcggcgcgcgaggtaggggcgtggggttgttcgggtcgtcgtcgttttagcgtcgaggagtttttggttttttcgtttcgttcgttttttttttttttttttttttttttttttttcgtttcgggtagttgcgtcgtcggtttcgggaagcgtcgggttgttcgttttcggagcgtttagagtgttatttgaagtcgttgtttttttgttagtatttttggagaacgttcgttgcgttttatttgtgtttgtttagttttagtttatatagaagtttagttcgcgagattagttagcgtcgtcgttcggagaggaggtagttttcgtcgttatcgtttttttagttcgggtcgttcgagtcgcgagcgtttttaaaga

SEQ ID NO: 27752 - DNA, 808 bp, Artificial Sequence
  chemically treated genomic DNA (Homo sapiens) CpG-island No: 27752
tctttaaaaacgctcgcgactcgaacgacccgaactaaaaaaacgataacgacgaaaactacctcctctccgaacgacgacgctaactaatctcgcgaactaaacttctatataaactaaaactaaacaaacacaaataaaacgcaacgaacgttctccaaaaatactaacaaaaaaacaacgacttcaaataacactctaaacgctccgaaaacgaacaacccgacgcttcccgaaaccgacgacgcaactacccgaaacgaaaaaaaaaaaaaaaaaaaaaaaaaaaaaaaacgaacgaaacgaaaaaaccaaaaactcctcgacgctaaaacgacgacgacccgaacaaccccacgcccctacctcgcgcgccgcccgcgccataaaacacatcccgatcctcgaaaacgaaccgtaaaaaaccgtatacgtaaaaaaactaaacgaccttaaaaaactcaaacgaaaaaacaaaaaaccgcgacgcgcgaacgactataaaactttccgactaaacttaaaaacgcccgaaccccgcgccgtaaccaccaacgaactacgaaacaaaacccatcgactacaacgatcccgataccgatccgataccaatcccaataacgccgaccgttcccccaaaaaaaaacacgaacacaaccgaaaaacgcgaaaactctcgaacgcacgaaatctccgacgcgcgaaaacgctcgttaccctaaacgcaataaaaccaaaactccccacgccgccgccgccgccgcctcctacgccccaaaaccaaacacctaaaaacccaaaaacacaa

SEQ ID NO: 27753 - DNA, 639 bp, Artificial Sequence
  chemically treated genomic DNA (Homo sapiens) CpG-island No: 27753
gggtaattatttaagggtgtgcggattcgaggcggttagtagaggtttaacgttttcgttagtggtcgtgtatataaatgtgtaaacgtttgtgacgggttgcggggatttagggtgtttcgtcggattcgtggcggaatttttaggcgtagttagtcgtacgggttcggttttcgttcggttttggtaaaaatgttttttcgggtttcgaatttttcggcgttttttttcgagattagttttatttagggaagtcggaggtttcgcggtttttatcgtggtttaggtcggttttatcgtttagtagttcgtttttgttttcggggtatagtaaggagggcgttttttcggggttgcggttttttgaattcggggagttttcggtttcgttaggattcgcggagttcgttcggggttcggttgcggagtcgagtgtgggtggcgggtggggttgaaggcgagtgggggaggtaggaggggatggaggggcgggggcgggagtcgggcgttaagtttggaagtttggttgtttatttaaacgattttttttttagattcgagacgttaatgagataagattaaattttttttttcgtagtgcgtgtgtggggtgtgtgtgtgtgtgtgtgggtgggtggg

SEQ ID NO: 27754 - DNA, 639 bp, Artificial Sequence
  chemically treated genomic DNA (Homo sapiens) CpG-island No: 27754
cccacccacccacacacacacacacacaccccacacacgcactacgaaaaaaaaaatttaatcttatctcattaacgtctcgaatctaaaaaaaaaatcgtttaaataaacaaccaaacttccaaacttaacgcccgactcccgcccccgcccctccatcccctcctacctcccccactcgccttcaaccccacccgccacccacactcgactccgcaaccgaaccccgaacgaactccgcgaatcctaacgaaaccgaaaactccccgaattcaaaaaaccgcaaccccgaaaaaacgccctccttactataccccgaaaacaaaaacgaactactaaacgataaaaccgacctaaaccacgataaaaaccgcgaaacctccgacttccctaaataaaactaatctcgaaaaaaaacgccgaaaaattcgaaacccgaaaaaacatttttaccaaaaccgaacgaaaaccgaacccgtacgactaactacgcctaaaaattccgccacgaatccgacgaaacaccctaaatccccgcaacccgtcacaaacgtttacacatttatatacacgaccactaacgaaaacgttaaacctctactaaccgcctcgaatccgcacacccttaaataattaccc

SEQ ID NO: 27755 - DNA, 639 bp, Artificial Sequence
  chemically treated genomic DNA (Homo sapiens) CpG-island No: 27755
tttatttatttatatatatatatatatattttatatacgtattacgagaaggggagtttgattttgttttattggcgtttcgggtttgaaaggaaaatcgtttgggtaaatagttaagtttttaggtttaacgttcggttttcgttttcgtttttttatttttttttgttttttttattcgtttttaattttattcgttatttatattcggtttcgtagtcgggtttcgagcgagtttcgcgagttttggcgagatcgagggtttttcgggtttaaagggtcgtagtttcgagggaacgttttttttgttgtgtttcgggggtagaagcggattgttgggcggtgggatcggtttgggttacggtaggaatcgcgaaattttcggtttttttaaatagagttggtttcgggggagggcgtcggggagttcggagttcggagggatatttttgttaagatcgagcggaagtcgagttcgtgcggttggttgcgtttaggagtttcgttacgggttcgacggggtattttgggttttcgtagttcgttataggcgtttgtatatttgtgtgtacgattattggcgggggcgttgagtttttgttagtcgtttcgggttcgtatatttttgggtgattattt

SEQ ID NO: 27756 - DNA, 639 bp, Artificial Sequence
  chemically treated genomic DNA (Homo sapiens) CpG-island No: 27756
aaataatcacccaaaaatatacgaacccgaaacgactaacaaaaactcaacgcccccgccaataatcgtacacacaaatatacaaacgcctataacgaactacgaaaacccaaaataccccgtcgaacccgtaacgaaactcctaaacgcaaccaaccgcacgaactcgacttccgctcgatcttaacaaaaatatccctccgaactccgaactccccgacgccctcccccgaaaccaactctatttaaaaaaaccgaaaatttcgcgattcctaccgtaacccaaaccgatcccaccgcccaacaatccgcttctacccccgaaacacaacaaaaaaaacgttccctcgaaactacgaccctttaaacccgaaaaaccctcgatctcgccaaaactcgcgaaactcgctcgaaacccgactacgaaaccgaatataaataacgaataaaattaaaaacgaataaaaaaaacaaaaaaaaataaaaaaacgaaaacgaaaaccgaacgttaaacctaaaaacttaactatttacccaaacgattttcctttcaaacccgaaacgccaataaaacaaaatcaaactccccttctcgtaatacgtatataaaatatatatatatatatataaataaataaa

SEQ ID NO: 27757 - DNA, 582 bp, Artificial Sequence
  chemically treated genomic DNA (Homo sapiens) CpG-island No: 27757
cgagcggagtttgtagttgtttggagttcgagttttcggtggcggcggcggtagttttttagttagttttggcgtcgaaagagttttttttttcgggaagttggttttttttttttcgcgttagttagcgagttcgtttagtcgtcggttttttttatttcgatcgttaatttttagttttagtcgtcgtttttttttttttcgggattcgtttttttttagaggtcgttaagttagggggaatcgatgtttcgattggggttgaaattcggtttttgcgtttttattttttattcgtcgcgcgttttcggtttttttttgggcgttcgttttttttatattttcgttcggtgtttaggattcgggcgttttcgtattttagtttagggcgagcgcgtcggttcgtagtttcggcgtgtttcggtaggtgtagttcggcgttacgagcgtttttcgggttttaaagttgggagacgttagtaaaaagaaaggggtggtcggaggaggggggaagaaggagtggggaagagggacgggaagcggtaatgggtttttaaatagaacgaaaaaaattttaaatgt

SEQ ID NO: 27758 - DNA, 582 bp, Artificial Sequence
  chemically treated genomic DNA (Homo sapiens) CpG-island No: 27758
acatttaaaatttttttcgttctatttaaaaacccattaccgcttcccgtccctcttccccactccttcttcccccctcctccgaccacccctttctttttactaacgtctcccaactttaaaacccgaaaaacgctcgtaacgccgaactacacctaccgaaacacgccgaaactacgaaccgacgcgctcgccctaaactaaaatacgaaaacgcccgaatcctaaacaccgaacgaaaatataaaaaaaacgaacgcccaaaaaaaaaccgaaaacgcgcgacgaataaaaaataaaaacgcaaaaaccgaatttcaaccccaatcgaaacatcgattccccctaacttaacgacctctaaaaaaaaacgaatcccgaaaaaaaaaaaaacgacgactaaaactaaaaattaacgatcgaaataaaaaaaaccgacgactaaacgaactcgctaactaacgcgaaaaaaaaaaaaccaacttcccgaaaaaaaaaactctttcgacgccaaaactaactaaaaaactaccgccgccgccaccgaaaactcgaactccaaacaactacaaactccgctcg

SEQ ID NO: 27759 - DNA, 582 bp, Artificial Sequence
  chemically treated genomic DNA (Homo sapiens) CpG-island No: 27759
gtatttggagtttttttcgttttgtttgggaatttattgtcgtttttcgttttttttttttattttttttttttttttttttcggttatttttttttttttgttggcgttttttaattttagggttcggggggcgttcgtggcgtcgggttgtatttgtcggggtacgtcgggattgcgggtcggcgcgttcgttttgggttggggtgcggaagcgttcgagttttgggtatcgggcgagagtgtgagaggagcggacgtttaggagggagtcgaggacgcgcggcgggtagggggtaggggcgtaggaatcgggttttagttttagtcgggatatcggttttttttggtttggcggtttttggagggagacgagtttcggggagaaggagggcggcgattggggttagggattggcgatcggagtggggagggtcggcggttgagcgagttcgttggttgacgcgaggagggggaggttaatttttcgggagaaggggttttttcggcgttagggttggttagggagttgtcgtcgtcgttatcgagggttcggattttaggtagttgtaggtttcgttcg

SEQ ID NO: 27760 - DNA, 582 bp, Artificial Sequence
  chemically treated genomic DNA (Homo sapiens) CpG-island No: 27760
cgaacgaaacctacaactacctaaaatccgaaccctcgataacgacgacgacaactccctaaccaaccctaacgccgaaaaaaccccttctcccgaaaaattaacctccccctcctcgcgtcaaccaacgaactcgctcaaccgccgaccctccccactccgatcgccaatccctaaccccaatcgccgccctccttctccccgaaactcgtctccctccaaaaaccgccaaaccaaaaaaaaccgatatcccgactaaaactaaaacccgattcctacgcccctaccccctacccgccgcgcgtcctcgactccctcctaaacgtccgctcctctcacactctcgcccgatacccaaaactcgaacgcttccgcaccccaacccaaaacgaacgcgccgacccgcaatcccgacgtaccccgacaaatacaacccgacgccacgaacgccccccgaaccctaaaattaaaaaacgccaacaaaaaaaaaaaaataaccgaaaaaaaaaaaaaaaaaaaataaaaaaaaaaaacgaaaaacgacaataaattcccaaacaaaacgaaaaaaactccaaatac

SEQ ID NO: 27761 - DNA, 601 bp, Artificial Sequence
  chemically treated genomic DNA (Homo sapiens) CpG-island No: 27761
ggagagtacgcggaggtcgaggtattgtatttcgtttatattcgtcggtgcgtttgcgcggtttttagcgacgagagtttcgggaggtaattatcgcgagatttggggtcgcggcgatttcgggtggaggcgacgttggggttgtttgggtttttatttttgtttttggagtttacggtcggcgtttgttataatttagtattaggattgagcgggcggacgttcgtttttttagaaaggtttaggcgaggtttaggacgagggcggcggagaacgcggggagaagtttattcgtgaggagttagttgtcgcgacggtgcggagagattttcgggaattaagttttttgcgcgattttcgggcgcgggtcgtcgttttttatttcgtcgtttttttttttacgttttttattcgtatttagagatttaggatagataggaattttttattcgtgattttagttggcgggaaattcgcgatttgggaagggaaggggttacggttgcgtagggttatagtatcgcgatttttattttagtgttacggcgtaggtttttggtggtgttttttatttgtgaaaaacgtttaaatatgtggaaga

SEQ ID NO: 27762 - DNA, 601 bp, Artificial Sequence
  chemically treated genomic DNA (Homo sapiens) CpG-island No: 27762
tcttccacatatttaaacgtttttcacaaataaaaaacaccaccaaaaacctacgccgtaacactaaaataaaaatcgcgatactataaccctacgcaaccgtaaccccttcccttcccaaatcgcgaatttcccgccaactaaaatcacgaataaaaaattcctatctatcctaaatctctaaatacgaataaaaaacgtaaaaaaaaaaacgacgaaataaaaaacgacgacccgcgcccgaaaatcgcgcaaaaaacttaattcccgaaaatctctccgcaccgtcgcgacaactaactcctcacgaataaacttctccccgcgttctccgccgccctcgtcctaaacctcgcctaaacctttctaaaaaaacgaacgtccgcccgctcaatcctaatactaaattataacaaacgccgaccgtaaactccaaaaacaaaaataaaaacccaaacaaccccaacgtcgcctccacccgaaatcgccgcgaccccaaatctcgcgataattacctcccgaaactctcgtcgctaaaaaccgcgcaaacgcaccgacgaatataaacgaaatacaatacctcgacctccgcgtactctcc

SEQ ID NO: 27763 - DNA, 601 bp, Artificial Sequence
  chemically treated genomic DNA (Homo sapiens) CpG-island No: 27763
ttttttatatatttaaacgttttttataagtgaaaaatattattaagagtttgcgtcgtgatattgagatgggagtcgcggtattgtggttttacgtagtcgtgattttttttttttttaggtcgcggatttttcgttagttaaaattacgagtggaaaatttttatttgttttaagtttttgggtgcgaatgaggaacgtggaaggagagacggcggggtgagaggcggcggttcgcgttcgaggatcgcgtagagggtttggttttcggaaattttttcgtatcgtcgcggtagttggttttttacgggtgggttttttttcgcgtttttcgtcgttttcgttttaggtttcgtttaggtttttttagaaagacgaacgttcgttcgtttagttttagtgttgggttatgataagcgtcgatcgtgagttttagaggtaaagataggagtttaaataattttaacgtcgtttttattcggggtcgtcgcggttttaggtttcgcgatagttatttttcgggattttcgtcgttggaggtcgcgtaagcgtatcggcgaatgtaagcggagtatagtgtttcggttttcgcgtatttttt

SEQ ID NO: 27764 - DNA, 601 bp, Artificial Sequence
  chemically treated genomic DNA (Homo sapiens) CpG-island No: 27764
aaaaaatacgcgaaaaccgaaacactatactccgcttacattcgccgatacgcttacgcgacctccaacgacgaaaatcccgaaaaataactatcgcgaaacctaaaaccgcgacgaccccgaataaaaacgacgttaaaattatttaaactcctatctttacctctaaaactcacgatcgacgcttatcataacccaacactaaaactaaacgaacgaacgttcgtctttctaaaaaaacctaaacgaaacctaaaacgaaaacgacgaaaaacgcgaaaaaaaacccacccgtaaaaaaccaactaccgcgacgatacgaaaaaatttccgaaaaccaaaccctctacgcgatcctcgaacgcgaaccgccgcctctcaccccgccgtctctccttccacgttcctcattcgcacccaaaaacttaaaacaaataaaaattttccactcgtaattttaactaacgaaaaatccgcgacctaaaaaaaaaaaaaatcacgactacgtaaaaccacaataccgcgactcccatctcaatatcacgacgcaaactcttaataatatttttcacttataaaaaacgtttaaatatataaaaaa

SEQ ID NO: 27765 - DNA, 533 bp, Artificial Sequence
  chemically treated genomic DNA (Homo sapiens) CpG-island No: 27765
ttagtttcgtttgttttacgtttcgtttcgttttttttttttacgtttagggggcgtggtaattcggagttttttttttatttagggtacgtgatttgttagttcgcggagagggaagaatatggtcgtcgggtgtggtgagggcgacgcgtttgtagtcgtcgttttttgttttttcgttttttgatatcgtttgtagtcgagcgggttcgtttcgtcggagttgaggattaggttgggagatcgttagtgtggaggtcggttcgcgaagttttgtcgcgggattggggaggagtcgggggcgaggtcgggttcggggagtcgggcggggaggtgggatagtcgaggagtgcgcggaaggggcgagttcgaatcgggggtttcggggagggtatggcgcggtttcggacgttcgggtttcggttttcggggcgagttcgcgttttttggagcgtcgggaagttttcgattttggagtttttggtggtttgttttttgagggggttttcgggtgggttggggtgaagggtgtt

SEQ ID NO: 27766 - DNA, 533 bp, Artificial Sequence
  chemically treated genomic DNA (Homo sapiens) CpG-island No: 27766
aacacccttcaccccaacccacccgaaaaccccctcaaaaaacaaaccaccaaaaactccaaaatcgaaaacttcccgacgctccaaaaaacgcgaactcgccccgaaaaccgaaacccgaacgtccgaaaccgcgccataccctccccgaaacccccgattcgaactcgccccttccgcgcactcctcgactatcccacctccccgcccgactccccgaacccgacctcgcccccgactcctccccaatcccgcgacaaaacttcgcgaaccgacctccacactaacgatctcccaacctaatcctcaactccgacgaaacgaacccgctcgactacaaacgatatcaaaaaacgaaaaaacaaaaaacgacgactacaaacgcgtcgccctcaccacacccgacgaccatattcttccctctccgcgaactaacaaatcacgtaccctaaataaaaaaaaaactccgaattaccacgccccctaaacgtaaaaaaaaaaaacgaaacgaaacgtaaaacaaacgaaactaa

SEQ ID NO: 27767 - DNA, 533 bp, Artificial Sequence
  chemically treated genomic DNA (Homo sapiens) CpG-island No: 27767
aatattttttattttaatttattcgagggtttttttaggagatagattattagagattttaaggtcggagatttttcggcgttttaggaaacgcggattcgtttcgaaagtcggggttcgagcgttcggggtcgcgttatgtttttttcgggattttcggttcgagttcgtttttttcgcgtatttttcggttgttttattttttcgttcgatttttcgagttcggtttcgttttcgatttttttttaatttcgcggtaaagtttcgcggatcggtttttatattgacggttttttaatttggtttttagtttcggcggaacgggttcgttcggttgtaggcgatgttagaggacggggaagtaagagacggcgattgtaagcgcgtcgtttttattatattcggcggttatattttttttttttcgcgaattgatagattacgtgttttgggtaggggagggatttcgggttgttacgttttttgggcgtggaggggaggggcggggcggggcgtagagtaggcggggttgg

SEQ ID NO: 27768 - DNA, 533 bp, Artificial Sequence
  chemically treated genomic DNA (Homo sapiens) CpG-island No: 27768
ccaaccccgcctactctacgccccgccccgcccctcccctccacgcccaaaaaacgtaacaacccgaaatccctcccctacccaaaacacgtaatctatcaattcgcgaaaaaaaaaaaatataaccgccgaatataataaaaacgacgcgcttacaatcgccgtctcttacttccccgtcctctaacatcgcctacaaccgaacgaacccgttccgccgaaactaaaaaccaaattaaaaaaccgtcaatataaaaaccgatccgcgaaactttaccgcgaaattaaaaaaaaatcgaaaacgaaaccgaactcgaaaaatcgaacgaaaaaataaaacaaccgaaaaatacgcgaaaaaaacgaactcgaaccgaaaatcccgaaaaaaacataacgcgaccccgaacgctcgaaccccgactttcgaaacgaatccgcgtttcctaaaacgccgaaaaatctccgaccttaaaatctctaataatctatctcctaaaaaaaccctcgaataaattaaaataaaaaatatt

SEQ ID NO: 27769 - DNA, 1142 bp, Artificial Sequence
  chemically treated genomic DNA (Homo sapiens) CpG-island No: 27769
  unsure (196)
tgttacgcgtcgtgcgtttgtcgggcgcgtcgcggagttaggcgagtcgggggttatcgcggggggcgggggcgtgcggacggacggatcgacggatatattcgcgagtattttaatttcggattcggcgcgcggtatcggttattttttcgggtcggggaaattgcgtacggggttcggtttggcgaggtaggantgggtttcgtttttttttattcgttattttcgtttattcgggtttcgtgattggtttcgtcgtttttggttgcgcgtcgaagttcgtttttttcgtagttaaagtagacggtattcggagcggagcgagttagaagggagtatggttttcgcgtcggtacggttagttttcgcgtcgtcgtcgtcgttttcgttatcgcggatttcgtcgtagttttagtttcggtttcggtttcgtagcgttcgttcgtagtttcggcgatcgcgcgtttgagcgtagttttcgttcggagttcgagtcgcgagttcggagttagtttttagtttcgcggtcgtcgcggttgcggggagagggcgggggcgatgttgtcggagtcgtcgtcgtcgtcgtcgtttcgatgagagtcgcgtcgtatcgtttatagtcgtataggttgataggtaggaggatcgatttttttttttcgggtattttttttgggttgtcgggaggcggcggcggcggaggaggaggaggaacgaggggagaaggcggagagtaggaacgcgaggaggaggatttggattcgtttttttcggttaggattcgagcggttttagttatcgttattcgtcggcgttgttcgttttttattagtttttttgcgtttattcgcgatttcgggttttttgcgcgtcgggtcggggtcggagtcgcgcgtcggaggtaagagtcgggtcgggttggagcgtttcggatgcggcgtcggagggagatttaggttttggtcgtcgcgtggggtcgggtcgggtcgggcgtgggagcggggtcggaattcggaattttgggttcggtttcggcggcggcggcggcgataggagtttttcgcgtttggattcgtaggttgtaggagtttttgcgtttgcgttgttttagggggaaaaaaagggggggaaaaaattttttg

SEQ ID NO: 27770 - DNA, 1142 bp, Artificial Sequence
  chemically treated genomic DNA (Homo sapiens) CpG-island No: 27770
  unsure (947)
caaaaaattttttccccccctttttttccccctaaaacaacgcaaacgcaaaaactcctacaacctacgaatccaaacgcgaaaaactcctatcgccgccgccgccgccgaaaccgaacccaaaattccgaattccgaccccgctcccacgcccgacccgacccgaccccacgcgacgaccaaaacctaaatctccctccgacgccgcatccgaaacgctccaacccgacccgactcttacctccgacgcgcgactccgaccccgacccgacgcgcaaaaaacccgaaatcgcgaataaacgcaaaaaaactaataaaaaacgaacaacgccgacgaataacgataactaaaaccgctcgaatcctaaccgaaaaaaacgaatccaaatcctcctcctcgcgttcctactctccgccttctcccctcgttcctcctcctcctccgccgccgccgcctcccgacaacccaaaaaaaatacccgaaaaaaaaaaatcgatcctcctacctatcaacctatacgactataaacgatacgacgcgactctcatcgaaacgacgacgacgacgacgactccgacaacatcgcccccgccctctccccgcaaccgcgacgaccgcgaaactaaaaactaactccgaactcgcgactcgaactccgaacgaaaactacgctcaaacgcgcgatcgccgaaactacgaacgaacgctacgaaaccgaaaccgaaactaaaactacgacgaaatccgcgataacgaaaacgacgacgacgacgcgaaaactaaccgtaccgacgcgaaaaccatactcccttctaactcgctccgctccgaataccgtctactttaactacgaaaaaaacgaacttcgacgcgcaaccaaaaacgacgaaaccaatcacgaaacccgaataaacgaaaataacgaataaaaaaaaacgaaacccantcctacctcgccaaaccgaaccccgtacgcaatttccccgacccgaaaaaataaccgataccgcgcgccgaatccgaaattaaaatactcgcgaatatatccgtcgatccgtccgtccgcacgcccccgccccccgcgataacccccgactcgcctaactccgcgacgcgcccgacaaacgcacgacgcgtaaca

SEQ ID NO: 27771 - DNA, 1142 bp, Artificial Sequence
  chemically treated genomic DNA (Homo sapiens) CpG-island No: 27771
  unsure (947)
taggaagttttttttttttttttttttttttttggagtagcgtaggcgtaagggtttttgtagtttgcgagtttagacgcgggaggtttttgtcgtcgtcgtcgtcgtcgaagtcgagtttagggtttcgggtttcggtttcgtttttacgttcggttcggttcggttttacgcggcggttaggatttgggttttttttcggcgtcgtattcgaggcgttttagttcggttcggtttttattttcggcgcgcggtttcggtttcggttcgacgcgtagagagttcggggtcgcgggtgggcgtaggagggttgatggagagcggatagcgtcggcgggtagcggtggttggggtcgttcgggttttggtcggaggaaacggatttaggttttttttttcgcgtttttgtttttcgtttttttttttcgtttttttttttttttcgtcgtcgtcgtttttcggtagtttagggaggatgttcgggagagggaagtcggtttttttgtttgttagtttgtgcggttatgagcggtgcggcgcggtttttatcgaggcggcggcggcggcggcggtttcggtagtatcgttttcgtttttttttcgtagtcgcggcggtcgcggggttgagggttggtttcgggttcgcggttcgggtttcgggcgggggttgcgtttaagcgcgcgatcgtcggggttgcggacgggcgttgcggagtcggggtcggggttggagttgcggcgagattcgcggtggcggggacggcggcggcggcgcgggggttggtcgtgtcggcgcggggattatgtttttttttggttcgtttcgtttcgggtatcgtttgttttagttgcgagggaggcgggtttcggcgcgtagttaggggcggcggagttaattacggggttcgagtgggcgggggtggcgggtggggaagagcggagtttanttttgtttcgttaggtcgggtttcgtgcgtagttttttcggttcgagggaataatcggtgtcgcgcgtcgggttcgaggttggagtgttcgcgggtgtgttcgtcggttcgttcgttcgtacgttttcgtttttcgcggtggttttcggttcgtttggtttcgcggcgcgttcggtagacgtacggcgcgtggta

SEQ ID NO: 27772 - DNA, 1142 bp, Artificial Sequence
  chemically treated genomic DNA (Homo sapiens) CpG-island No: 27772
  unsure (196)
taccacgcgccgtacgtctaccgaacgcgccgcgaaaccaaacgaaccgaaaaccaccgcgaaaaacgaaaacgtacgaacgaacgaaccgacgaacacacccgcgaacactccaacctcgaacccgacgcgcgacaccgattattccctcgaaccgaaaaaactacgcacgaaacccgacctaacgaaacaaaantaaactccgctcttccccacccgccacccccgcccactcgaaccccgtaattaactccgccgcccctaactacgcgccgaaacccgcctccctcgcaactaaaacaaacgatacccgaaacgaaacgaaccaaaaaaaaacataatccccgcgccgacacgaccaacccccgcgccgccgccgccgtccccgccaccgcgaatctcgccgcaactccaaccccgaccccgactccgcaacgcccgtccgcaaccccgacgatcgcgcgcttaaacgcaacccccgcccgaaacccgaaccgcgaacccgaaaccaaccctcaaccccgcgaccgccgcgactacgaaaaaaaaacgaaaacgatactaccgaaaccgccgccgccgccgccgcctcgataaaaaccgcgccgcaccgctcataaccgcacaaactaacaaacaaaaaaaccgacttccctctcccgaacatcctccctaaactaccgaaaaacgacgacgacgaaaaaaaaaaaaaaacgaaaaaaaaaaacgaaaaacaaaaacgcgaaaaaaaaaacctaaatccgtttcctccgaccaaaacccgaacgaccccaaccaccgctacccgccgacgctatccgctctccatcaaccctcctacgcccacccgcgaccccgaactctctacgcgtcgaaccgaaaccgaaaccgcgcgccgaaaataaaaaccgaaccgaactaaaacgcctcgaatacgacgccgaaaaaaaacccaaatcctaaccgccgcgtaaaaccgaaccgaaccgaacgtaaaaacgaaaccgaaacccgaaaccctaaactcgacttcgacgacgacgacgacgacaaaaacctcccgcgtctaaactcgcaaactacaaaaacccttacgcctacgctactccaaaaaaaaaaaaaaaaaaaaaaaaaacttccta

SEQ ID NO: 27773 - DNA, 820 bp, Artificial Sequence
  chemically treated genomic DNA (Homo sapiens) CpG-island No: 27773
tacggggacggcgaagcggttaggaggtggtgtcgttggggaggggttgttgatgtgtgggatagggtggatttggagatgtgtagtgtgggagtgtgaacgcgcgtttcgatggtttcggggggtcgggggagtttagggttcgcgtttcggttttcgtggtttggagcgggttgagagcgttagggttatttgcggtcgtcgcgcgggtgttcgcgttgggtagcgtcggtttcgggttttaagggagggacgtgttcgtttggggtcggagcgcggggttgggagtcggggtaggtcggaggtggtttttagggtaggtcgtttttgcgttgtttggggaaggcggggacgcgttgtttgtttgcggttagtcgtttcggaggagggggtggcggttacgcgcgagtttcggatgtttgggtttattcgttgagaagttagttgtcgtttttgggttgtggaattaagcggtagacgcggttcgttggcgggttttcgcgcgggtttttagagatgttgatgggtaaggagttgtcgtcgtcgtcgttgttattttcgtcgttttgtaaacgtttttttttttttttttcgtgtttgcgtcgcggcgcgtttcgggcgaatcgtggacgtaggtatttatgtagtattaggcgagatttcggcgttggagggattagatcgtggaggacgtcgagttgttgttgtttgcgaaatttttatttcggtagtttagcggtatttcggttcgttgttgtaggttttagtttttttttagtttagtaacgttgggattcggattttttttgtaatgatagat

SEQ ID NO: 27774 - DNA, 820 bp, Artificial Sequence
  chemically treated genomic DNA (Homo sapiens) CpG-island No: 27774
atctatcattacaaaaaaaatccgaatcccaacgttactaaactaaaaaaaaactaaaacctacaacaacgaaccgaaataccgctaaactaccgaaataaaaatttcgcaaacaacaacaactcgacgtcctccacgatctaatccctccaacgccgaaatctcgcctaatactacataaatacctacgtccacgattcgcccgaaacgcgccgcgacgcaaacacgaaaaaaaaaaaaaaaaacgtttacaaaacgacgaaaataacaacgacgacgacgacaactccttacccatcaacatctctaaaaacccgcgcgaaaacccgccaacgaaccgcgtctaccgcttaattccacaacccaaaaacgacaactaacttctcaacgaataaacccaaacatccgaaactcgcgcgtaaccgccaccccctcctccgaaacgactaaccgcaaacaaacaacgcgtccccgccttccccaaacaacgcaaaaacgacctaccctaaaaaccacctccgacctaccccgactcccaaccccgcgctccgaccccaaacgaacacgtccctcccttaaaacccgaaaccgacgctacccaacgcgaacacccgcgcgacgaccgcaaataaccctaacgctctcaacccgctccaaaccacgaaaaccgaaacgcgaaccctaaactcccccgaccccccgaaaccatcgaaacgcgcgttcacactcccacactacacatctccaaatccaccctatcccacacatcaacaacccctccccaacgacaccacctcctaaccgcttcgccgtccccgta

SEQ ID NO: 27775 - DNA, 820 bp, Artificial Sequence
  chemically treated genomic DNA (Homo sapiens) CpG-island No: 27775
atttgttattgtaagaggagttcgaattttagcgttgttggattggagagaggttggaatttgtagtagcgggtcgggatgtcgttgagttgtcgaagtggaagtttcgtaggtagtagtagttcggcgttttttacggtttggtttttttagcgtcgaggtttcgtttaatgttatataaatatttgcgtttacgattcgttcggggcgcgtcgcggcgtaagtacgggagggagggaggagaacgtttgtagagcggcggggatggtagcggcggcggcggtagttttttatttattagtatttttgggggttcgcgcgagggttcgttaacggatcgcgtttgtcgtttggttttatagtttagggacgataattggttttttagcgggtggatttaggtattcgagattcgcgcgtggtcgttattttttttttcgagacggttggtcgtaggtaggtagcgcgttttcgttttttttaggtaacgtagaggcgatttgttttaagagttattttcgatttatttcggtttttagtttcgcgtttcggttttaggcgagtacgttttttttttggggttcggggtcgacgttgtttagcgcgggtattcgcgcggcgatcgtagataattttagcgtttttagttcgttttaggttacggagatcgggacgcgagttttgggttttttcggtttttcgaggttatcggggcgcgcgtttatatttttatattatatatttttaggtttattttgttttatatattaataatttttttttaacgatattattttttggtcgtttcgtcgttttcgtg

SEQ ID NO: 27776 - DNA, 820 bp, Artificial Sequence
  chemically treated genomic DNA (Homo sapiens) CpG-island No: 27776
cacgaaaacgacgaaacgaccaaaaaataatatcgttaaaaaaaaattattaatatataaaacaaaataaacctaaaaatatataatataaaaatataaacgcgcgccccgataacctcgaaaaaccgaaaaaacccaaaactcgcgtcccgatctccgtaacctaaaacgaactaaaaacgctaaaattatctacgatcgccgcgcgaatacccgcgctaaacaacgtcgaccccgaaccccaaaaaaaaaacgtactcgcctaaaaccgaaacgcgaaactaaaaaccgaaataaatcgaaaataactcttaaaacaaatcgcctctacgttacctaaaaaaaacgaaaacgcgctacctacctacgaccaaccgtctcgaaaaaaaaaataacgaccacgcgcgaatctcgaatacctaaatccacccgctaaaaaaccaattatcgtccctaaactataaaaccaaacgacaaacgcgatccgttaacgaaccctcgcgcgaacccccaaaaatactaataaataaaaaactaccgccgccgccgctaccatccccgccgctctacaaacgttctcctccctccctcccgtacttacgccgcgacgcgccccgaacgaatcgtaaacgcaaatatttatataacattaaacgaaacctcgacgctaaaaaaaccaaaccgtaaaaaacgccgaactactactacctacgaaacttccacttcgacaactcaacgacatcccgacccgctactacaaattccaacctctctccaatccaacaacgctaaaattcgaactcctcttacaataacaaat

SEQ ID NO: 27777 - DNA, 574 bp, Artificial Sequence
  chemically treated genomic DNA (Homo sapiens) CpG-island No: 27777
agtgtcgcggtaaggtaggtgtcgggcgggagttaattcgggagcggaggaaggggtcgttaggtcggtttgtatggttagggacggggattttgcggcgttcgttttttttttagtttcgggagttcgtaggtcgcgggcgtgaggggagggggagttatcgtcgtgacgcggtcgtttttgcgggaaaacgtcgtgtttcgggtattgtattagcggcggggagggggtttcggcggtgataggttcgcggcgtagtggcggtgttgtgtttcgtagggaagtcgcgggaattagagcgggggaagcggtgcgcgcgcgtttcggggagatcggttttttcgtttttttttgttcgcggggattcggttaattcggggcgttttcgcgttattttgaaatttttaagttgttcggcgtggggcgagataggggcggttttttttttcggcgttttttagaaagtttgtcgggcggggagggggtatttacgtttttcggcgtcgcgggtagtcgtttttcggtttcgggttttagtttttcgatgcgtttcgtttcggcgtaggcggttatt

SEQ ID NO: 27778 - DNA, 574 bp, Artificial Sequence
  chemically treated genomic DNA (Homo sapiens) CpG-island No: 27778
aataaccgcctacgccgaaacgaaacgcatcgaaaaactaaaacccgaaaccgaaaaacgactacccgcgacgccgaaaaacgtaaataccccctccccgcccgacaaactttctaaaaaacgccgaaaaaaaaaaccgcccctatctcgccccacgccgaacaacttaaaaatttcaaaataacgcgaaaacgccccgaattaaccgaatccccgcgaacaaaaaaaaacgaaaaaaccgatctccccgaaacgcgcgcgcaccgcttcccccgctctaattcccgcgacttccctacgaaacacaacaccgccactacgccgcgaacctatcaccgccgaaaccccctccccgccgctaatacaatacccgaaacacgacgttttcccgcaaaaacgaccgcgtcacgacgataactccccctcccctcacgcccgcgacctacgaactcccgaaactaaaaaaaaaacgaacgccgcaaaatccccgtccctaaccatacaaaccgacctaacgaccccttcctccgctcccgaattaactcccgcccgacacctaccttaccgcgacact

SEQ ID NO: 27779 - DNA, 574 bp, Artificial Sequence
  chemically treated genomic DNA (Homo sapiens) CpG-island No: 27779
ggtggtcgtttgcgtcgaggcggagcgtatcgaggagttggaattcgaggtcgaggagcggttgttcgcggcgtcggaggacgtgagtgtttttttttcgttcggtaaattttttagggggcgtcggggggaaaagtcgtttttgtttcgttttacgtcgggtaatttggaggttttagggtgacgcgggagcgtttcggattggtcgggttttcgcgggtaggagggggcggagggatcggttttttcgaaacgcgcgcgtatcgtttttttcgttttggttttcgcggtttttttgcgggatatagtatcgttattgcgtcgcggatttgttatcgtcggagtttttttttcgtcgttggtgtagtgttcgggatacggcgttttttcgtagaggcggtcgcgttacggcggtgattttttttttttttacgttcgcgatttgcgagttttcggagttggggaaggagcggacgtcgtagagttttcgtttttggttatgtaagtcggtttggcgattttttttttcgttttcggattagttttcgttcggtatttgttttgtcgcgatatt

SEQ ID NO: 27780 - DNA, 574 bp, Artificial Sequence
  chemically treated genomic DNA (Homo sapiens) CpG-island No: 27780
aatatcgcgacaaaacaaataccgaacgaaaactaatccgaaaacgaaaaaaaaaatcgccaaaccgacttacataaccaaaaacgaaaactctacgacgtccgctccttccccaactccgaaaactcgcaaatcgcgaacgtaaaaaaaaaaaaaatcaccgccgtaacgcgaccgcctctacgaaaaaacgccgtatcccgaacactacaccaacgacgaaaaaaaaactccgacgataacaaatccgcgacgcaataacgatactatatcccgcaaaaaaaccgcgaaaaccaaaacgaaaaaaacgatacgcgcgcgtttcgaaaaaaccgatccctccgccccctcctacccgcgaaaacccgaccaatccgaaacgctcccgcgtcaccctaaaacctccaaattacccgacgtaaaacgaaacaaaaacgacttttccccccgacgccccctaaaaaatttaccgaacgaaaaaaaaacactcacgtcctccgacgccgcgaacaaccgctcctcgacctcgaattccaactcctcgatacgctccgcctcgacgcaaacgaccacc

SEQ ID NO: 27781 - DNA, 1095 bp, Artificial Sequence
  chemically treated genomic DNA (Homo sapiens) CpG-island No: 27781
gcgttttagcgtagattattattcgtcgttttttcgatttttttttcggagtttttaacgttggtttgtttttcggggtttttttttcgtaattttacgcgatgtttttttcgttcgcggtttttttttttttttcgcgttttattatttttttttagtagcgttttcgcgagtaaggtcgcgttttttaggcgttcgttttcgggggtttttggcggaggggtttttaggtttattacgttttcgcggataaagggtgacgtagcggatttcgtttttgtttcgcgggttcggtcgtttcgtttatttatacgaagaggttgtttgagagtaggtattgggttatatcgcgggttcggggtttttcggcgttcggtcgggcgggcgtcggcggtttaggttgtagcgaggtcgttagttggttcggttcgtcggggtcggtttcgggttggttgagcgcgcggtaggcgttgatgatggtgtttagtagggttaggtcgttgaggttcgtgtaggtgcggaggttgggttaggggaagcgttcgaggaagagtagcggtatggcggtagcggcgatttttggtttttaggtttttttgcgttgcggtcgggtttttgcggcggtttcgcgaacggcgtttacgggttttggcgtcgttgtcgttgtcgttgtcgttgtcgttgtcgtcgtcgtcgtcgcgtcgggtcgggtcgggtcgtttttggttgttggcgtcgtttcgtttcgcgttgttttcgttgttgtttttgtcggcgcggaagagtttgggcgggttcgggataggtcgtcgtttttagcgggacgttggcgggacgggcgtaggggcgcggttttcgtttttcgtttttagcggtcgcgtcgtcgtttagcgggcgtagtttcgggttttaggtcggggggcgggtatttagtattattcgtcgttcgtattacggtttggttgggttcgtagatatagagggtatttgtttcggtcgcggcgtaggggttattcgggttcgtaggcgttggtaggcgggtagggttttagggcgcggggtattttggttattaggtcgtcggttatttgtttt

SEQ ID NO: 27782 - DNA, 1095 bp, Artificial Sequence
  chemically treated genomic DNA (Homo sapiens) CpG-island No: 27782
aaaacaaataaccgacgacctaataaccaaaataccccgcgccctaaaaccctacccgcctaccaacgcctacgaacccgaataacccctacgccgcgaccgaaacaaataccctctatatctacgaacccaaccaaaccgtaatacgaacgacgaataatactaaatacccgccccccgacctaaaacccgaaactacgcccgctaaacgacgacgcgaccgctaaaaacgaaaaacgaaaaccgcgcccctacgcccgtcccgccaacgtcccgctaaaaacgacgacctatcccgaacccgcccaaactcttccgcgccgacaaaaacaacaacgaaaacaacgcgaaacgaaacgacgccaacaaccaaaaacgacccgacccgacccgacgcgacgacgacgacgacaacgacaacgacaacgacaacgacaacgacgccaaaacccgtaaacgccgttcgcgaaaccgccgcaaaaacccgaccgcaacgcaaaaaaacctaaaaaccaaaaatcgccgctaccgccataccgctactcttcctcgaacgcttcccctaacccaacctccgcacctacacgaacctcaacgacctaaccctactaaacaccatcatcaacgcctaccgcgcgctcaaccaacccgaaaccgaccccgacgaaccgaaccaactaacgacctcgctacaacctaaaccgccgacgcccgcccgaccgaacgccgaaaaaccccgaacccgcgatataacccaatacctactctcaaacaacctcttcgtataaataaacgaaacgaccgaacccgcgaaacaaaaacgaaatccgctacgtcaccctttatccgcgaaaacgtaataaacctaaaaacccctccgccaaaaacccccgaaaacgaacgcctaaaaaacgcgaccttactcgcgaaaacgctactaaaaaaaaataataaaacgcgaaaaaaaaaaaaaaaccgcgaacgaaaaaaacatcgcgtaaaattacgaaaaaaaaaccccgaaaaacaaaccaacgttaaaaactccgaaaaaaaaatcgaaaaaacgacgaataataatctacgctaaaacgc

SEQ ID NO: 27783 - DNA, 1095 bp, Artificial Sequence
  chemically treated genomic DNA (Homo sapiens) CpG-island No: 27783
ggggtaagtggtcgacggtttggtggttagggtgtttcgcgttttgaggttttgttcgtttgttagcgtttgcgagttcgagtgatttttgcgtcgcggtcggagtaggtgttttttgtgtttgcgggtttagttaagtcgtggtgcggacggcggatgatgttgggtgttcgtttttcggtttgaggttcggggttacgttcgttaggcggcggcgcgatcgttgggggcgggggacgaaggtcgcgtttttgcgttcgtttcgttagcgtttcgttgggggcggcggtttgtttcgagttcgtttaggttttttcgcgtcggtaggggtagtagcgggagtagcgcggggcggagcggcgttagtagttaggagcggttcggttcggttcggcgcggcggcggcggcggtagcggtagcggtagcggtagcggtagcgacgttagagttcgtgggcgtcgttcgcgaggtcgtcgtagaggttcggtcgtagcgtagggaagtttgggggttagaggtcgtcgttgtcgttatgtcgttgttttttttcgagcgttttttttggtttagttttcgtatttatacgggttttagcggtttggttttgttgggtattattattagcgtttatcgcgcgtttagttagttcgaggtcggtttcggcgagtcggattagttaacggtttcgttgtagtttgagtcgtcggcgttcgttcggtcgagcgtcgggggatttcgggttcgcgatgtggtttagtatttgtttttagatagttttttcgtgtgggtgagcgaggcggtcgggttcgcggggtaggggcggggttcgttgcgttattttttattcgcgggggcgtggtgggtttaggggttttttcgttagggattttcgagggcgagcgtttggggggcgcggttttgttcgcgggagcgttgttgagggagagtggtgaggcgcggggagggggagggggtcgcgggcgggaggaatatcgcgtggggttgcgaggaggaggtttcgaggggtaggttagcgttgagggtttcgggaagggggtcggggaggcggcgggtgatggtttgcgttggggcgt

SEQ ID NO: 27784 - DNA, 1095 bp, Artificial Sequence
  chemically treated genomic DNA (Homo sapiens) CpG-island No: 27784
acgccccaacgcaaaccatcacccgccgcctccccgacccccttcccgaaaccctcaacgctaacctacccctcgaaacctcctcctcgcaaccccacgcgatattcctcccgcccgcgaccccctccccctccccgcgcctcaccactctccctcaacaacgctcccgcgaacaaaaccgcgccccccaaacgctcgccctcgaaaatccctaacgaaaaaacccctaaacccaccacgcccccgcgaataaaaaataacgcaacgaaccccgcccctaccccgcgaacccgaccgcctcgctcacccacacgaaaaaactatctaaaaacaaatactaaaccacatcgcgaacccgaaatcccccgacgctcgaccgaacgaacgccgacgactcaaactacaacgaaaccgttaactaatccgactcgccgaaaccgacctcgaactaactaaacgcgcgataaacgctaataataatacccaacaaaaccaaaccgctaaaacccgtataaatacgaaaactaaaccaaaaaaaacgctcgaaaaaaaacaacgacataacgacaacgacgacctctaacccccaaacttccctacgctacgaccgaacctctacgacgacctcgcgaacgacgcccacgaactctaacgtcgctaccgctaccgctaccgctaccgctaccgccgccgccgccgcgccgaaccgaaccgaaccgctcctaactactaacgccgctccgccccgcgctactcccgctactacccctaccgacgcgaaaaaacctaaacgaactcgaaacaaaccgccgcccccaacgaaacgctaacgaaacgaacgcaaaaacgcgaccttcgtcccccgcccccaacgatcgcgccgccgcctaacgaacgtaaccccgaacctcaaaccgaaaaacgaacacccaacatcatccgccgtccgcaccacgacttaactaaacccgcaaacacaaaaaacacctactccgaccgcgacgcaaaaatcactcgaactcgcaaacgctaacaaacgaacaaaacctcaaaacgcgaaacaccctaaccaccaaaccgtcgaccacttacccc

SEQ ID NO: 27785 - DNA, 640 bp, Artificial Sequence
  chemically treated genomic DNA (Homo sapiens) CpG-island No: 27785
ttttcgttcgcgggtttttgttttatttttattattttttcgttttttggcgtggttatttttgattttttcgttgtagtcgcgacggtgttcggtttcgtttttacgttacgggtttgggatttcgtttttcgagttttttgggttttttttatatatttcggtgttacgaatatcgttgtcgcggggtttcgaacggaaggaggtgattttttttgtttagttgcggttattcgaatttgggggataaggttttcgatatttcggggcgcggggttttttacgatttttgcgcggtttttatttgttatcgtttttttttcgtcgagtagcggtcgtcggtttggggttttcgagatagtgttagtatcgtagtggtcgcggttgtcggggataggggttttttcgtttcgtttcgggttgtttatgtcgggtttagtcgcgtagattttcgtttataaataataatttttacggtttttcgtaattttagtttcgtttttcgttttttttagcgtagtgacgttagagttatagttcgtaagtttcgcgagaatttgtagcgtatttgattggttttttagttcgtgattttcgtatttgtttggtttttgtaaatgtagcggatagcggttgttat

SEQ ID NO: 27786 - DNA, 640 bp, Artificial Sequence
  chemically treated genomic DNA (Homo sapiens) CpG-island No: 27786
ataacaaccgctatccgctacatttacaaaaaccaaacaaatacgaaaatcacgaactaaaaaaccaatcaaatacgctacaaattctcgcgaaacttacgaactataactctaacgtcactacgctaaaaaaaacgaaaaacgaaactaaaattacgaaaaaccgtaaaaattattatttataaacgaaaatctacgcgactaaacccgacataaacaacccgaaacgaaacgaaaaaacccctatccccgacaaccgcgaccactacgatactaacactatctcgaaaaccccaaaccgacgaccgctactcgacgaaaaaaaaacgataacaaataaaaaccgcgcaaaaatcgtaaaaaaccccgcgccccgaaatatcgaaaaccttatcccccaaattcgaataaccgcaactaaacaaaaaaaatcacctccttccgttcgaaaccccgcgacaacgatattcgtaacaccgaaatatataaaaaaaacccaaaaaactcgaaaaacgaaatcccaaacccgtaacgtaaaaacgaaaccgaacaccgtcgcgactacaacgaaaaaatcaaaaataaccacgccaaaaaacgaaaaaataataaaaataaaacaaaaacccgcgaacgaaaa

SEQ ID NO: 27787 - DNA, 640 bp, Artificial Sequence
  chemically treated genomic DNA (Homo sapiens) CpG-island No: 27787
gtgataatcgttattcgttatatttatagaagttaaataaatacggaagttacgagttgaagaattaattaggtgcgttgtaggttttcgcgagatttgcgggttgtggttttggcgttattgcgttggagagagcgaggggcggagttggggttgcgggggatcgtgagggttgttgtttgtaggcggaggtttgcgcgattagattcgatatgagtagttcggagcgggacgaggggatttttgttttcgatagtcgcggttattgcgatgttgatattgtttcggggattttagatcggcgatcgttgttcggcgaggagaaggcggtgataggtgagggtcgcgtagggatcgtggggagtttcgcgtttcgagatgtcgagggttttgttttttagattcgggtggtcgtagttaggtagggagagttattttttttcgttcggggtttcgcggtagcggtgttcgtgatatcgaaatatgtggagaaggtttaagaaattcggggagcggagttttaggttcgtgacgtgaagacggaatcgggtatcgtcgcggttgtagcggaaaagttagaagtggttacgttagggagcgaggaggtgatggaggtggagtagaagttcgcgggcgaaga

SEQ ID NO: 27788 - DNA, 640 bp, Artificial Sequence
  chemically treated genomic DNA (Homo sapiens) CpG-island No: 27788
tcttcgcccgcgaacttctactccacctccatcacctcctcgctccctaacgtaaccacttctaacttttccgctacaaccgcgacgatacccgattccgtcttcacgtcacgaacctaaaactccgctccccgaatttcttaaaccttctccacatatttcgatatcacgaacaccgctaccgcgaaaccccgaacgaaaaaaaataactctccctacctaactacgaccacccgaatctaaaaaacaaaaccctcgacatctcgaaacgcgaaactccccacgatccctacgcgaccctcacctatcaccgccttctcctcgccgaacaacgatcgccgatctaaaatccccgaaacaatatcaacatcgcaataaccgcgactatcgaaaacaaaaatcccctcgtcccgctccgaactactcatatcgaatctaatcgcgcaaacctccgcctacaaacaacaaccctcacgatcccccgcaaccccaactccgcccctcgctctctccaacgcaataacgccaaaaccacaacccgcaaatctcgcgaaaacctacaacgcacctaattaattcttcaactcgtaacttccgtatttatttaacttctataaatataacgaataacgattatcac

SEQ ID NO: 27789 - DNA, 896 bp, Artificial Sequence
  chemically treated genomic DNA (Homo sapiens) CpG-island No: 27789
cggcggaagagatgcgggaattacggggttttgattttgaggttttggatttggaaggcgtttgtatataaagaaataataaagttaagttttcgcggttcgattagtagagtacgaaacggggtttttttttttagttcgggtggaaacgtttttattttgttatttcgtttatagtaggttttttattcgttggagtcgtttggatagttttcgcggggtacgttcgaggtttttcggaggaattataagttttatgaagtttcggggcgcgggcggtgatgacgaagttttcgtcgattggtcgtacggggcggggcgcgtaggtttttttcgagaggaggggcggggcgtggggcggggcgagtagcggcggattggcgggtacgttttttcgttcgcggtttttttttcgtttttttttatcgttttttttggtttttcggttagagggtcggagcgagaagatggcgaagacgtacgattatttttttaagtttttgttgatcggcgattcgggggtaggtaagatttgttttttgtttcgttttttagaggacgtttttaatattatttttatttttattatcggtgagggaggggtcgcggttcgggatcgggtagagaattggggggcgggtattaggggacggggaaagggcggggggcgtttgggagttcgggagaggagatttcggggattgtaaggtggcgggggtattgagaggggcgagggcgtgagggagaggggcgagggcgtgagggagagaggcgagcgggaacgtgaggttaagggcgaagggggaatttgggggtaaaggaacgggaaggggaatagaggaataaggattaggggtattgggggaacgagagggttcggagattgatagggaggg

SEQ ID NO: 27790 - DNA, 896 bp, Artificial Sequence
  chemically treated genomic DNA (Homo sapiens) CpG-island No: 27790
ccctccctatcaatctccgaaccctctcgttcccccaatacccctaatccttattcctctattccccttcccgttcctttacccccaaattcccccttcgcccttaacctcacgttcccgctcgcctctctccctcacgccctcgcccctctccctcacgccctcgcccctctcaatacccccgccaccttacaatccccgaaatctcctctcccgaactcccaaacgccccccgccctttccccgtcccctaatacccgccccccaattctctacccgatcccgaaccgcgacccctccctcaccgataataaaaataaaaataatattaaaaacgtcctctaaaaaacgaaacaaaaaacaaatcttacctacccccgaatcgccgatcaacaaaaacttaaaaaaataatcgtacgtcttcgccatcttctcgctccgaccctctaaccgaaaaaccaaaaaaaacgataaaaaaaaacgaaaaaaaaaccgcgaacgaaaaaacgtacccgccaatccgccgctactcgccccgccccacgccccgcccctcctctcgaaaaaaacctacgcgccccgccccgtacgaccaatcgacgaaaacttcgtcatcaccgcccgcgccccgaaacttcataaaacttataattcctccgaaaaacctcgaacgtaccccgcgaaaactatccaaacgactccaacgaataaaaaacctactataaacgaaataacaaaataaaaacgtttccacccgaactaaaaaaaaaaaccccgtttcgtactctactaatcgaaccgcgaaaacttaactttattatttctttatatacaaacgccttccaaatccaaaacctcaaaatcaaaaccccgtaattcccgcatctcttccgccg

SEQ ID NO: 27791 - DNA, 896 bp, Artificial Sequence
  chemically treated genomic DNA (Homo sapiens) CpG-island No: 27791
ttttttttgttagttttcgaattttttcgtttttttaatatttttagtttttgtttttttgttttttttttcgtttttttgtttttaagtttttttttcgtttttagttttacgttttcgttcgttttttttttttacgttttcgttttttttttttacgttttcgttttttttagtgttttcgttattttgtagttttcggggttttttttttcgggtttttaagcgtttttcgtttttttttcgttttttagtattcgttttttaattttttattcggtttcgggtcgcggttttttttttatcgatggtggagatgaaggtggtgttgaaggcgttttttgagaagcggaataggaggtaggttttgtttattttcgagtcgtcgattagtaggagtttgaagagataatcgtacgttttcgttattttttcgtttcggttttttgatcggggagttagaggaggcggtggagagaggcggggagggggtcgcgggcgagggggcgtgttcgttaattcgtcgttgttcgtttcgttttacgtttcgttttttttttcggagaaggtttgcgcgtttcgtttcgtgcggttaatcggcgagggtttcgttattatcgttcgcgtttcgggattttatgggatttgtagttttttcggggagtttcgggcgtgtttcgcgaggattgtttaggcggttttagcggataaaagatttgttatgggcggggtgatagggtggaggcgtttttattcgagttgggaagggaggtttcgtttcgtattttgttggtcgagtcgcgggaatttaattttgttatttttttgtgtgtagacgttttttaaatttaggattttagaattagagtttcgtagttttcgtatttttttcgtcg

SEQ ID NO: 27792 - DNA, 896 bp, Artificial Sequence
  chemically treated genomic DNA (Homo sapiens) CpG-island No: 27792
cgacgaaaaaaatacgaaaactacgaaactctaattctaaaatcctaaatttaaaaaacgtctacacacaaaaaaataacaaaattaaattcccgcgactcgaccaacaaaatacgaaacgaaacctcccttcccaactcgaataaaaacgcctccaccctatcaccccgcccataacaaatcttttatccgctaaaaccgcctaaacaatcctcgcgaaacacgcccgaaactccccgaaaaaactacaaatcccataaaatcccgaaacgcgaacgataataacgaaaccctcgccgattaaccgcacgaaacgaaacgcgcaaaccttctccgaaaaaaaaaacgaaacgtaaaacgaaacgaacaacgacgaattaacgaacacgccccctcgcccgcgaccccctccccgcctctctccaccgcctcctctaactccccgatcaaaaaaccgaaacgaaaaaataacgaaaacgtacgattatctcttcaaactcctactaatcgacgactcgaaaataaacaaaacctacctcctattccgcttctcaaaaaacgccttcaacaccaccttcatctccaccatcgataaaaaaaaaaccgcgacccgaaaccgaataaaaaattaaaaaacgaatactaaaaaacgaaaaaaaaacgaaaaacgcttaaaaacccgaaaaaaaaaaccccgaaaactacaaaataacgaaaacactaaaaaaaacgaaaacgtaaaaaaaaaaaacgaaaacgtaaaaaaaaaaaacgaacgaaaacgtaaaactaaaaacgaaaaaaaaacttaaaaacaaaaaaacgaaaaaaaaaacaaaaaaacaaaaactaaaaatattaaaaaaacgaaaaaattcgaaaactaacaaaaaaaa

SEQ ID NO: 27793 - DNA, 791 bp, Artificial Sequence
  chemically treated genomic DNA (Homo sapiens) CpG-island No: 27793
tttcgcggtcggtattggaattcgatcggagtgtatttgtggggttgcggcgatggttggggttttaacgtcgtcgaggacgttcgtttcgggagtaggagttgcggcgtggttttggcgttttcggatattcggtagggcggagggtttaacggtggggttcgcgtttatcgttttgagttcgtttttgcgttcggcgtttttagtttacgtttcgtttagttttttaggttttagcgtttatttttacgtttcgtttcgtttcgcgatttacggatttcgttttcgagtttcgttttcgtttttacgtgtttcgttttcgagtttcgttttcgttttcgtgtttgtttatgagtcgcgtttcgtttttcgcgtttcgtttagttttttatttcgagttttatttatcgaatttcgttcgcgtcgggagtatttcgcgtttttaacgggttttcgggtcggttttcgcggtggttatgattgcggtcgtgtttttcggttgcgtttttattgttttcgggtttgcgttcgttttttatgtttttattatcgttatcgagtcgttgcgtattattttttttatcgtcgggtgaggcggtcgcgtcgggaaattcggacgtcggggtttttttttttcgttggggttattcgcgattttcggcgtttttatcgcgcggttcgattttgttgcgttttagacgggaggagggttgagagggggagagcggagattcggttttttaaaggcgtttcgtttttttaggaagaagcgtatattgggggttagggtt

SEQ ID NO: 27794 - DNA, 791 bp, Artificial Sequence
  chemically treated genomic DNA (Homo sapiens) CpG-island No: 27794
aaccctaacccccaatatacgcttcttcctaaaaaaacgaaacgcctttaaaaaaccgaatctccgctctccccctctcaaccctcctcccgtctaaaacgcaacaaaatcgaaccgcgcgataaaaacgccgaaaatcgcgaataaccccaacgaaaaaaaaaaaccccgacgtccgaatttcccgacgcgaccgcctcacccgacgataaaaaaaataatacgcaacgactcgataacgataataaaaacataaaaaacgaacgcaaacccgaaaacaataaaaacgcaaccgaaaaacacgaccgcaatcataaccaccgcgaaaaccgacccgaaaacccgttaaaaacgcgaaatactcccgacgcgaacgaaattcgataaataaaactcgaaataaaaaactaaacgaaacgcgaaaaacgaaacgcgactcataaacaaacacgaaaacgaaaacgaaactcgaaaacgaaacacgtaaaaacgaaaacgaaactcgaaaacgaaatccgtaaatcgcgaaacgaaacgaaacgtaaaaataaacgctaaaacctaaaaaactaaacgaaacgtaaactaaaaacgccgaacgcaaaaacgaactcaaaacgataaacgcgaaccccaccgttaaaccctccgccctaccgaatatccgaaaacgccaaaaccacgccgcaactcctactcccgaaacgaacgtcctcgacgacgttaaaaccccaaccatcgccgcaaccccacaaatacactccgatcgaattccaataccgaccgcgaaa

SEQ ID NO: 27795 - DNA, 791 bp, Artificial Sequence
  chemically treated genomic DNA (Homo sapiens) CpG-island No: 27795
ggttttgatttttagtgtgcgtttttttttaagagggcgaggcgtttttggggagtcggattttcgtttttttttttttaatttttttttcgtttgaaacgtaataaggtcgagtcgcgcggtgggggcgtcgagggtcgcgggtaattttagcgggggaggggagtttcggcgttcgggtttttcgacgcgatcgttttattcggcgatgaggaagatgatacgtaacggttcggtggcgatggtgaagatataaagggcgagcgtaggttcgaaggtaatgaaggcgtagtcgaagaatacggtcgtagttatggttatcgcggaaatcgattcgggggttcgttggggacgcgagatgttttcggcgcgggcggggttcggtgggtggggttcggggtggggggttaagcgggacgcggggggcggggcgcggtttatgggtaggtacggggacgggggcggggttcgggggcggggtacgtgggggcgggggcggggttcggaggcggggttcgtgggtcgcggggcgaggcggggcgtgggggtaaacgttagggtttgggggattgggcggggcgtgggttgagggcgtcgggcgtaggggcgggtttaaggcggtgagcgcggattttatcgttgggtttttcgttttatcgggtgttcggaagcgttagggttacgtcgtagtttttgttttcgaggcgggcgttttcggcgacgttagggttttagttatcgtcgtagttttatagatatatttcgatcgggttttagtgtcggtcgcgagg

SEQ ID NO: 27796 - DNA, 791 bp, Artificial Sequence
  chemically treated genomic DNA (Homo sapiens) CpG-island No: 27796
cctcgcgaccgacactaaaacccgatcgaaatatatctataaaactacgacgataactaaaaccctaacgtcgccgaaaacgcccgcctcgaaaacaaaaactacgacgtaaccctaacgcttccgaacacccgataaaacgaaaaacccaacgataaaatccgcgctcaccgccttaaacccgcccctacgcccgacgccctcaacccacgccccgcccaatcccccaaaccctaacgtttacccccacgccccgcctcgccccgcgacccacgaaccccgcctccgaaccccgcccccgcccccacgtaccccgcccccgaaccccgcccccgtccccgtacctacccataaaccgcgccccgccccccgcgtcccgcttaaccccccaccccgaaccccacccaccgaaccccgcccgcgccgaaaacatctcgcgtccccaacgaacccccgaatcgatttccgcgataaccataactacgaccgtattcttcgactacgccttcattaccttcgaacctacgctcgccctttatatcttcaccatcgccaccgaaccgttacgtatcatcttcctcatcgccgaataaaacgatcgcgtcgaaaaacccgaacgccgaaactcccctcccccgctaaaattacccgcgaccctcgacgcccccaccgcgcgactcgaccttattacgtttcaaacgaaaaaaaaattaaaaaaaaaaaaacgaaaatccgactccccaaaaacgcctcgccctcttaaaaaaaaacgcacactaaaaatcaaaacc

SEQ ID NO: 27797 - DNA, 501 bp, Artificial Sequence
  chemically treated genomic DNA (Homo sapiens) CpG-island No: 27797
atttggcgtttcgtcgtttagggattttttaggcgttttgttcgagtcgagttttaggggttagtagatcgggtttagcggtttcgtcggcgtcgtttgagttagttcgggtttttagtcgagtttacgtgggatttaggcgtttcgtagggcgggtatcgggtattgggtattttttttggtcgcgtattatcggtttagggtaggttcgggtataatttcgggattttttcggcgtttgcggttgggcggtcgtgagttttgtttcgttcgtcgtttcgcgtttatttttttgcggttttaagttttcgggacgtaatttcgtgcggcgtttgcgagcggttgggcggtggtttttcgggggcggggcggcggcgtttcgttttttttttatttgcgcgcgggcggtcgggaggcggggttgggttttagggggcgtggtcgggtttatgggggcggggtttggacgtagtttttgtttagtcggttttttgggttttt

SEQ ID NO: 27798 - DNA, 501 bp, Artificial Sequence
  chemically treated genomic DNA (Homo sapiens) CpG-island No: 27798
aaaaacccaaaaaaccgactaaacaaaaactacgtccaaaccccgcccccataaacccgaccacgccccctaaaacccaaccccgcctcccgaccgcccgcgcgcaaataaaaaaaaaacgaaacgccgccgccccgcccccgaaaaaccaccgcccaaccgctcgcaaacgccgcacgaaattacgtcccgaaaacttaaaaccgcaaaaaaataaacgcgaaacgacgaacgaaacaaaactcacgaccgcccaaccgcaaacgccgaaaaaatcccgaaattatacccgaacctaccctaaaccgataatacgcgaccaaaaaaaatacccaatacccgatacccgccctacgaaacgcctaaatcccacgtaaactcgactaaaaacccgaactaactcaaacgacgccgacgaaaccgctaaacccgatctactaacccctaaaactcgactcgaacaaaacgcctaaaaaatccctaaacgacgaaacgccaaat

SEQ ID NO: 27799 - DNA, 501 bp, Artificial Sequence
  chemically treated genomic DNA (Homo sapiens) CpG-island No: 27799
aggaatttaggaagtcgattgagtaaagattgcgtttaggtttcgtttttatgagttcggttacgttttttggagtttagtttcgtttttcggtcgttcgcgcgtaggtagggaagaggcggagcgtcgtcgtttcgttttcgaggagttatcgtttagtcgttcgtaggcgtcgtacggagttgcgtttcggggatttggggtcgtagggaggtgagcgcggggcgacgagcggggtaggatttacggtcgtttagtcgtaggcgtcggaagggtttcgaggttgtgttcgagtttgttttgaatcggtggtgcgcggttaggaagggtgtttagtgttcggtgttcgttttgcgaagcgtttgggttttacgtgggttcggttggaggttcgggttggtttagacggcgtcggcggggtcgttggattcggtttgttggtttttagggttcggttcggataggacgtttaaggggtttttgggcgacggggcgttagat

SEQ ID NO: 27800 - DNA, 501 bp, Artificial Sequence
  chemically treated genomic DNA (Homo sapiens) CpG-island No: 27800
atctaacgccccgtcgcccaaaaaccccttaaacgtcctatccgaaccgaaccctaaaaaccaacaaaccgaatccaacgaccccgccgacgccgtctaaaccaacccgaacctccaaccgaacccacgtaaaacccaaacgcttcgcaaaacgaacaccgaacactaaacacccttcctaaccgcgcaccaccgattcaaaacaaactcgaacacaacctcgaaacccttccgacgcctacgactaaacgaccgtaaatcctaccccgctcgtcgccccgcgctcacctccctacgaccccaaatccccgaaacgcaactccgtacgacgcctacgaacgactaaacgataactcctcgaaaacgaaacgacgacgctccgcctcttccctacctacgcgcgaacgaccgaaaaacgaaactaaactccaaaaaacgtaaccgaactcataaaaacgaaacctaaacgcaatctttactcaatcgacttcctaaattcct

SEQ ID NO: 27801 - DNA, 725 bp, Artificial Sequence
  chemically treated genomic DNA (Homo sapiens) CpG-island No: 27801
tcgcggcggtttcgcgagttcgtcgggtgggtttagtttagcgtacgtcggagtcgagcgtagggggcggggaagggatttgttgtagttgtagtcgtttgggcgtttttggagcgcgcggtgattttttcggtcggttcgttttatgtagtttcgttgcggaagtgtagcggggggaggcggcggttatcgcggtattaagtacgagaggtcggggttcggttttttgtagtattaggttttgggagtcgcgcggcgcgttttagtggttcgattcgtcgtggttcggcgtttatcgtagtttgtatgtttcgcgtgcgttttgttcggttttcgtagttttttgttcgtatcgttgtagtcgggcgtcggagtaatatgtttattcgagtgatatttgtcgtggttaattttatgggcggtattatggttggtagttaggttcgagtacggcgtttgtattgcggaggttcggatttgtttttgcgtttttttacggcggttagattttttggggttgttttaggacgaggtggagtgtagcgtcgattatatcgttcgttttatttttattttaaggagattcggcggttgtttgggttattggttattagatgagttagcgatatcgcggcgtttgtttttttcgcggtttttttcgtacggtttagttttttttttttgtttcggttttagggttttatagcgtcggcgttaggtttatt

SEQ ID NO: 27802 - DNA, 725 bp, Artificial Sequence
  chemically treated genomic DNA (Homo sapiens) CpG-island No: 27802
aataaacctaacgccgacgctataaaaccctaaaaccgaaacaaaaaaaaaaaactaaaccgtacgaaaaaaaccgcgaaaaaaacaaacgccgcgatatcgctaactcatctaataaccaataacccaaacaaccgccgaatctccttaaaataaaaataaaacgaacgatataatcgacgctacactccacctcgtcctaaaacaaccccaaaaaatctaaccgccgtaaaaaaacgcaaaaacaaatccgaacctccgcaatacaaacgccgtactcgaacctaactaccaaccataataccgcccataaaattaaccacgacaaatatcactcgaataaacatattactccgacgcccgactacaacgatacgaacaaaaaactacgaaaaccgaacaaaacgcacgcgaaacatacaaactacgataaacgccgaaccacgacgaatcgaaccactaaaacgcgccgcgcgactcccaaaacctaatactacaaaaaaccgaaccccgacctctcgtacttaataccgcgataaccgccgcctccccccgctacacttccgcaacgaaactacataaaacgaaccgaccgaaaaaatcaccgcgcgctccaaaaacgcccaaacgactacaactacaacaaatcccttccccgccccctacgctcgactccgacgtacgctaaactaaacccacccgacgaactcgcgaaaccgccgcga

SEQ ID NO: 27803 - DNA, 725 bp, Artificial Sequence
  chemically treated genomic DNA (Homo sapiens) CpG-island No: 27803
gataggtttggcgtcggcgttgtgagattttgaggtcggagtaggagagagaggttggatcgtgcggggaaggtcgcgaggagagtaggcgtcgcggtgtcgttgatttatttggtagttagtggtttaggtagtcgtcgagtttttttgggatgaggatggggcggacgatgtggtcggcgttgtattttatttcgttttgagatagttttaggaaatttggtcgtcgtggggaaacgtaggggtaggttcgagttttcgtagtgtagacgtcgtgttcgggtttggttgttagttatgatgtcgtttatgaaattggttacggtagatgttattcgagtgagtatattatttcggcgttcggttgtagcggtgcgagtaggaggttgcgggggtcgggtaaggcgtacgcggggtatgtaggttgcggtgggcgtcgggttacggcgagtcgggttattgggacgcgtcgcgcggtttttagagtttagtgttgtagggggtcgagtttcggtttttcgtgtttagtgtcgcggtggtcgtcgttttttttcgttatattttcgtaacggagttgtatggagcgggtcgatcgggggagttatcgcgcgttttaggagcgtttaggcggttgtagttgtagtaggtttttttttcgttttttgcgttcggtttcggcgtgcgttgaattgagtttattcggcgagttcgcggagtcgtcgcgg

SEQ ID NO: 27804 - DNA, 725 bp, Artificial Sequence
  chemically treated genomic DNA (Homo sapiens) CpG-island No: 27804
ccgcgacgactccgcgaactcgccgaataaactcaattcaacgcacgccgaaaccgaacgcaaaaaacgaaaaaaaaacctactacaactacaaccgcctaaacgctcctaaaacgcgcgataactcccccgatcgacccgctccatacaactccgttacgaaaatataacgaaaaaaaacgacgaccaccgcgacactaaacacgaaaaaccgaaactcgaccccctacaacactaaactctaaaaaccgcgcgacgcgtcccaataacccgactcgccgtaacccgacgcccaccgcaacctacataccccgcgtacgccttacccgacccccgcaacctcctactcgcaccgctacaaccgaacgccgaaataatatactcactcgaataacatctaccgtaaccaatttcataaacgacatcataactaacaaccaaacccgaacacgacgtctacactacgaaaactcgaacctacccctacgtttccccacgacgaccaaatttcctaaaactatctcaaaacgaaataaaatacaacgccgaccacatcgtccgccccatcctcatcccaaaaaaactcgacgactacctaaaccactaactaccaaataaatcaacgacaccgcgacgcctactctcctcgcgaccttccccgcacgatccaacctctctctcctactccgacctcaaaatctcacaacgccgacgccaaacctatc

SEQ ID NO: 27805 - DNA, 864 bp, Artificial Sequence
  chemically treated genomic DNA (Homo sapiens) CpG-island No: 27805
gggaggttacgttttattacgtgatcgtagttttagcgcggcggggtcggcgttttttggttgtcgttattttcggttttttgttagtcgcgagcgaacgattaagagggtgttcgattgttagagtcgagcgaagcgtgagtgcgtcggattttttatttttatttttcggggattttatttttttagtcgggtcgtgagttgttttcggttttttatttttttcgtcggtaatggtcgcgggaaatggcggttttgttttatttttttttttttttcggcgttttcggttttttttttcgtttttgattttacgtttgacgcgttgtgggttttttcgcggtagatttttgttttcggggagtcgagtcgaggttggcgggcgttgcggttcggggcggtagattgagggcggtcggggagtgaggagtcgcggggagagagtcgcggcgttttcgggataatgcggcggcggtttgtttaggtggggcgcgtgcggttatttatttttttttcgtttttcgttttgagcggggcgttttggagattgggagagcggatgcgggcgggagggggtcgggggaagaacggttgatgtgtagggggagggaacgtttcgagagaagaaaatggcgtttggtgtaaatttcgtttttttttacgtcgtttttttcgtatttcgtcgttttttacgtttttttcgattaatttgttttttttcgttcgagcggttgttagttacggggttttagcggtttgttggggtcgcgcgattttttttttggttttgtgtttgttatttttttgttatatcgaagtcgtgtgttttttagttttggtttatttttatttcgtttttttttg

SEQ ID NO: 27806 - DNA, 864 bp, Artificial Sequence
  chemically treated genomic DNA (Homo sapiens) CpG-island No: 27806
caaaaaaaaacgaaataaaaataaaccaaaactaaaaaacacacgacttcgatataacaaaaaaataacaaacacaaaaccaaaaaaaaaatcgcgcgaccccaacaaaccgctaaaaccccgtaactaacaaccgctcgaacgaaaaaaaacaaattaatcgaaaaaaacgtaaaaaacgacgaaatacgaaaaaaacgacgtaaaaaaaaacgaaatttacaccaaacgccattttcttctctcgaaacgttccctccccctacacatcaaccgttcttcccccgaccccctcccgcccgcatccgctctcccaatctccaaaacgccccgctcaaaacgaaaaacgaaaaaaaaataaataaccgcacgcgccccacctaaacaaaccgccgccgcattatcccgaaaacgccgcgactctctccccgcgactcctcactccccgaccgccctcaatctaccgccccgaaccgcaacgcccgccaacctcgactcgactccccgaaaacaaaaatctaccgcgaaaaaacccacaacgcgtcaaacgtaaaatcaaaaacgaaaaaaaaaaccgaaaacgccgaaaaaaaaaaaaaaataaaacaaaaccgccatttcccgcgaccattaccgacgaaaaaaataaaaaaccgaaaacaactcacgacccgactaaaaaaataaaatccccgaaaaataaaaataaaaaatccgacgcactcacgcttcgctcgactctaacaatcgaacaccctcttaatcgttcgctcgcgactaacaaaaaaccgaaaataacgacaaccaaaaaacgccgaccccgccgcgctaaaactacgatcacgtaataaaacgtaacctccc

SEQ ID NO: 27807 - DNA, 864 bp, Artificial Sequence
  chemically treated genomic DNA (Homo sapiens) CpG-island No: 27807
tagaaaaaaacgaggtgaaaatgaattaggattgaagggtatacgatttcggtataataggaaggtgataagtataagattagggaaggggtcgcgcggttttagtaagtcgttagaatttcgtggttagtagtcgttcgggcgaggggagataggttggtcggagggggcgtgggaggcggcgaagtgcggagaagacggcgtgggaaggggcgggatttgtattaagcgttatttttttttttcgaagcgttttttttttttgtatattagtcgtttttttttcggttttttttcgttcgtattcgtttttttagtttttagagcgtttcgtttagggcgaggggcgggggaagagtaggtaatcgtacgcgttttatttaggtaggtcgtcgtcgtattgtttcggggacgtcgcgatttttttttcgcgattttttatttttcggtcgtttttaatttatcgtttcgggtcgtagcgttcgttagtttcgattcggtttttcggggataggagtttatcgcggaagggtttatagcgcgttaggcgtggagttagaaacggagaagggggtcggggacgtcgaggggaagggggaggtaaggtagagtcgttatttttcgcggttattgtcggcgagaggagtggagggtcgaaggtagtttacggttcggttgggagggtggggttttcgaggagtaggggtagggggttcggcgtatttacgtttcgttcggttttagtagtcgaatatttttttggtcgttcgttcgcgattgatagagaatcggaagtgacggtagttaggagacgtcggtttcgtcgcgttggggttgcggttacgtgatggggcgtggtttttt

SEQ ID NO: 27808 - DNA, 864 bp, Artificial Sequence
  chemically treated genomic DNA (Homo sapiens) CpG-island No: 27808
aaaaaaccacgccccatcacgtaaccgcaaccccaacgcgacgaaaccgacgtctcctaactaccgtcacttccgattctctatcaatcgcgaacgaacgaccaaaaaaatattcgactactaaaaccgaacgaaacgtaaatacgccgaaccccctacccctactcctcgaaaaccccaccctcccaaccgaaccgtaaactaccttcgaccctccactcctctcgccgacaataaccgcgaaaaataacgactctaccttacctcccccttcccctcgacgtccccgacccccttctccgtttctaactccacgcctaacgcgctataaacccttccgcgataaactcctatccccgaaaaaccgaatcgaaactaacgaacgctacgacccgaaacgataaattaaaaacgaccgaaaaataaaaaatcgcgaaaaaaaaatcgcgacgtccccgaaacaatacgacgacgacctacctaaataaaacgcgtacgattacctactcttcccccgcccctcgccctaaacgaaacgctctaaaaactaaaaaaacgaatacgaacgaaaaaaaaccgaaaaaaaaacgactaatatacaaaaaaaaaaaacgcttcgaaaaaaaaaaataacgcttaatacaaatcccgccccttcccacgccgtcttctccgcacttcgccgcctcccacgccccctccgaccaacctatctcccctcgcccgaacgactactaaccacgaaattctaacgacttactaaaaccgcgcgaccccttccctaatcttatacttatcaccttcctattataccgaaatcgtatacccttcaatcctaattcattttcacctcgtttttttcta

SEQ ID NO: 27809 - DNA, 550 bp, Artificial Sequence
  chemically treated genomic DNA (Homo sapiens) CpG-island No: 27809
  unsure (539)
gtggcggttttttcggcggtcgtaggaggttattttagttaaagggtcgttgaaggttttgaggtttttacgtttttatattttcgtcgtttttatattttttttattgggggtcgtttttcgtcgcgggtcgggtcgggtcgggtaaggcggggcggggcggggcgggagaggtcgcggggttgggtcgggttaggtttgtagcgggtcggggttttgggatggttggggacgggcgcgggggcgtcgtatcgataggattcgggtcgaggggagagtaaggggcgaatagagagaaggtaggatgtcgttatttatattgggtcgtagcgtcgtcgtcgtcgtttcgttttgtggtgaatttaaagtagttgtcggtcgttattttggtatttttttttagtcggttgggtattgcggcgggtacgaagagtcgggttttatggcgggataagagatatagaggagtcgagacgtcgagggagggtagggagagaaagagagaggcgtcgtgagagtaagttggcggggttttaggnatcgtcgcgtt

SEQ ID NO: 27810 - DNA, 550 bp, Artificial Sequence
  chemically treated genomic DNA (Homo sapiens) CpG-island No: 27810
  unsure (12)
aacgcgacgatncctaaaaccccgccaacttactctcacgacgcctctctctttctctccctaccctccctcgacgtctcgactcctctatatctcttatcccgccataaaacccgactcttcgtacccgccgcaatacccaaccgactaaaaaaaaataccaaaataacgaccgacaactactttaaattcaccacaaaacgaaacgacgacgacgacgctacgacccaatataaataacgacatcctaccttctctctattcgccccttactctcccctcgacccgaatcctatcgatacgacgcccccgcgcccgtccccaaccatcccaaaaccccgacccgctacaaacctaacccgacccaaccccgcgacctctcccgccccgccccgccccgccttacccgacccgacccgacccgcgacgaaaaacgacccccaataaaaaaaatataaaaacgacgaaaatataaaaacgtaaaaacctcaaaaccttcaacgaccctttaactaaaataacctcctacgaccgccgaaaaaaccgccac

SEQ ID NO: 27811 - DNA, 550 bp, Artificial Sequence
  chemically treated genomic DNA (Homo sapiens) CpG-island No: 27811
  unsure (12)
ggcgcggcggtntttgaggtttcgttagtttgtttttacggcgtttttttttttttttttttgttttttttcggcgtttcggtttttttgtgttttttgtttcgttatgggattcgatttttcgtgttcgtcgtagtgtttagtcggttgggggaagatgttaaaatggcgatcggtaattattttggatttattataggacggggcggcggcggcggcgttgcggtttaatataggtaacggtattttgttttttttttgttcgttttttgtttttttttcggttcggattttgtcgatgcgacgttttcgcgttcgtttttagttattttagagtttcggttcgttgtaggtttggttcggtttagtttcgcggtttttttcgtttcgtttcgtttcgttttgttcggttcggttcggttcgcggcggagagcggtttttagtaggggagatgtagagacggcggaggtgtagggacgtggaggttttagggtttttagcggttttttaattaaaatggttttttgcggtcgtcgagggagtcgttat

SEQ ID NO: 27812 - DNA, 550 bp, Artificial Sequence
  chemically treated genomic DNA (Homo sapiens) CpG-island No: 27812
  unsure (539)
ataacgactccctcgacgaccgcaaaaaaccattttaattaaaaaaccgctaaaaaccctaaaacctccacgtccctacacctccgccgtctctacatctcccctactaaaaaccgctctccgccgcgaaccgaaccgaaccgaacaaaacgaaacgaaacgaaacgaaaaaaaccgcgaaactaaaccgaaccaaacctacaacgaaccgaaactctaaaataactaaaaacgaacgcgaaaacgtcgcatcgacaaaatccgaaccgaaaaaaaaacaaaaaacgaacaaaaaaaaaacaaaataccgttacctatattaaaccgcaacgccgccgccgccgccccgtcctataataaatccaaaataattaccgatcgccattttaacatcttcccccaaccgactaaacactacgacgaacacgaaaaatcgaatcccataacgaaacaaaaaacacaaaaaaaccgaaacgccgaaaaaaaacaaaaaaaaaaaaaaaaaaacgccgtaaaaacaaactaacgaaacctcaaanaccgccgcgcc

SEQ ID NO: 27813 - DNA, 806 bp, Artificial Sequence
  chemically treated genomic DNA (Homo sapiens) CpG-island No: 27813
gcgttatcgtttattgcgggggtggaggtatagcgttatcgtttattgcgggggtggaggtatagcgttatcgtttattgcgggggtggaggtatagcgttatcgtttattgcgggggtggaggtatagcgttatcgtttattgcgggggtggaggtatagcgttatcgtttattgcgggggtggaggtatagcgttatcgtttattgcgggggtggaggtatagcgttatcgtttattgcgggggtggaggtatagcgttatcgtttattgcgggggtggaggtatagcgttatcgtttattgcggcggtggaggtatagcgttatcgtttattgcgggggtggaggtatagcgttatcgtttattgcggcggtggaggtatagcgttatcgtttattgcggcggtggaggtatagcgttatcgtttattgcggcggtggaggtatagcgttatcgtttattgcggcggtggaggtatagcgttatcgtttattgcggcggtggaggtatagcgttatcgtttattgcggcggtggaggtatagcgttatcgtttattgcgggggtggaggtatagcgttatcgtttattgcgggggtggaggtatagcgttatcgtttattgcggcggtggaggtatagcgttatcgtttattgcggcggtggaggtatagcgttatcgtttattgcggcggtggaggtatagcgttatcgtttattgcggcggtggaggtatagttttattgtttattgtagcggtggaggtagtagtttttttgaggttatggttttgttatatacgtttta

SEQ ID NO: 27814 - DNA, 806 bp, Artificial Sequence
  chemically treated genomic DNA (Homo sapiens) CpG-island No: 27814
taaaacgtatataacaaaaccataacctcaaaaaaactactacctccaccgctacaataaacaataaaactatacctccaccgccgcaataaacgataacgctatacctccaccgccgcaataaacgataacgctatacctccaccgccgcaataaacgataacgctatacctccaccgccgcaataaacgataacgctatacctccacccccgcaataaacgataacgctatacctccacccccgcaataaacgataacgctatacctccaccgccgcaataaacgataacgctatacctccaccgccgcaataaacgataacgctatacctccaccgccgcaataaacgataacgctatacctccaccgccgcaataaacgataacgctatacctccaccgccgcaataaacgataacgctatacctccaccgccgcaataaacgataacgctatacctccacccccgcaataaacgataacgctatacctccaccgccgcaataaacgataacgctatacctccacccccgcaataaacgataacgctatacctccacccccgcaataaacgataacgctatacctccacccccgcaataaacgataacgctatacctccacccccgcaataaacgataacgctatacctccacccccgcaataaacgataacgctatacctccacccccgcaataaacgataacgctatacctccacccccgcaataaacgataacgctatacctccacccccgcaataaacgataacgctatacctccacccccgcaataaacgataacgc

SEQ ID NO: 27815 - DNA, 806 bp, Artificial Sequence
  chemically treated genomic DNA (Homo sapiens) CpG-island No: 27815
tggagcgtatgtagtaggattatgattttaagggaattgttatttttatcgttatagtgaatagtgagattgtatttttatcgtcgtagtgaacggtgacgttgtatttttatcgtcgtagtgaacggtgacgttgtatttttatcgtcgtagtgaacggtgacgttgtatttttatcgtcgtagtgaacggtgacgttgtatttttattttcgtagtgaacggtgacgttgtatttttattttcgtagtgaacggtgacgttgtatttttatcgtcgtagtgaacggtgacgttgtatttttatcgtcgtagtgaacggtgacgttgtatttttatcgtcgtagtgaacggtgacgttgtatttttatcgtcgtagtgaacggtgacgttgtatttttatcgtcgtagtgaacggtgacgttgtatttttatcgtcgtagtgaacggtgacgttgtatttttattttcgtagtgaacggtgacgttgtatttttatcgtcgtagtgaacggtgacgttgtatttttattttcgtagtgaacggtgacgttgtatttttattttcgtagtgaacggtgacgttgtatttttattttcgtagtgaacggtgacgttgtatttttattttcgtagtgaacggtgacgttgtatttttattttcgtagtgaacggtgacgttgtatttttattttcgtagtgaacggtgacgttgtatttttattttcgtagtgaacggtgacgttgtatttttattttcgtagtgaacggtgacgttgtatttttattttcgtagtgaacggtgacgt

SEQ ID NO: 27816 - DNA, 806 bp, Artificial Sequence
  chemically treated genomic DNA (Homo sapiens) CpG-island No: 27816
acgtcaccgttcactacgaaaataaaaatacaacgtcaccgttcactacgaaaataaaaatacaacgtcaccgttcactacgaaaataaaaatacaacgtcaccgttcactacgaaaataaaaatacaacgtcaccgttcactacgaaaataaaaatacaacgtcaccgttcactacgaaaataaaaatacaacgtcaccgttcactacgaaaataaaaatacaacgtcaccgttcactacgaaaataaaaatacaacgtcaccgttcactacgaaaataaaaatacaacgtcaccgttcactacgacgataaaaatacaacgtcaccgttcactacgaaaataaaaatacaacgtcaccgttcactacgacgataaaaatacaacgtcaccgttcactacgacgataaaaatacaacgtcaccgttcactacgacgataaaaatacaacgtcaccgttcactacgacgataaaaatacaacgtcaccgttcactacgacgataaaaatacaacgtcaccgttcactacgacgataaaaatacaacgtcaccgttcactacgaaaataaaaatacaacgtcaccgttcactacgaaaataaaaatacaacgtcaccgttcactacgacgataaaaatacaacgtcaccgttcactacgacgataaaaatacaacgtcaccgttcactacgacgataaaaatacaacgtcaccgttcactacgacgataaaaatacaatctcactattcactataacgataaaaataacaattcccttaaaatcataatcctactacatacgctcca

SEQ ID NO: 27817 - DNA, 549 bp, Artificial Sequence
  chemically treated genomic DNA (Homo sapiens) CpG-island No: 27817
  unsure (322)
tggcgtgggggagggggcggggaatcgtagtcgtttaaagggaggaggcgggcggtcgggcgggggcgttttttttggttcggggcgttttggagagggcgtgcggcgcgggtttcggtttttttcgtcgggattttattgttttgtagagggtgggggttggggggggggcggtcgttttcggggcgttgttgagttttgaatttttcgtcgtcgagattttttattagtgcgttttttttcgttcggtcgcggatcgcgtttttttttttttttttgtttttttttcggtcggagcgcgagaggggggggggcgcgtcgntttatttttttattttcgtattttcgtattttttttcgtaattttttttcggtcggttcgttcgtttcgcgtttagtttcgttttcggtcggagcgggttttttatatataattgattcggtcgttacgaaaagtgtatttgtttttttttttttttttttcgcggtcgttcgggtcggttttcgggggtgagggggtcgcgagggagggaggcgggaggggggagt

SEQ ID NO: 27818 - DNA, 549 bp, Artificial Sequence
  chemically treated genomic DNA (Homo sapiens) CpG-island No: 27818
  unsure (228)
actcccccctcccgcctccctccctcgcgaccccctcacccccgaaaaccgacccgaacgaccgcgaaaaaaaaaaaaaaaaaaacaaatacacttttcgtaacgaccgaatcaattatatataaaaaacccgctccgaccgaaaacgaaactaaacgcgaaacgaacgaaccgaccgaaaaaaaattacgaaaaaaaatacgaaaatacgaaaataaaaaaataaancgacgcgcccccccccctctcgcgctccgaccgaaaaaaaaacaaaaaaaaaaaaaaaaacgcgatccgcgaccgaacgaaaaaaaacgcactaataaaaaatctcgacgacgaaaaattcaaaactcaacaacgccccgaaaacgaccgccccccccccaacccccaccctctacaaaacaataaaatcccgacgaaaaaaaccgaaacccgcgccgcacgccctctccaaaacgccccgaaccaaaaaaaacgcccccgcccgaccgcccgcctcctccctttaaacgactacgattccccgccccctcccccacgcca

SEQ ID NO: 27819 - DNA, 549 bp, Artificial Sequence
  chemically treated genomic DNA (Homo sapiens) CpG-island No: 27819
  unsure (228)
gtttttttttttcgtttttttttttcgcggtttttttattttcgggagtcggttcgggcggtcgcggagggggagggggaggggataagtgtatttttcgtaacgatcgaattaattgtgtgtgaagagttcgtttcggtcggggacggggttgagcgcggggcgggcgggtcggtcgggggaggattgcggaggggggtgcgggggtgcgggggtgggagggtaggncggcgcgtttttttttttttcgcgtttcggtcggggagggagtaaggaggggggggggggcgcggttcgcgatcgggcgggggggaacgtattaatggagggtttcggcgacggaaagtttaaagtttagtagcgtttcgggagcggtcgttttttttttagtttttattttttgtagaataatgaggtttcggcgggggagatcggggttcgcgtcgtacgttttttttagggcgtttcgggttagaggggacgttttcgttcggtcgttcgttttttttttttaggcggttgcggtttttcgtttttttttttacgtta

SEQ ID NO: 27820 - DNA, 549 bp, Artificial Sequence
  chemically treated genomic DNA (Homo sapiens) CpG-island No: 27820
  unsure (322)
taacgtaaaaaaaaaaacgaaaaaccgcaaccgcctaaaaaaaaaaaacgaacgaccgaacgaaaacgtcccctctaacccgaaacgccctaaaaaaaacgtacgacgcgaaccccgatctcccccgccgaaacctcattattctacaaaaaataaaaactaaaaaaaaaacgaccgctcccgaaacgctactaaactttaaactttccgtcgccgaaaccctccattaatacgttcccccccgcccgatcgcgaaccgcgcccccccccccctccttactccctccccgaccgaaacgcgaaaaaaaaaaaaacgcgccgncctaccctcccacccccgcacccccgcacccccctccgcaatcctcccccgaccgacccgcccgccccgcgctcaaccccgtccccgaccgaaacgaactcttcacacacaattaattcgatcgttacgaaaaatacacttatcccctccccctccccctccgcgaccgcccgaaccgactcccgaaaataaaaaaaccgcgaaaaaaaaaaacgaaaaaaaaaaac

SEQ ID NO: 27821 - DNA, 618 bp, Artificial Sequence
  chemically treated genomic DNA (Homo sapiens) CpG-island No: 27821
  unsure (116)
ttcgagagtggagggggggtaataaaggttaaattgtgggggttcgcgcgttaattatgtttgttttgttttgttttttgagagtcggtttttatttgttttttcgggttcgtcgnattcgttggggggcggtgattgtcgcgtagcgtcgcggtattgtgttacggtcgttcggtgtgtagcgggttcggtatcgcgtttcggcgagggaggcgttttttggcggcggggcgggggtcgggttcgggttgtcgcggtcgttacgagaagggaagtggattgtgtttggggatgtgaggacgggaagcgttgagtgttagggaggggtttttcggcgcggcgcggggagttgagacgcggtttgtagagttgagtttattttagtaggttcgggtttttttcgggaggggacggggtgttttttttaggtgtatcgtttgatcggaagtcgcgggcgttggcggtttttggcgaaggggttttttttaatgaggggatacggcggggcgggggtagtcggtcgtttcgagggcgcgcgtaggggttaagttggatttatattttcgtttttttttttttttttttattttgtttttaaggttggatattttggatagg

SEQ ID NO: 27822 - DNA, 618 bp, Artificial Sequence
  chemically treated genomic DNA (Homo sapiens) CpG-island No: 27822
  unsure (503)
cctatccaaaatatccaaccttaaaaacaaaataaaaaaaaaaaaaaaaaaacgaaaatataaatccaacttaacccctacgcgcgccctcgaaacgaccgactacccccgccccgccgtatcccctcattaaaaaaaaccccttcgccaaaaaccgccaacgcccgcgacttccgatcaaacgatacacctaaaaaaaacaccccgtcccctcccgaaaaaaacccgaacctactaaaataaactcaactctacaaaccgcgtctcaactccccgcgccgcgccgaaaaacccctccctaacactcaacgcttcccgtcctcacatccccaaacacaatccacttcccttctcgtaacgaccgcgacaacccgaacccgacccccgccccgccgccaaaaaacgcctccctcgccgaaacgcgataccgaacccgctacacaccgaacgaccgtaacacaataccgcgacgctacgcgacaatcaccgccccccaacgaatncgacgaacccgaaaaaacaaataaaaaccgactctcaaaaaacaaaacaaaacaaacataattaacgcgcgaacccccacaatttaacctttattaccccccctccactctcgaa

SEQ ID NO: 27823 - DNA, 618 bp, Artificial Sequence
  chemically treated genomic DNA (Homo sapiens) CpG-island No: 27823
  unsure (503)
tttatttaaagtgtttagttttgaagataaggtggagggaggagagagagggcggaggtgtaaatttaatttaatttttgcgcgcgttttcgaggcggtcggttgttttcgtttcgtcgtgtttttttattaaggaaggttttttcgttaggggtcgttaacgttcgcggttttcggttagacggtgtatttgagagggatatttcgttttttttcgggagggattcgggtttgttgaagtgggtttaattttgtaaatcgcgttttaatttttcgcgtcgcgtcggggaatttttttttgatatttaacgtttttcgtttttatatttttaaatatagtttattttttttttcgtggcggtcgcggtaattcgagttcggttttcgtttcgtcgttagagaacgtttttttcgtcgggacgcggtgtcgagttcgttgtatatcgagcggtcgtggtataatatcgcggcgttgcgcgataattatcgttttttagcgaatncggcgaattcgggagaatagatggagatcgatttttaaaaaataaagtaaaataaatataattggcgcgcgggtttttatagtttagtttttattgttttttttttattttcggg

SEQ ID NO: 27824 - DNA, 618 bp, Artificial Sequence
  chemically treated genomic DNA (Homo sapiens) CpG-island No: 27824
  unsure (116)
cccgaaaataaaaaaaaaacaataaaaactaaactataaaaacccgcgcgccaattatatttattttactttattttttaaaaatcgatctccatctattctcccgaattcgccgnattcgctaaaaaacgataattatcgcgcaacgccgcgatattataccacgaccgctcgatatacaacgaactcgacaccgcgtcccgacgaaaaaaacgttctctaacgacgaaacgaaaaccgaactcgaattaccgcgaccgccacgaaaaaaaaaataaactatatttaaaaatataaaaacgaaaaacgttaaatatcaaaaaaaaattccccgacgcgacgcgaaaaattaaaacgcgatttacaaaattaaacccacttcaacaaacccgaatccctcccgaaaaaaaacgaaatatccctctcaaatacaccgtctaaccgaaaaccgcgaacgttaacgacccctaacgaaaaaaccttccttaataaaaaaacacgacgaaacgaaaacaaccgaccgcctcgaaaacgcgcgcaaaaattaaattaaatttacacctccgccctctctctcctccctccaccttatcttcaaaactaaacactttaaataaa

SEQ ID NO: 27825 - DNA, 732 bp, Artificial Sequence
  chemically treated genomic DNA (Homo sapiens) CpG-island No: 27825
cgtttttcgggttttagggacgcgggtatttgtggggcggggttgtcgggtttcggggttcgattttttcgggcggtcggagcgagattcgggttgggaaagtaggtacgtggcgtattttcgtatttttcgttttatttttacggtagggtttttagtgtttgattaagtttaagttcgagtttttcggcgcgttgtttatcggttgttttttcgcgttttttttttttttttattcgtatcgtttcgttttttattttttttttgttttttttttattatttagtttatatttttttcgttttttttttcgtttttcgcgtaattcgaagtgttcgggaggcgtttatttgttcgatttaaatatttacgcgatttttagcgttcgtagtacgcgtgttagttttcgaatcgacgacggttattcgtgttttttagtattatatagagtaagggttcgtgaaggcgtagcgaagacgaggtacggggaacgtaatatagaataatttcgcgcggacgtcggtaatagagatagagaataggaaatagaagttgggcggttggtagagcggagacggaacgaaaacgcgacgacggaagatcgacgcgagagggggagataagaacggataagggcgaggagaatagatatggtagacgcgagaaaagaaataaagacgtataggtatatagaaataaagtcggtaatagataagtatatcgaagagaaat

SEQ ID NO: 27826 - DNA, 732 bp, Artificial Sequence
  chemically treated genomic DNA (Homo sapiens) CpG-island No: 27826
atttctcttcgatatacttatctattaccgactttatttctatatacctatacgtctttatttcttttctcgcgtctaccatatctattctcctcgcccttatccgttcttatctccccctctcgcgtcgatcttccgtcgtcgcgttttcgttccgtctccgctctaccaaccgcccaacttctatttcctattctctatctctattaccgacgtccgcgcgaaattattctatattacgttccccgtacctcgtcttcgctacgccttcacgaacccttactctatataatactaaaaaacacgaataaccgtcgtcgattcgaaaactaacacgcgtactacgaacgctaaaaatcgcgtaaatatttaaatcgaacaaataaacgcctcccgaacacttcgaattacgcgaaaaacgaaaaaaaaaacgaaaaaaatataaactaaataataaaaaaaaaacaaaaaaaaaataaaaaacgaaacgatacgaataaaaaaaaaaaaaaaacgcgaaaaaacaaccgataaacaacgcgccgaaaaactcgaacttaaacttaatcaaacactaaaaaccctaccgtaaaaataaaacgaaaaatacgaaaatacgccacgtacctactttcccaacccgaatctcgctccgaccgcccgaaaaaatcgaaccccgaaacccgacaaccccgccccacaaatacccgcgtccctaaaacccgaaaaacg

SEQ ID NO: 27827 - DNA, 732 bp, Artificial Sequence
  chemically treated genomic DNA (Homo sapiens) CpG-island No: 27827
gttttttttcgatgtgtttgtttgttgtcggttttgtttttgtgtgtttgtgcgtttttgttttttttttcgcgtttgttatgtttgtttttttcgtttttgttcgtttttgtttttttttttcgcgtcgatttttcgtcgtcgcgttttcgtttcgttttcgttttgttagtcgtttagtttttgttttttgttttttgtttttgttatcgacgttcgcgcgagattattttgtattgcgtttttcgtatttcgttttcgttgcgtttttacggatttttgttttgtgtggtgttggggagtacgaatgatcgtcgtcggttcgggggttggtacgcgtgttgcgggcgttgggggtcgcgtagatgtttgggtcgaataggtgagcgtttttcggatatttcgggttgcgcggggggcggggaggagggcggagggggtgtaaattaagtggtgggaaagagataaaggaagagtgaagagcgagacggtgcggatggggaagggggaggggcgcgaaggggtagtcggtgggtagcgcgtcgaggagttcgagtttgaatttgattaagtattgggggttttgtcgtgggggtggggcgggggatacggagatgcgttacgtgtttgtttttttagttcgggtttcgtttcggtcgttcgggggagtcgaatttcgaggttcggtagtttcgttttataagtattcgcgtttttgggattcgaaagacg

SEQ ID NO: 27828 - DNA, 732 bp, Artificial Sequence
  chemically treated genomic DNA (Homo sapiens) CpG-island No: 27828
cgtctttcgaatcccaaaaacgcgaatacttataaaacgaaactaccgaacctcgaaattcgactcccccgaacgaccgaaacgaaacccgaactaaaaaaacaaacacgtaacgcatctccgtatcccccgccccacccccacgacaaaacccccaatacttaatcaaattcaaactcgaactcctcgacgcgctacccaccgactaccccttcgcgcccctcccccttccccatccgcaccgtctcgctcttcactcttcctttatctctttcccaccacttaatttacaccccctccgccctcctccccgccccccgcgcaacccgaaatatccgaaaaacgctcacctattcgacccaaacatctacgcgacccccaacgcccgcaacacgcgtaccaacccccgaaccgacgacgatcattcgtactccccaacaccacacaaaacaaaaatccgtaaaaacgcaacgaaaacgaaatacgaaaaacgcaatacaaaataatctcgcgcgaacgtcgataacaaaaacaaaaaacaaaaaacaaaaactaaacgactaacaaaacgaaaacgaaacgaaaacgcgacgacgaaaaatcgacgcgaaaaaaaaaaacaaaaacgaacaaaaacgaaaaaaacaaacataacaaacgcgaaaaaaaaaacaaaaacgcacaaacacacaaaaacaaaaccgacaacaaacaaacacatcgaaaaaaaac

SEQ ID NO: 27829 - DNA, 808 bp, Artificial Sequence
  chemically treated genomic DNA (Homo sapiens) CpG-island No: 27829
taggtacggaggggagggcgtagaagagggttggtattagtagcgcggtttagtttttcgaacggattgatgggattgatgggagagattttttgtatttttcggggatgtgcgtttcggaggatgcgaattagtttgcgtatagggcgttttggggatagcgttgtttaagtataggtttgggtgatggttggtggggttcgggtcgatatttttttttttcgttttcggatttttgtatatacgcgttgttcggcgtagtcgtttttgttcggcgttttttttcgggatatttagcgagaggggtgatcgggcggcggcgggagaggcgtacgttttcgggcgcgggcgaatttgcgtatttggtatttgttatatagcgaaagtatcggttagcgagcggaggggcgttttcgtttttttttttcggagcggatcgagatcgagtacgttttcgcgggtcggtagcgtcgcggagagagtgggtgggtaggcgagggaggggaagggagaggaaggagggagggagggagagggcgaggcgcgttttcgcgagcggggcgcgttcgcgcgggttgtcgggatcgttcgtcgtcgttgtggtaatgttcgttatgttggttatggcgtagggagcggatcgggcgggcgagcggcggatttagtgtgtggaggtagtcgcggtagggggggttgttttcgggcggggtgggcgtttatgttgttgtcggggtagttgaggaggaggaggagcgggtcggtcgcgttgtattgaggaaggaggtggaggaggcggcgggagtttttt

SEQ ID NO: 27830 - DNA, 808 bp, Artificial Sequence
  chemically treated genomic DNA (Homo sapiens) CpG-island No: 27830
aaaaaactcccgccgcctcctccacctccttcctcaatacaacgcgaccgacccgctcctcctcctcctcaactaccccgacaacaacataaacgcccaccccgcccgaaaacaaccccccctaccgcgactacctccacacactaaatccgccgctcgcccgcccgatccgctccctacgccataaccaacataacgaacattaccacaacgacgacgaacgatcccgacaacccgcgcgaacgcgccccgctcgcgaaaacgcgcctcgccctctccctccctccctccttcctctcccttcccctccctcgcctacccacccactctctccgcgacgctaccgacccgcgaaaacgtactcgatctcgatccgctccgaaaaaaaaaaacgaaaacgcccctccgctcgctaaccgatactttcgctatataacaaataccaaatacgcaaattcgcccgcgcccgaaaacgtacgcctctcccgccgccgcccgatcacccctctcgctaaatatcccgaaaaaaaacgccgaacaaaaacgactacgccgaacaacgcgtatatacaaaaatccgaaaacgaaaaaaaaaaatatcgacccgaaccccaccaaccatcacccaaacctatacttaaacaacgctatccccaaaacgccctatacgcaaactaattcgcatcctccgaaacgcacatccccgaaaaatacaaaaaatctctcccatcaatcccatcaatccgttcgaaaaactaaaccgcgctactaataccaaccctcttctacgccctcccctccgtaccta

SEQ ID NO: 27831 - DNA, 808 bp, Artificial Sequence
  chemically treated genomic DNA (Homo sapiens) CpG-island No: 27831
ggaggattttcgtcgttttttttatttttttttttagtgtagcgcggtcggttcgtttttttttttttttagttgtttcggtaatagtatgggcgtttatttcgttcgaaaatagttttttttgtcgcggttgtttttatatattagattcgtcgttcgttcgttcgattcgttttttgcgttatggttaatatggcggatattattatagcggcggcgagcgatttcggtagttcgcgcgagcgcgtttcgttcgcgggaacgcgtttcgtttttttttttttttttttttttttttttttttttttttttcgtttgtttatttatttttttcgcggcgttgtcggttcgcgggagcgtgttcggtttcggttcgtttcggggagagggggcgggggcgttttttcgttcgttggtcggtgttttcgttgtgtggtaggtgttaggtgcgtaagttcgttcgcgttcgggagcgtgcgtttttttcgtcgtcgttcggttatttttttcgttgggtgtttcggaggaaggcgtcgggtaaagacggttgcgtcgagtagcgcgtgtgtgtagaagttcgggagcgggaagggaaaatgtcgattcggattttattagttattatttaagtttgtatttggatagcgttatttttaaggcgttttgtgcgtaagttaattcgtatttttcgaggcgtatattttcgagaggtgtaagaggttttttttattagttttattagttcgttcggaggattggatcgcgttgttggtgttagtttttttttacgttttttttttcgtatttg

SEQ ID NO: 27832 - DNA, 808 bp, Artificial Sequence
  chemically treated genomic DNA (Homo sapiens) CpG-island No: 27832
caaatacgaaaaaaaaaacgtaaaaaaaaactaacaccaacaacgcgatccaatcctccgaacgaactaataaaactaataaaaaaaacctcttacacctctcgaaaatatacgcctcgaaaaatacgaattaacttacgcacaaaacgccttaaaaataacgctatccaaatacaaacttaaataataactaataaaatccgaatcgacattttcccttcccgctcccgaacttctacacacacgcgctactcgacgcaaccgtctttacccgacgccttcctccgaaacacccaacgaaaaaaataaccgaacgacgacgaaaaaaacgcacgctcccgaacgcgaacgaacttacgcacctaacacctaccacacaacgaaaacaccgaccaacgaacgaaaaaacgcccccgccccctctccccgaaacgaaccgaaaccgaacacgctcccgcgaaccgacaacgccgcgaaaaaaataaataaacaaacgaaaaaaaaaaaaaaaaaaaaaaaaaaaaaaaaaaaaaaaaacgaaacgcgttcccgcgaacgaaacgcgctcgcgcgaactaccgaaatcgctcgccgccgctataataatatccgccatattaaccataacgcaaaaaacgaatcgaacgaacgaacgacgaatctaatatataaaaacaaccgcgacaaaaaaaactattttcgaacgaaataaacgcccatactattaccgaaacaactaaaaaaaaaaaaaaacgaaccgaccgcgctacactaaaaaaaaaaataaaaaaaacgacgaaaatcctcc

SEQ ID NO: 27833 - DNA, 747 bp, Artificial Sequence
  chemically treated genomic DNA (Homo sapiens) CpG-island No: 27833
  unsure (263, 433)
tcgttttttttttaagttcggattcgaggtttcgttcgtcggtttttttgatttagggtttcggatagaagcgtaatgtagtttgcgttttatttttttttttcgtttcgttatttcgatttcggttcggagtcgtcgatattttttacgtagtaggggtagaaagggacgcggggtggggggaagtcgaggatttgcgaggcggtcgcgggagtatagcgagcggttttggcgtttttcgggaagaaggcgtttcgcgcggntcgtagtaggtttcgttagttgcgtcgttcggtacgcgtttcgttttcgtcgcggtatttattttcgcggaggttgttcggatttttttcggtcgcggtggagacgaggatcgagtcgggcgttttttttttttatttcggtttcgcggcgggttcgaattttagatcgntcgagcgttacggtttcgttgttcgcggagttagaaataggcgatttcgggttttgcggttcggaggcgagaagcgcgcgggagcggttttttaggacgcgggtttcgagtcgcgattttatttacgtaggtatttaaggtaacgtgggttgtaattttgatggaggtttgacgttagggaaggtgcgaaaattagattttttttgacgtaggagcgcgggatcgttttttgttcgtttatttatttatttatttttttattcgggcggaggagttttttttttttttttagaagtttttaaagcggatatttt

SEQ ID NO: 27834 - DNA, 747 bp, Artificial Sequence
  chemically treated genomic DNA (Homo sapiens) CpG-island No: 27834
  unsure (315, 485)
aaaatatccgctttaaaaacttctaaaaaaaaaaaaaaaactcctccgcccgaataaaaaaataaataaataaataaacgaacaaaaaacgatcccgcgctcctacgtcaaaaaaaatctaattttcgcaccttccctaacgtcaaacctccatcaaaattacaacccacgttaccttaaatacctacgtaaataaaatcgcgactcgaaacccgcgtcctaaaaaaccgctcccgcgcgcttctcgcctccgaaccgcaaaacccgaaatcgcctatttctaactccgcgaacaacgaaaccgtaacgctcgancgatctaaaattcgaacccgccgcgaaaccgaaataaaaaaaaaaaacgcccgactcgatcctcgtctccaccgcgaccgaaaaaaatccgaacaacctccgcgaaaataaataccgcgacgaaaacgaaacgcgtaccgaacgacgcaactaacgaaacctactacganccgcgcgaaacgccttcttcccgaaaaacgccaaaaccgctcgctatactcccgcgaccgcctcgcaaatcctcgacttccccccaccccgcgtccctttctacccctactacgtaaaaaatatcgacgactccgaaccgaaatcgaaataacgaaacgaaaaaaaaaaataaaacgcaaactacattacgcttctatccgaaaccctaaatcaaaaaaaccgacgaacgaaacctcgaatccgaacttaaaaaaaaaacga

SEQ ID NO: 27835 - DNA, 747 bp, Artificial Sequence
  chemically treated genomic DNA (Homo sapiens) CpG-island No: 27835
  unsure (315, 485)
gaagtgttcgttttaagagtttttggaggggaggaaggggttttttcgttcgggtgggagagtgagtgagtgggtgggcgggtagggggcggtttcgcgtttttgcgttagaaggggtttggttttcgtattttttttgacgttaaatttttattagggttgtaatttacgttgttttggatgtttgcgtgagtggagtcgcgattcggggttcgcgttttgagagatcgttttcgcgcgtttttcgttttcggatcgtagggttcgaagtcgtttatttttggtttcgcgggtagcggggtcgtggcgttcgancggtttgggattcgggttcgtcgcggaatcggaataagaagggagagcgttcggttcggttttcgtttttatcgcggtcggaaggaattcgggtagttttcgcggaggtgagtgtcgcggcgggggcggagcgcgtgtcgggcgacgtagttagcggggtttgttacgantcgcgcggggcgtttttttttcgagggacgttaggatcgttcgttgtgttttcgcggtcgtttcgtaggttttcggtttttttttatttcgcgtttttttttgtttttgttgcgtgagaggtgtcggcggtttcgggtcgggatcgaggtggcggggcgagggaaggaggtggggcgtaggttgtattgcgtttttgttcggggttttgggttagaggggtcggcggacgaggtttcgggttcgggtttggggagggggcgg

SEQ ID NO: 27836 - DNA, 747 bp, Artificial Sequence
  chemically treated genomic DNA (Homo sapiens) CpG-island No: 27836
  unsure (263, 433)
ccgccccctccccaaacccgaacccgaaacctcgtccgccgacccctctaacccaaaaccccgaacaaaaacgcaatacaacctacgccccacctccttccctcgccccgccacctcgatcccgacccgaaaccgccgacacctctcacgcaacaaaaacaaaaaaaaacgcgaaataaaaaaaaaccgaaaacctacgaaacgaccgcgaaaacacaacgaacgatcctaacgtccctcgaaaaaaaaacgccccgcgcgantcgtaacaaaccccgctaactacgtcgcccgacacgcgctccgcccccgccgcgacactcacctccgcgaaaactacccgaattccttccgaccgcgataaaaacgaaaaccgaaccgaacgctctcccttcttattccgattccgcgacgaacccgaatcccaaaccgntcgaacgccacgaccccgctacccgcgaaaccaaaaataaacgacttcgaaccctacgatccgaaaacgaaaaacgcgcgaaaacgatctctcaaaacgcgaaccccgaatcgcgactccactcacgcaaacatccaaaacaacgtaaattacaaccctaataaaaatttaacgtcaaaaaaaatacgaaaaccaaaccccttctaacgcaaaaacgcgaaaccgccccctacccgcccacccactcactcactctcccacccgaacgaaaaaaccccttcctcccctccaaaaactcttaaaacgaacacttc

SEQ ID NO: 27837 - DNA, 1197 bp, Artificial Sequence
  chemically treated genomic DNA (Homo sapiens) CpG-island No: 27837
  unsure (442, 445, 448, 453..454, 456, 459, 462..463, 467..468, 470)
  unsure (472, 850, 901)
agggtcgcgagaaggagagtgcgtcgggttgatggttagcggtgtttcgggggtcgatgtcgggcgggatcggcggcgcgggggtggggcgacggcggggcggcggtcgagtagtagaggggcgtttcgtagaggtcggggggggcgcggggtttcgcgtcgttttgttagtagtcgtttcgtcgtttttttcggttcgttcgtaatcgtcgcgggattcgtcggttcgggtttttggaattttttacgggggatagtcgatcgggggcgtcggggttcgttttcgtattcgattcggacggcggtagtagggggagggatggtgtatcgaggaagttaaggttttattattttgttcggcgggtcggcggttcgttggttcgttggttcggagaagtgttgcgtttaggttggttcgtaggaaacggcggcggcggtttanttntanttttnnnnttnttnnttgnnantntttttttataggggaggggtaggcggttcgcgggtttcgcgtcggtcgggcgattgggtacgcgagggagcgggtagggtagggggaaataaattaaggtcgagatttagagtcggagagcgcgggaggagtagcggcgagaggtaggagaggtagagaagaagaaaggagggagagagggggcgaagacggtcgggaaattcggggttgtagtttcgcgtcgcgtcggagtcgtgacggatttattgtagcggtcgcgttgattcgtaattttaaggtacgaaaaaaggggagggtagagagggaggggaaagcggagtgttgtagcgtcggggcgggggcgggttttcgcgagcgtcgtatattcgggaatttgtngtttcgttgcgggcgagtgtcgcgtgttttggcgagttttggttggggaantttgagcgcgcggattacgttcgttttttagtcggtcgttttttgcgtgtagggtggggggaggttaggggcgggggcgcggacgtcggtgacgtcgcgtggcggagttttttcggttatgtggttggaggcgggcggggaagaaggtaaggttgggaggggaaggaggaaatgcgagggtttttcggcgggaggaagcgcgaggggtgcgcgagtgttagcgaaagggggataggggttttggagtggaagttttgcgggagaggaggagtagaggagtagttttagggtgttag

SEQ ID NO: 27838 - DNA, 1197 bp, Artificial Sequence
  chemically treated genomic DNA (Homo sapiens) CpG-island No: 27838
  unsure (297, 348, 726, 728, 730..731, 735..736, 739, 742..743, 745)
  unsure (750, 753, 756)
ctaacaccctaaaactactcctctactcctcctctcccgcaaaacttccactccaaaacccctatccccctttcgctaacactcgcgcacccctcgcgcttcctcccgccgaaaaaccctcgcatttcctccttcccctcccaaccttaccttcttccccgcccgcctccaaccacataaccgaaaaaactccgccacgcgacgtcaccgacgtccgcgcccccgcccctaacctccccccaccctacacgcaaaaaacgaccgactaaaaaacgaacgtaatccgcgcgctcaaanttccccaaccaaaactcgccaaaacacgcgacactcgcccgcaacgaaacnacaaattcccgaatatacgacgctcgcgaaaacccgcccccgccccgacgctacaacactccgctttcccctccctctctaccctccccttttttcgtaccttaaaattacgaatcaacgcgaccgctacaataaatccgtcacgactccgacgcgacgcgaaactacaaccccgaatttcccgaccgtcttcgccccctctctccctcctttcttcttctctacctctcctacctctcgccgctactcctcccgcgctctccgactctaaatctcgaccttaatttatttccccctaccctacccgctccctcgcgtacccaatcgcccgaccgacgcgaaacccgcgaaccgcctacccctcccctataaaaaaanantnncaannaanaannnnaaaantanaantaaaccgccgccgccgtttcctacgaaccaacctaaacgcaacacttctccgaaccaacgaaccaacgaaccgccgacccgccgaacaaaataataaaaccttaacttcctcgatacaccatccctccccctactaccgccgtccgaatcgaatacgaaaacgaaccccgacgcccccgatcgactatcccccgtaaaaaattccaaaaacccgaaccgacgaatcccgcgacgattacgaacgaaccgaaaaaaacgacgaaacgactactaacaaaacgacgcgaaaccccgcgccccccccgacctctacgaaacgcccctctactactcgaccgccgccccgccgtcgccccacccccgcgccgccgatcccgcccgacatcgacccccgaaacaccgctaaccatcaacccgacgcactctccttctcgcgaccct

SEQ ID NO: 27839 - DNA, 1197 bp, Artificial Sequence
  chemically treated genomic DNA (Homo sapiens) CpG-island No: 27839
  unsure (297, 348, 726, 728, 730..731, 735..736, 739, 742..743, 745)
  unsure (750, 753, 756)
ttgatattttaagattgtttttttgttttttttttttcgtaaggtttttattttagggtttttgtttttttttcgttagtattcgcgtatttttcgcgttttttttcgtcggggaattttcgtattttttttttttttttttagttttgttttttttttcgttcgtttttagttatatgatcggaagggtttcgttacgcgacgttatcgacgttcgcgttttcgtttttggtttttttttattttgtacgtaaggggcggtcggttgaggggcgaacgtggttcgcgcgtttaggnttttttaattagagttcgttagagtacgcggtattcgttcgtagcggggtngtaggttttcggatgtgcggcgttcgcggaagttcgttttcgtttcggcgttgtagtatttcgtttttttttttttttttgttttttttttttttcgtgttttgaggttgcgggttagcgcgatcgttgtagtgagttcgttacggtttcggcgcgacgcgaggttgtagtttcgagtttttcggtcgttttcgtttttttttttttttttttttttttttttgttttttttgtttttcgtcgttgtttttttcgcgtttttcggttttgaatttcgattttaatttatttttttttattttgttcgttttttcgcgtgtttaatcgttcggtcggcgcggagttcgcgagtcgtttattttttttttatgggagggngntnntagnnggngannnnagggntgnagntgggtcgtcgtcgtcgttttttgcgagttagtttgagcgtaatattttttcgagttagcgagttagcgagtcgtcgattcgtcgagtaaaatggtgagattttggttttttcgatgtattatttttttttttattgtcgtcgttcgggtcgggtgcgggggcgagtttcgacgttttcggtcggttgtttttcgtggaaaattttagagattcgggtcggcgggtttcgcggcggttgcgggcgagtcggagagggcggcggggcggttgttgataggacggcgcggggtttcgcgtttttttcggtttttgcggggcgtttttttgttgttcggtcgtcgtttcgtcgtcgttttattttcgcgtcgtcggtttcgttcggtatcgattttcggggtatcgttgattattagttcggcgtattttttttttcgcgatttt

SEQ ID NO: 27840 - DNA, 1197 bp, Artificial Sequence
  chemically treated genomic DNA (Homo sapiens) CpG-island No: 27840
  unsure (442, 445, 448, 453..454, 456, 459, 462..463, 467..468, 470)
  unsure (472, 850, 901)
aaaatcgcgaaaaaaaaaatacgccgaactaataatcaacgataccccgaaaatcgataccgaacgaaaccgacgacgcgaaaataaaacgacgacgaaacgacgaccgaacaacaaaaaaacgccccgcaaaaaccgaaaaaaacgcgaaaccccgcgccgtcctatcaacaaccgccccgccgccctctccgactcgcccgcaaccgccgcgaaacccgccgacccgaatctctaaaattttccacgaaaaacaaccgaccgaaaacgtcgaaactcgcccccgcacccgacccgaacgacgacaataaaaaaaaaaataatacatcgaaaaaaccaaaatctcaccattttactcgacgaatcgacgactcgctaactcgctaactcgaaaaaatattacgctcaaactaactcgcaaaaaacgacgacgacgacccanctncanccctnnnntcnccnnctannancnccctcccataaaaaaaaaataaacgactcgcgaactccgcgccgaccgaacgattaaacacgcgaaaaaacgaacaaaataaaaaaaaataaattaaaatcgaaattcaaaaccgaaaaacgcgaaaaaaacaacgacgaaaaacaaaaaaaacaaaaaaaaaaaaaaaaaaaaaaaaaaaaacgaaaacgaccgaaaaactcgaaactacaacctcgcgtcgcgccgaaaccgtaacgaactcactacaacgatcgcgctaacccgcaacctcaaaacacgaaaaaaaaaaaaaacaaaaaaaaaaaaaaaaacgaaatactacaacgccgaaacgaaaacgaacttccgcgaacgccgcacatccgaaaacctacnaccccgctacgaacgaataccgcgtactctaacgaactctaattaaaaaancctaaacgcgcgaaccacgttcgcccctcaaccgaccgccccttacgtacaaaataaaaaaaaaccaaaaacgaaaacgcgaacgtcgataacgtcgcgtaacgaaacccttccgatcatataactaaaaacgaacgaaaaaaaaaacaaaactaaaaaaaaaaaaaaaaaatacgaaaattccccgacgaaaaaaaacgcgaaaaatacgcgaatactaacgaaaaaaaaacaaaaaccctaaaataaaaaccttacgaaaaaaaaaaaacaaaaaaacaatcttaaaatatcaa

SEQ ID NO: 27841 - DNA, 603 bp, Artificial Sequence
  chemically treated genomic DNA (Homo sapiens) CpG-island No: 27841
  unsure (265, 336..)
cgttttattaaagtttttgtatatttttttttacgttgcgtttttgttatttacgtagttgtttttttgagcgtttcgcgtgtataaacgcgttttcggtttttacgcgtcggtggcgttgtttcgttgaggtggcgtcgggggagtcgtagaggcggcgggggagggagtgcggaggagaggattcgtgagttgcggggatttggggtcgtcgagtttttggggaagttgggtttcgtttttttcgggcgtttggcgtcgaaangtgtcgcgatggacgcgaacgttattcgttgttgttgtcggttgttgattgttatcgcggcgggagcggtnngttgtgtcggagttcggcgtttgttaggttttaataggtttcgggttaatttgcgggtacgtttatcggttatcgtcggttacgttaatcgcgtcgcgggttcggggcgcgtttttcgtcggtttttttcgcgttaattttttttatttattcgtcgtttaggaagcggaattcggagtttttttttttttttttttcgtttaattcgtaagaggcgggttttttttttttgtatttttattttttttattttttttttttttttg

SEQ ID NO: 27842 - DNA, 603 bp, Artificial Sequence
  chemically treated genomic DNA (Homo sapiens) CpG-island No: 27842
  unsure (267..268, 339)
caaaaaaaaaaaaaaaataaaaaaaataaaaatacaaaaaaaaaaaacccgcctcttacgaattaaacgaaaaaaaaaaaaaaaaaaactccgaattccgcttcctaaacgacgaataaataaaaaaaattaacgcgaaaaaaaccgacgaaaaacgcgccccgaacccgcgacgcgattaacgtaaccgacgataaccgataaacgtacccgcaaattaacccgaaacctattaaaacctaacaaacgccgaactccgacacaacnnaccgctcccgccgcgataacaatcaacaaccgacaacaacaacgaataacgttcgcgtccatcgcgacacntttcgacgccaaacgcccgaaaaaaacgaaacccaacttccccaaaaactcgacgaccccaaatccccgcaactcacgaatcctctcctccgcactccctcccccgccgcctctacgactcccccgacgccacctcaacgaaacaacgccaccgacgcgtaaaaaccgaaaacgcgtttatacacgcgaaacgctcaaaaaaacaactacgtaaataacaaaaacgcaacgtaaaaaaaaatatacaaaaactttaataaaacg

SEQ ID NO: 27843 - DNA, 603 bp, Artificial Sequence
  chemically treated genomic DNA (Homo sapiens) CpG-island No: 27843
  unsure (267..268, 339)
tagaggagggaagggggtgggaagagtgggggtgtaagagagaaaaattcgttttttgcgagttgagcgaggaagaggggggggaaggtttcgagtttcgttttttgaacggcgggtggatagagaaggttggcgcggggaagatcggcgggaggcgcgtttcgggttcgcggcgcgattggcgtgatcggcgatggtcggtgagcgtattcgtaggttaattcggagtttgttgagatttggtaggcgtcgagtttcggtatagtnngtcgttttcgtcgcggtggtagttagtagtcggtagtagtagcgggtgacgttcgcgtttatcgcgatatntttcggcgttaggcgttcggggagaacggagtttagtttttttaaaagttcggcggttttaggttttcgtagtttacgggttttttttttcgtattttttttttcgtcgtttttgcggttttttcggcgttattttagcgaggtagcgttatcgacgcgtaaggatcgggggcgcgtttgtgtacgcgggacgtttagaggagtagttgcgtgggtagtagaagcgtagcgtgggagaggatgtgtaggggttttaatggggcg

SEQ ID NO: 27844 - DNA, 603 bp, Artificial Sequence
  chemically treated genomic DNA (Homo sapiens) CpG-island No: 27844
  unsure (265, 336..)
cgccccattaaaacccctacacatcctctcccacgctacgcttctactacccacgcaactactcctctaaacgtcccgcgtacacaaacgcgcccccgatccttacgcgtcgataacgctacctcgctaaaataacgccgaaaaaaccgcaaaaacgacgaaaaaaaaaatacgaaaaaaaaaacccgtaaactacgaaaacctaaaaccgccgaacttttaaaaaaactaaactccgttctccccgaacgcctaacgccgaaanatatcgcgataaacgcgaacgtcacccgctactactaccgactactaactaccaccgcgacgaaaacgacnnactataccgaaactcgacgcctaccaaatctcaacaaactccgaattaacctacgaatacgctcaccgaccatcgccgatcacgccaatcgcgccgcgaacccgaaacgcgcctcccgccgatcttccccgcgccaaccttctctatccacccgccgttcaaaaaacgaaactcgaaaccttcccccccctcttcctcgctcaactcgcaaaaaacgaatttttctctcttacacccccactcttcccacccccttccctcctcta

SEQ ID NO: 27845 - DNA, 550 bp, Artificial Sequence
  chemically treated genomic DNA (Homo sapiens) CpG-island No: 27845
tgggaacgcgtagggttagttcgggtttaagggaggcgttttggttttcgaggaagggtcgtaagttcgtagtttttcggcgtttttggtcggaagatataaatgattcgagaagttgcgaggtttttcggtggcggggacggggggtatttcgacggagttttcggatttttttcgttttaggacgattttgttcgtatcgagtttcggtttagttgtcgcgttttagtttacgtcggcgtttgcgtatttattatgcggttcgcggttcgcgagatttcggtttttatttttcgagcgacggatatagacgcggcgcgggagttagtggattgattgatagcggttttagttcgcgtttcgacgtttcgtttgttcggtcgggaacgtcgttagggggtagtgtagttttcgtagttcgggcggcgttttttttcgtattggcggaggacgcggtcgttggaggcgatatttttataagtagcgtggaggcgatatttttataagtagcgttatttgacggaatttttataataattcgttttataga

SEQ ID NO: 27846 - DNA, 550 bp, Artificial Sequence
  chemically treated genomic DNA (Homo sapiens) CpG-island No: 27846
tctataaaacgaattattataaaaattccgtcaaataacgctacttataaaaatatcgcctccacgctacttataaaaatatcgcctccaacgaccgcgtcctccgccaatacgaaaaaaaacgccgcccgaactacgaaaactacactaccccctaacgacgttcccgaccgaacaaacgaaacgtcgaaacgcgaactaaaaccgctatcaatcaatccactaactcccgcgccgcgtctatatccgtcgctcgaaaaataaaaaccgaaatctcgcgaaccgcgaaccgcataataaatacgcaaacgccgacgtaaactaaaacgcgacaactaaaccgaaactcgatacgaacaaaatcgtcctaaaacgaaaaaaatccgaaaactccgtcgaaataccccccgtccccgccaccgaaaaacctcgcaacttctcgaatcatttatatcttccgaccaaaaacgccgaaaaactacgaacttacgacccttcctcgaaaaccaaaacgcctcccttaaacccgaactaaccctacgcgttccca

SEQ ID NO: 27847 - DNA, 550 bp, Artificial Sequence
  chemically treated genomic DNA (Homo sapiens) CpG-island No: 27847
tttgtaaaacgggttgttgtgagggtttcgttagataacgttgtttgtggaggtgtcgtttttacgttgtttgtggaggtgtcgtttttaacggtcgcgtttttcgttagtgcgggagggggcgtcgttcgggttgcggggattgtattgttttttggcggcgttttcggtcggataggcggggcgtcggggcgcgggttggggtcgttgttagttagtttattggttttcgcgtcgcgtttgtgttcgtcgttcggagggtggaagtcggggtttcgcgggtcgcgggtcgtatggtaggtgcgtaggcgtcggcgtgggttagggcgcggtagttgggtcggggttcggtgcgggtagggtcgttttagggcgggaagggttcgagggtttcgtcggggtgtttttcgttttcgttatcggggagtttcgtaatttttcgggttatttgtgtttttcggttaggggcgtcggggggttgcgggtttgcgattttttttcgaggattagggcgttttttttgaattcgggttggttttgcgcgttttta

SEQ ID NO: 27848 - DNA, 550 bp, Artificial Sequence
  chemically treated genomic DNA (Homo sapiens) CpG-island No: 27848
taaaaacgcgcaaaaccaacccgaattcaaaaaaaacgccctaatcctcgaaaaaaaatcgcaaacccgcaaccccccgacgcccctaaccgaaaaacacaaataacccgaaaaattacgaaactccccgataacgaaaacgaaaaacaccccgacgaaaccctcgaacccttcccgccctaaaacgaccctacccgcaccgaaccccgacccaactaccgcgccctaacccacgccgacgcctacgcacctaccatacgacccgcgacccgcgaaaccccgacttccaccctccgaacgacgaacacaaacgcgacgcgaaaaccaataaactaactaacaacgaccccaacccgcgccccgacgccccgcctatccgaccgaaaacgccgccaaaaaacaatacaatccccgcaacccgaacgacgccccctcccgcactaacgaaaaacgcgaccgttaaaaacgacacctccacaaacaacgtaaaaacgacacctccacaaacaacgttatctaacgaaaccctcacaacaacccgttttacaaa

SEQ ID NO: 27849 - DNA, 776 bp, Artificial Sequence
  chemically treated genomic DNA (Homo sapiens) CpG-island No: 27849
gtttttatagtagcgatagttttaacggagagatttttagttgtcgttttagtgttttttttacggttggaaacggcgaggacgttaatatagtttttattgggcgggacgcgatttaaacggtttaacgatttcgagcgttggggttcgtaacggcgtcgatatacgcgtttttacggattggtcgtttttaacgagtgttatttatttttcgattgttttttcgttatggagcgtcgtatcgcgtgatcgttattaatttttcgaattttggggtatttcggttttttttcgcgttaatttggacgacgatttgggatatcgcgcgtatttggattagcgaatttaaaatttcgtttttcgcgttagatcgtagtaaaatgttcgttttacgcgtaggcgtagtacgtgcggttttttttttatttcggtttaagatttacgtttttaggttttcgtatcgttcgttttttttagggtcgcggtttaggattggtttaggggttgcgcgggttttgattgggcgaggcggagttattagggcgtcgtatttttacgtggtcgtttttttcgcgcgttttggatttggggtaatagttgagagggcgttattagcgtgtcggcgtttgcggtttttttcgggttgtttttaggcgtcgtgttcgcgttcgttacgcgcggtggtttgtaggggcgtatcgcgatagttttaaaggaaaatttgttagggataagggttgttgtgggtagcgagggttatagatttatgtgtgttt

SEQ ID NO: 27850 - DNA, 776 bp, Artificial Sequence
  chemically treated genomic DNA (Homo sapiens) CpG-island No: 27850
aaacacacataaatctataaccctcgctacccacaacaacccttatccctaacaaattttcctttaaaactatcgcgatacgcccctacaaaccaccgcgcgtaacgaacgcgaacacgacgcctaaaaacaacccgaaaaaaaccgcaaacgccgacacgctaataacgccctctcaactattaccccaaatccaaaacgcgcgaaaaaaacgaccacgtaaaaatacgacgccctaataactccgcctcgcccaatcaaaacccgcgcaacccctaaaccaatcctaaaccgcgaccctaaaaaaaacgaacgatacgaaaacctaaaaacgtaaatcttaaaccgaaataaaaaaaaaaccgcacgtactacgcctacgcgtaaaacgaacattttactacgatctaacgcgaaaaacgaaattttaaattcgctaatccaaatacgcgcgatatcccaaatcgtcgtccaaattaacgcgaaaaaaaaccgaaataccccaaaattcgaaaaattaataacgatcacgcgatacgacgctccataacgaaaaaacaatcgaaaaataaataacactcgttaaaaacgaccaatccgtaaaaacgcgtatatcgacgccgttacgaaccccaacgctcgaaatcgttaaaccgtttaaatcgcgtcccgcccaataaaaactatattaacgtcctcgccgtttccaaccgtaaaaaaaacactaaaacgacaactaaaaatctctccgttaaaactatcgctactataaaaac

SEQ ID NO: 27851 - DNA, 776 bp, Artificial Sequence
  chemically treated genomic DNA (Homo sapiens) CpG-island No: 27851
gaatatatatgagtttataattttcgttgtttatagtagtttttgtttttaataggtttttttttaaggttgtcgcggtgcgtttttgtaagttatcgcgcgtgacggacgcgggtacgacgtttggggatagttcgaagaaaatcgtaggcgtcgatacgttggtgacgtttttttagttattgttttagatttaaggcgcgcggggaagacggttacgtaaagatacggcgttttggtgatttcgtttcgtttaattagagttcgcgtaatttttgaattaattttgagtcgcgattttgggaggggcgggcggtgcgggagtttgggggcgtgagttttgagtcggggtggagggggggtcgtacgtgttgcgtttgcgcgtggagcggatattttgttgcggtttagcgcgggaggcggggttttgggttcgttggtttaggtgcgcgcggtgttttaggtcgtcgtttaggttggcgcgggagaaggtcgaggtgttttagagttcgaggagttggtgacggttacgcggtgcgacgttttatggcggaggggtagtcggaaagtgaatagtattcgttaaaagcgattagttcgtaagggcgcgtgtgtcggcgtcgttacggattttagcgttcggggtcgttaaatcgtttaagtcgcgtttcgtttagtgagggttatgttagcgttttcgtcgtttttagtcgtgaaggaggtattgagacgatagttgagggttttttcgttaaggttgtcgttgttgtaggggt

SEQ ID NO: 27852 - DNA, 776 bp, Artificial Sequence
  chemically treated genomic DNA (Homo sapiens) CpG-island No: 27852
acccctacaacaacgacaaccttaacgaaaaaaccctcaactatcgtctcaatacctccttcacgactaaaaacgacgaaaacgctaacataaccctcactaaacgaaacgcgacttaaacgatttaacgaccccgaacgctaaaatccgtaacgacgccgacacacgcgcccttacgaactaatcgcttttaacgaatactattcactttccgactacccctccgccataaaacgtcgcaccgcgtaaccgtcaccaactcctcgaactctaaaacacctcgaccttctcccgcgccaacctaaacgacgacctaaaacaccgcgcgcacctaaaccaacgaacccaaaaccccgcctcccgcgctaaaccgcaacaaaatatccgctccacgcgcaaacgcaacacgtacgaccccccctccaccccgactcaaaactcacgcccccaaactcccgcaccgcccgcccctcccaaaatcgcgactcaaaattaattcaaaaattacgcgaactctaattaaacgaaacgaaatcaccaaaacgccgtatctttacgtaaccgtcttccccgcgcgccttaaatctaaaacaataactaaaaaaacgtcaccaacgtatcgacgcctacgattttcttcgaactatccccaaacgtcgtacccgcgtccgtcacgcgcgataacttacaaaaacgcaccgcgacaaccttaaaaaaaaacctattaaaaacaaaaactactataaacaacgaaaattataaactcatatatattc

SEQ ID NO: 27853 - DNA, 1276 bp, Artificial Sequence
  chemically treated genomic DNA (Homo sapiens) CpG-island No: 27853
acgtgggggtatttggtaggttattacgtgttcgaaatatagcgtaaaaggtacgcggtagagttatttttcggggtttattacgtgtcggtttgttaggtcggggcggagatattcgagcgtagtcgggatttcgattagggtcgatatcgttatttttcggtttaaggtattcggtttttttggagattttaggatttacgcggcgcggtttacgtggtaggtcgcgttttcgggtacgtgcgttaggagtcgagttttagttcgtacgcgtcgtaaaagtttggttttatttttttatttcgaggtttagcgtttttttttcgcgtttagtgattttgtttttttcgtcgcgttcgtcgtttttagtatttgtagaagttttttatttcgttattaagtagttagaagtcgcgagatttttttattaatcgcgcgagatttttcgtagtatggcgttttagaacgcgttcgggattgcgcgtaggttttttttttcgcggcgtcgcgttcgtttttcggaaagtaggtttatacgtttgcgttcgcgtttaaggtcgtttattttcgcgagttttattatgatggcggcggagtgtgaagcggataagtggcgtagatgagtttagaagaagttaagcgacggcgatggcggtcgcgggtgttgaagatttcggagtacgtatattcgaaggttagcgagagttcgagattgaggcgaaagattgagtttgtttagtaatcgtttgtggaaaggcgacgacggcgttttcgtgatttcgcgtcgattaattaaagttcgcggtcgtttttatgagttaatcgcgagtttttaatcgtgaacggcgcggggcggggagtaggcgggtcgaggcggttacgggagggggaggggttggtaacggcgtcgtgggggcggggttcgttttgtgtaaggttcgcgttgattgggtcgtgggcgcgcgggtttcggtttgcgtcgtgggattggcgtttttggcgtcggttgtgaggggagcgcgggggtggtggaatcgggcggttttcggttcgttaatgtggttgggttcgtaggtttgggtagttttggagttttttagagatttcgcgttcggtttcggtacgtatttacgtcgcggtttttggtggttttggagcgaggagttcgttagtatcggaagtttagggatcgcggagttttcgttggtttttttggaggtatagtttatttttgtttgttcgcgagtatggggtcggtagtttttcggttgtaggt

SEQ ID NO: 27854 - DNA, 1276 bp, Artificial Sequence
  chemically treated genomic DNA (Homo sapiens) CpG-island No: 27854
acctacaaccgaaaaactaccgaccccatactcgcgaacaaacaaaaataaactatacctccaaaaaaaccaacgaaaactccgcgatccctaaacttccgatactaacgaactcctcgctccaaaaccaccaaaaaccgcgacgtaaatacgtaccgaaaccgaacgcgaaatctctaaaaaactccaaaactacccaaacctacgaacccaaccacattaacgaaccgaaaaccgcccgattccaccacccccgcgctcccctcacaaccgacgccaaaaacgccaatcccacgacgcaaaccgaaacccgcgcgcccacgacccaatcaacgcgaaccttacacaaaacgaaccccgcccccacgacgccgttaccaacccctccccctcccgtaaccgcctcgacccgcctactccccgccccgcgccgttcacgattaaaaactcgcgattaactcataaaaacgaccgcgaactttaattaatcgacgcgaaatcacgaaaacgccgtcgtcgcctttccacaaacgattactaaacaaactcaatctttcgcctcaatctcgaactctcgctaaccttcgaatatacgtactccgaaatcttcaacacccgcgaccgccatcgccgtcgcttaacttcttctaaactcatctacgccacttatccgcttcacactccgccgccatcataataaaactcgcgaaaataaacgaccttaaacgcgaacgcaaacgtataaacctactttccgaaaaacgaacgcgacgccgcgaaaaaaaaaacctacgcgcaatcccgaacgcgttctaaaacgccatactacgaaaaatctcgcgcgattaataaaaaaatctcgcgacttctaactacttaataacgaaataaaaaacttctacaaatactaaaaacgacgaacgcgacgaaaaaaacaaaatcactaaacgcgaaaaaaaaacgctaaacctcgaaataaaaaaataaaaccaaacttttacgacgcgtacgaactaaaactcgactcctaacgcacgtacccgaaaacgcgacctaccacgtaaaccgcgccgcgtaaatcctaaaatctccaaaaaaaccgaataccttaaaccgaaaaataacgatatcgaccctaatcgaaatcccgactacgctcgaatatctccgccccgacctaacaaaccgacacgtaataaaccccgaaaaataactctaccgcgtaccttttacgctatatttcgaacacgtaataacctaccaaatacccccacgt

SEQ ID NO: 27855 - DNA, 1276 bp, Artificial Sequence
  chemically treated genomic DNA (Homo sapiens) CpG-island No: 27855
gtttgtagtcggggggttgtcggttttatgttcgcgggtaagtagggataagttgtgtttttaaaagggttaacgggaatttcgcggtttttgaattttcggtgttggcggatttttcgttttagggttattaggagtcgcggcgtgagtgcgtgtcgggatcgagcgcggggtttttgaggaattttaaggttgtttaagtttacggatttagttatattggcgaatcggagatcgttcgattttattattttcgcgttttttttatagtcggcgttaaaaacgttagttttacgacgtaggtcgggattcgcgcgtttacggtttaattagcgcggattttgtataaagcgagtttcgtttttacggcgtcgttgttagtttttttttttttcgtggtcgtttcggttcgtttatttttcgtttcgcgtcgtttacggttagaggttcgcgattggtttatggggacggtcgcgagttttggttggtcggcgcggagttacgagggcgtcgtcgtcgtttttttataggcgattattgggtaggtttagtttttcgttttagtttcgagttttcgttggttttcgggtgtacgtgtttcgggatttttagtattcgcggtcgttatcgtcgtcgtttggttttttttggatttatttgcgttatttgttcgttttatatttcgtcgttattatggtgaagttcgcgaaggtaaacggttttgagcgcgagcgtagacgtgtaggtttgtttttcgaggggcgagcgcggcgtcgcggggaggagggtttgcgcgtagtttcgggcgcgttttagggcgttatgttgcgggaagtttcgcgcgattagtggggaggtttcgcggtttttggttatttggtggcgaggtgaagagtttttgtaggtgttgggggcggcgaacgcggcgggaaagatagagttattgagcgcggggagggggcgttgggtttcggggtggagagatgagattaaatttttgcgacgcgtacgagttgggattcgatttttgacgtacgtgttcgggagcgcggtttgttacgtgggtcgcgtcgcgtgggttttggaatttttagagggatcgggtgttttgggtcgggaaatggcggtatcggttttagtcggagtttcggttgcgttcggatgttttcgtttcggtttggtaagtcgatacgtggtgggtttcggaaggtggttttgtcgcgtgttttttgcgttgtgtttcgggtacgtggtggtttattaggtatttttacgt

SEQ ID NO: 27856 - DNA, 1276 bp, Artificial Sequence
  chemically treated genomic DNA (Homo sapiens) CpG-island No: 27856
acgtaaaaatacctaataaaccaccacgtacccgaaacacaacgcaaaaaacacgcgacaaaaccaccttccgaaacccaccacgtatcgacttaccaaaccgaaacgaaaacatccgaacgcaaccgaaactccgactaaaaccgataccgccatttcccgacccaaaacacccgatccctctaaaaattccaaaacccacgcgacgcgacccacgtaacaaaccgcgctcccgaacacgtacgtcaaaaatcgaatcccaactcgtacgcgtcgcaaaaatttaatctcatctctccaccccgaaacccaacgccccctccccgcgctcaataactctatctttcccgccgcgttcgccgcccccaacacctacaaaaactcttcacctcgccaccaaataaccaaaaaccgcgaaacctccccactaatcgcgcgaaacttcccgcaacataacgccctaaaacgcgcccgaaactacgcgcaaaccctcctccccgcgacgccgcgctcgcccctcgaaaaacaaacctacacgtctacgctcgcgctcaaaaccgtttaccttcgcgaacttcaccataataacgacgaaatataaaacgaacaaataacgcaaataaatccaaaaaaaaccaaacgacgacgataacgaccgcgaatactaaaaatcccgaaacacgtacacccgaaaaccaacgaaaactcgaaactaaaacgaaaaactaaacctacccaataatcgcctataaaaaaacgacgacgacgccctcgtaactccgcgccgaccaaccaaaactcgcgaccgtccccataaaccaatcgcgaacctctaaccgtaaacgacgcgaaacgaaaaataaacgaaccgaaacgaccacgaaaaaaaaaaaaactaacaacgacgccgtaaaaacgaaactcgctttatacaaaatccgcgctaattaaaccgtaaacgcgcgaatcccgacctacgtcgtaaaactaacgtttttaacgccgactataaaaaaaacgcgaaaataataaaatcgaacgatctccgattcgccaatataactaaatccgtaaacttaaacaaccttaaaattcctcaaaaaccccgcgctcgatcccgacacgcactcacgccgcgactcctaataaccctaaaacgaaaaatccgccaacaccgaaaattcaaaaaccgcgaaattcccgttaacccttttaaaaacacaacttatccctacttacccgcgaacataaaaccgacaaccccccgactacaaac

SEQ ID NO: 27857 - DNA, 694 bp, Artificial Sequence
  chemically treated genomic DNA (Homo sapiens) CpG-island No: 27857
  unsure (691..)
cggcgtttcgagatttttcgacgttttttacgggttcggggtcgcgtatcgcgaatatttttcgtcgtcgtcgtcgcgttcgttcgtttattcgttttcgggaaattgaggtcggcggcgcgcgcgggggtattttttatttcgggagtttcggcgttcgtttgtggttacggaggagggggagttcgggtttacgttttcgtttaggttttcgacgtttttagttttatttattatagcgatatggcggttcgggcggagcggcggaggggcgagcggttcgtagttttgggcgttacggttcgggtcggcgggacggcgggcgggtggggacggagatcgggtcgcgttttcgtcgcgattttttttttttcggtcgcgggaggaggggtcggtagggcggtggtttaggtgttttaattttttcggcgtttagggttcgtttcgcgcgttggcggggattattttattttttcgagacggtttttaggttttttaagcgcgtttagtagatagtgtatggtcgaggcggggtttcggaatttacgggggttatttttaatttcggggacgtttgtttttggcggagtttttcggggcggggggagggcggtcgtcggttttttttgtatttgtgcgaaatttgaatattcggttttttttaagatttttggggtattttttttaatanngg

SEQ ID NO: 27858 - DNA, 694 bp, Artificial Sequence
  chemically treated genomic DNA (Homo sapiens) CpG-island No: 27858
  unsure (3..)
ccnntattaaaaaaaataccccaaaaatcttaaaaaaaaccgaatattcaaatttcgcacaaatacaaaaaaaaccgacgaccgccctccccccgccccgaaaaactccgccaaaaacaaacgtccccgaaattaaaaataacccccgtaaattccgaaaccccgcctcgaccatacactatctactaaacgcgcttaaaaaacctaaaaaccgtctcgaaaaaataaaataatccccgccaacgcgcgaaacgaaccctaaacgccgaaaaaattaaaacacctaaaccaccgccctaccgacccctcctcccgcgaccgaaaaaaaaaaaatcgcgacgaaaacgcgacccgatctccgtccccacccgcccgccgtcccgccgacccgaaccgtaacgcccaaaactacgaaccgctcgcccctccgccgctccgcccgaaccgccatatcgctataataaataaaactaaaaacgtcgaaaacctaaacgaaaacgtaaacccgaactccccctcctccgtaaccacaaacgaacgccgaaactcccgaaataaaaaatacccccgcgcgcgccgccgacctcaatttcccgaaaacgaataaacgaacgaacgcgacgacgacgacgaaaaatattcgcgatacgcgaccccgaacccgtaaaaaacgtcgaaaaatctcgaaacgccg

SEQ ID NO: 27859 - DNA, 694 bp, Artificial Sequence
  chemically treated genomic DNA (Homo sapiens) CpG-island No: 27859
  unsure (3..)
ttnntattaagggaggtgttttaagggttttaaaggagatcgggtgtttagatttcgtataagtataggagggatcggcgatcgtttttttttcgtttcgggaggtttcgttagggataggcgttttcgggattggaggtgattttcgtgggtttcgaagtttcgtttcggttatgtattgtttattaggcgcgtttggggagtttaggggtcgtttcggagaaatggggtggttttcgttagcgcgcggggcgggttttgggcgtcgaaggggttaaggtatttgggttatcgttttgtcggttttttttttcgcggtcgggaagaggaaagtcgcggcgggggcgcggttcggttttcgtttttattcgttcgtcgtttcgtcggttcgagtcgtggcgtttagagttgcgagtcgttcgttttttcgtcgtttcgttcgggtcgttatgtcgttgtggtgagtggggttgggggcgtcgggggtttgggcgggggcgtgggttcgggttttttttttttcgtggttatagacgggcgtcgggattttcgggataggagatgttttcgcgcgcgtcgtcggttttagtttttcgggggcggatgggcgggcgggcgcggcggcggcggcgggagatgttcgcggtacgcggtttcggattcgtgggggacgtcgaggggtttcggggcgtcg

SEQ ID NO: 27860 - DNA, 694 bp, Artificial Sequence
  chemically treated genomic DNA (Homo sapiens) CpG-island No: 27860
  unsure (691..)
cgacgccccgaaacccctcgacgtcccccacgaatccgaaaccgcgtaccgcgaacatctcccgccgccgccgccgcgcccgcccgcccatccgcccccgaaaaactaaaaccgacgacgcgcgcgaaaacatctcctatcccgaaaatcccgacgcccgtctataaccacgaaaaaaaaaaaacccgaacccacgcccccgcccaaacccccgacgcccccaaccccactcaccacaacgacataacgacccgaacgaaacgacgaaaaaacgaacgactcgcaactctaaacgccacgactcgaaccgacgaaacgacgaacgaataaaaacgaaaaccgaaccgcgcccccgccgcgactttcctcttcccgaccgcgaaaaaaaaaaccgacaaaacgataacccaaataccttaaccccttcgacgcccaaaacccgccccgcgcgctaacgaaaaccaccccatttctccgaaacgacccctaaactccccaaacgcgcctaataaacaatacataaccgaaacgaaacttcgaaacccacgaaaatcacctccaatcccgaaaacgcctatccctaacgaaacctcccgaaacgaaaaaaaaacgatcgccgatccctcctatacttatacgaaatctaaacacccgatctcctttaaaacccttaaaacacctcccttaatannaa

SEQ ID NO: 27861 - DNA, 825 bp, Artificial Sequence
  chemically treated genomic DNA (Homo sapiens) CpG-island No: 27861
tcgtcgtcgtcgcggagtagattaataggcgaacgcggagtatagcgtagcgcgggcggtagcgcggttttaagttcggtttagttttcgatgcgcgtcggagttcgcgggcggcgttgagttgggcggttcgggggtcggttttttttttcgttcgtgtttcgcgggttattatgttttttttttagttgggatattaatatattcgttcgttttattcgttcgagcgttcgggggtcgttggcggtagcggcggtagcgcgggggttcggggcggtttgggtgtcggagtttcggagttgaacgtttcggggtttttgtttaacgtgttttcgttcgtgtacggggcgttttacgtcgcggtcgttgcggtcgtcgtcgtttaaggttacggcgtttttttgttttacgtcgcggagttgtttattttttcgtagttggtaagagttcgcggagttagggaaggaggggttggcgttggggcgtagggcgagttgagcgcgcgggggtcggattagaggggtgtaggttaggaggggggaggtagcgatggttggggtttattcgcgtttttttcgcgcgtgttttttttttttttatgtgcgtatagggcgcgtagtatgagttgaaggatagtttcggggtgtagtattcggtcgcggttgtcgcgttttcgtattcgtatttcgttttttattcgtatggttagtattagttcggggattcgtttcgttttaagaacgttattagggagagtattagtacgttgaaggtttggtttaacgagtatcgtaagaatttttattttattaagggcgagaagat

SEQ ID NO: 27862 - DNA, 825 bp, Artificial Sequence
  chemically treated genomic DNA (Homo sapiens) CpG-island No: 27862
atcttctcgcccttaataaaataaaaattcttacgatactcgttaaaccaaaccttcaacgtactaatactctccctaataacgttcttaaaacgaaacgaatccccgaactaatactaaccatacgaataaaaaacgaaatacgaatacgaaaacgcgacaaccgcgaccgaatactacaccccgaaactatccttcaactcatactacgcgccctatacgcacataaaaaaaaaaaaaacacgcgcgaaaaaaacgcgaataaaccccaaccatcgctacctcccccctcctaacctacacccctctaatccgacccccgcgcgctcaactcgccctacgccccaacgccaacccctccttccctaactccgcgaactcttaccaactacgaaaaaataaacaactccgcgacgtaaaacaaaaaaacgccgtaaccttaaacgacgacgaccgcaacgaccgcgacgtaaaacgccccgtacacgaacgaaaacacgttaaacaaaaaccccgaaacgttcaactccgaaactccgacacccaaaccgccccgaacccccgcgctaccgccgctaccgccaacgacccccgaacgctcgaacgaataaaacgaacgaatatattaatatcccaactaaaaaaaaaacataataacccgcgaaacacgaacgaaaaaaaaaaccgacccccgaaccgcccaactcaacgccgcccgcgaactccgacgcgcatcgaaaactaaaccgaacttaaaaccgcgctaccgcccgcgctacgctatactccgcgttcgcctattaatctactccgcgacgacgacga

SEQ ID NO: 27863 - DNA, 825 bp, Artificial Sequence
  chemically treated genomic DNA (Homo sapiens) CpG-island No: 27863
attttttcgtttttggtggggtaggggtttttgcggtgttcgttgagttaggtttttagcgtgttggtgttttttttggtggcgtttttgggacgggacgggttttcgaattggtattggttatacgggtagaaggcggggtgcgggtgcggaaacgcggtagtcgcggtcggatgttgtatttcggggttgttttttagtttatattgcgcgttttgtacgtatatggagaaggaagggatacgcgcggagggagcgcgagtgagttttagttatcgttgtttttttttttttggtttgtatttttttagttcggttttcgcgcgtttagttcgttttgcgttttagcgttaatttttttttttttggtttcgcgggtttttattagttgcgggaagatgggtagtttcgcggcgtagggtaggaaggcgtcgtagttttgggcggcggcggtcgtagcggtcgcggcgtagggcgtttcgtatacggacgagagtacgttggatagggatttcgaggcgtttagtttcgaggtttcggtatttaggtcgtttcgggttttcgcgttgtcgtcgttgtcgttagcggttttcgggcgttcggacgggtaaagcgggcggatgtattggtattttagttgggggaaggatatggtggttcgcggggtacggacggagaggggggtcgattttcgggtcgtttagtttagcgtcgttcgcgggtttcggcgcgtatcgggggttgggtcgggtttggggtcgcgttgtcgttcgcgttgcgttgtgtttcgcgttcgtttattgatttgtttcgcggcggcgacgg

SEQ ID NO: 27864 - DNA, 825 bp, Artificial Sequence
  chemically treated genomic DNA (Homo sapiens) CpG-island No: 27864
ccgtcgccgccgcgaaacaaatcaataaacgaacgcgaaacacaacgcaacgcgaacgacaacgcgaccccaaacccgacccaacccccgatacgcgccgaaacccgcgaacgacgctaaactaaacgacccgaaaatcgacccccctctccgtccgtaccccgcgaaccaccatatccttcccccaactaaaataccaatacatccgcccgctttacccgtccgaacgcccgaaaaccgctaacgacaacgacgacaacgcgaaaacccgaaacgacctaaataccgaaacctcgaaactaaacgcctcgaaatccctatccaacgtactctcgtccgtatacgaaacgccctacgccgcgaccgctacgaccgccgccgcccaaaactacgacgccttcctaccctacgccgcgaaactacccatcttcccgcaactaataaaaacccgcgaaaccaaaaaaaaaaaaattaacgctaaaacgcaaaacgaactaaacgcgcgaaaaccgaactaaaaaaatacaaaccaaaaaaaaaaaaacaacgataactaaaactcactcgcgctccctccgcgcgtatcccttccttctccatatacgtacaaaacgcgcaatataaactaaaaaacaaccccgaaatacaacatccgaccgcgactaccgcgtttccgcacccgcaccccgccttctacccgtataaccaataccaattcgaaaacccgtcccgtcccaaaaacgccaccaaaaaaaacaccaacacgctaaaaacctaactcaacgaacaccgcaaaaacccctaccccaccaaaaacgaaaaaat

SEQ ID NO: 27865 - DNA, 1082 bp, Artificial Sequence
  chemically treated genomic DNA (Homo sapiens) CpG-island No: 27865
acgcgcgtcggcgttttaagaaggagaataagatgatttgggcgtttcgtagtcgtattgacgaggagggaaacgtttatgggagcgagcgcgaggaggaagacgaagaggaggacgaggaggattgtaaacgcgagttagagttggaggaggaggagttcgggggggaggaggaggatattgggggcgagggtttggttgacgattacgaggacgaggagatcgatttggagaatttagacggcgcggttatcgagtttgatttgtttttggttggggcggcgcgtagggatggcgatttaagtttgggatttatttcggattttaaaaatagcgattcggaagatagttttgacggtttagaggatcggttattatcggttttgagtttggttttagcgttattattagtggtcgtggtttcgtcgtttttgtcgtcgtttttcgtgagtttggatttttgcgttttcgtattagttttcgttttcgttttgtagaagtttaagatttggtttttcgcggagattgttataagttcggataattcgcgtcgttcgtttttcggcgcgggggggtttttatcgggggtagcggtcgcgtttttcgttttgtagtttttttcggtcgtcgacgttgtagtcgtttatagattggttttagcgtcgttgggtaagttttcggtttggattaatcggtcgtttttaggtttatcgttcggttttcgtttgtattcgttttttttgttgggttttgttttttcgtatttgttgggatttttcggagtcgcgggttattcggttgtcgtcgtcgttttcgttcggttagcggagttcgaaggcggaataggtgattgttgagcgttgggcgcggagcgggggcgggttttgcgggtagtgtcggagttggtcgggaggggtagggttcggggggcgtagggcgcgcgtttttttttatttttgttttttgcggttttgggcgtcggtatcgagcgttttaaaggttttttttttttttttttcgttttttttagatcgttgtagtgttttggaagtggagaaaaagttatttaagatagtttttta

SEQ ID NO: 27866 - DNA, 1082 bp, Artificial Sequence
  chemically treated genomic DNA (Homo sapiens) CpG-island No: 27866
taaaaaactatcttaaataactttttctccacttccaaaacactacaacgatctaaaaaaaacgaaaaaaaaaaaaaaaaaacctttaaaacgctcgataccgacgcccaaaaccgcaaaaaacaaaaataaaaaaaaacgcgcgccctacgccccccgaaccctacccctcccgaccaactccgacactacccgcaaaacccgcccccgctccgcgcccaacgctcaacaatcacctattccgccttcgaactccgctaaccgaacgaaaacgacgacgacaaccgaataacccgcgactccgaaaaatcccaacaaatacgaaaaaacaaaacccaacaaaaaaaacgaatacaaacgaaaaccgaacgataaacctaaaaacgaccgattaatccaaaccgaaaacttacccaacgacgctaaaaccaatctataaacgactacaacgtcgacgaccgaaaaaaactacaaaacgaaaaacgcgaccgctacccccgataaaaacccccccgcgccgaaaaacgaacgacgcgaattatccgaacttataacaatctccgcgaaaaaccaaatcttaaacttctacaaaacgaaaacgaaaactaatacgaaaacgcaaaaatccaaactcacgaaaaacgacgacaaaaacgacgaaaccacgaccactaataataacgctaaaaccaaactcaaaaccgataataaccgatcctctaaaccgtcaaaactatcttccgaatcgctatttttaaaatccgaaataaatcccaaacttaaatcgccatccctacgcgccgccccaaccaaaaacaaatcaaactcgataaccgcgccgtctaaattctccaaatcgatctcctcgtcctcgtaatcgtcaaccaaaccctcgcccccaatatcctcctcctcccccccgaactcctcctcctccaactctaactcgcgtttacaatcctcctcgtcctcctcttcgtcttcctcctcgcgctcgctcccataaacgtttccctcctcgtcaatacgactacgaaacgcccaaatcatcttattctccttcttaaaacgccgacgcgcgt

SEQ ID NO: 27867 - DNA, 1082 bp, Artificial Sequence
  chemically treated genomic DNA (Homo sapiens) CpG-island No: 27867
tggaaagttgttttgagtaattttttttttatttttaaggtattatagcgatttaagggaagcgggggaagaaaaaggagggtttttagagcgttcggtgtcggcgtttagggtcgtagaaagtaggagtggagagggacgcgcgttttgcgtttttcgggttttgtttttttcggttagtttcggtattattcgtagagttcgttttcgtttcgcgtttagcgtttagtagttatttgtttcgttttcgggtttcgttggtcgagcgaaggcggcggcggtagtcgggtggttcgcggtttcgggaagttttagtaggtgcggaggggtagagtttagtagggagagcgggtgtaggcgggggtcgggcggtgggtttggaaacggtcggttggtttaagtcgggaatttgtttagcggcgttgagattagtttgtgagcggttgtagcgtcggcggtcggagagagttgtagggcggaaggcgcgatcgttgttttcggtggagattttttcgcgtcgggaggcgagcggcgcgggttgttcgggtttgtggtagttttcgcgagggattagattttgggtttttgtagggcggaggcgggggttggtgcgggagcgtaggggtttaggtttacggggggcgacggtagagacggcgaggttacggttattggtggtggcgttggagttagatttaggatcggtagtggtcggttttttaagtcgttagagttatttttcgagtcgttatttttggagttcgaaatgggttttaggtttaggtcgttatttttgcgcgtcgttttagttagggatagattaggttcggtggtcgcgtcgtttaagttttttaaatcgattttttcgttttcgtggtcgttagttaggttttcgtttttagtgttttttttttttttttcgagtttttttttttttagttttagttcgcgtttgtagtttttttcgttttttttttcgttttttttttcgcgttcgtttttataagcgttttttttttcgttagtgcggttgcgaggcgtttaagttattttatttttttttttgaggcgtcggcgcgcgt

SEQ ID NO: 27868 - DNA, 1082 bp, Artificial Sequence
  chemically treated genomic DNA (Homo sapiens) CpG-island No: 27868
acgcgcgccgacgcctcaaaaaaaaaaataaaataacttaaacgcctcgcaaccgcactaacgaaaaaaaaaacgcttataaaaacgaacgcgaaaaaaaaaacgaaaaaaaaaacgaaaaaaactacaaacgcgaactaaaactaaaaaaaaaaaaactcgaaaaaaaaaaaaaaaacactaaaaacgaaaacctaactaacgaccacgaaaacgaaaaaatcgatttaaaaaacttaaacgacgcgaccaccgaacctaatctatccctaactaaaacgacgcgcaaaaataacgacctaaacctaaaacccatttcgaactccaaaaataacgactcgaaaaataactctaacgacttaaaaaaccgaccactaccgatcctaaatctaactccaacgccaccaccaataaccgtaacctcgccgtctctaccgtcgccccccgtaaacctaaacccctacgctcccgcaccaacccccgcctccgccctacaaaaacccaaaatctaatccctcgcgaaaactaccacaaacccgaacaacccgcgccgctcgcctcccgacgcgaaaaaatctccaccgaaaacaacgatcgcgccttccgccctacaactctctccgaccgccgacgctacaaccgctcacaaactaatctcaacgccgctaaacaaattcccgacttaaaccaaccgaccgtttccaaacccaccgcccgacccccgcctacacccgctctccctactaaactctacccctccgcacctactaaaacttcccgaaaccgcgaaccacccgactaccgccgccgccttcgctcgaccaacgaaacccgaaaacgaaacaaataactactaaacgctaaacgcgaaacgaaaacgaactctacgaataataccgaaactaaccgaaaaaaacaaaacccgaaaaacgcaaaacgcgcgtccctctccactcctactttctacgaccctaaacgccgacaccgaacgctctaaaaaccctcctttttcttcccccgcttcccttaaatcgctataataccttaaaaataaaaaaaaaattactcaaaacaactttcca

SEQ ID NO: 27869 - DNA, 588 bp, Artificial Sequence
  chemically treated genomic DNA (Homo sapiens) CpG-island No: 27869
attatttcgcgcgtttcggggaggtataggaagcgcgtatatttttcgaagttacggaataagatacggtttaatattgtatattttcgaagttcggcggtagtagagcggagttcgataggattgggttatgcggatttagcggttagcgtcgcgttttgggagtttttttcgcgaagggggtgattaaggtgcggcggcgttttaggggcgagtggggaggggattgtgtcggtttttgcgttattttgcgggcgtatagagggttggcgaatcgttagtggatattcggtaaagtcgttttttagttggttcgtttttttagttttttttttagaggttaaagagacgttttttcggttttttagcgttcgttttttttgttaacggtgtttttggggtttaggtttttttttagttcgtaaatttagattgaggtttcgttttggttttgtttatagcgtttttagacgtggagttcgtttattttcgcggatttggatttgaggtcggaatattgaatgattttataaggagagtatttcgatattttaatagtttacgttttataagtttagttgtggtatt

SEQ ID NO: 27870 - DNA, 588 bp, Artificial Sequence
  chemically treated genomic DNA (Homo sapiens) CpG-island No: 27870
aataccacaactaaacttataaaacgtaaactattaaaatatcgaaatactctccttataaaatcattcaatattccgacctcaaatccaaatccgcgaaaataaacgaactccacgtctaaaaacgctataaacaaaaccaaaacgaaacctcaatctaaatttacgaactaaaaaaaaacctaaaccccaaaaacaccgttaacaaaaaaaacgaacgctaaaaaaccgaaaaaacgtctctttaacctctaaaaaaaaaactaaaaaaacgaaccaactaaaaaacgactttaccgaatatccactaacgattcgccaaccctctatacgcccgcaaaataacgcaaaaaccgacacaatcccctccccactcgcccctaaaacgccgccgcaccttaatcacccccttcgcgaaaaaaactcccaaaacgcgacgctaaccgctaaatccgcataacccaatcctatcgaactccgctctactaccgccgaacttcgaaaatatacaatattaaaccgtatcttattccgtaacttcgaaaaatatacgcgcttcctatacctccccgaaacgcgcgaaataat

SEQ ID NO: 27871 - DNA, 588 bp, Artificial Sequence
  chemically treated genomic DNA (Homo sapiens) CpG-island No: 27871
ggtgttatagttaagtttgtgaggcgtgagttgttgaggtgtcggagtgttttttttgtaaagttatttaatgtttcggttttaggtttaagttcgcgaggatgggcgggttttacgtttgggggcgttgtgagtagggttagagcgaaattttagtttgagtttacgaattgggaaggagtttgaattttagaaatatcgttaataaagagggcgaacgttagggagtcgaggagacgtttttttggtttttggggaaggggttggaggagcgagttagttgagaagcggttttgtcgggtgtttattagcggttcgttagttttttgtgcgttcgtagagtgacgtagaggtcgatatagttttttttttattcgtttttggggcgtcgtcgtattttgattatttttttcgcggagggaatttttaaggcgcggcgttggtcgttgggttcgtatggtttagttttgtcgggtttcgttttgttgtcgtcgagtttcgaaggtgtgtagtgttgagtcgtgttttgtttcgtggtttcgaggggtgtgcgcgttttttatattttttcggaacgcgcgagatagt

SEQ ID NO: 27872 - DNA, 588 bp, Artificial Sequence
  chemically treated genomic DNA (Homo sapiens) CpG-island No: 27872
actatctcgcgcgttccgaaaaaatataaaaaacgcgcacacccctcgaaaccacgaaacaaaacacgactcaacactacacaccttcgaaactcgacgacaacaaaacgaaacccgacaaaactaaaccatacgaacccaacgaccaacgccgcgccttaaaaattccctccgcgaaaaaaataatcaaaatacgacgacgccccaaaaacgaataaaaaaaaaactatatcgacctctacgtcactctacgaacgcacaaaaaactaacgaaccgctaataaacacccgacaaaaccgcttctcaactaactcgctcctccaaccccttccccaaaaaccaaaaaaacgtctcctcgactccctaacgttcgccctctttattaacgatatttctaaaattcaaactccttcccaattcgtaaactcaaactaaaatttcgctctaaccctactcacaacgcccccaaacgtaaaacccgcccatcctcgcgaacttaaacctaaaaccgaaacattaaataactttacaaaaaaaacactccgacacctcaacaactcacgcctcacaaacttaactataacacc

SEQ ID NO: 27873 - DNA, 561 bp, Artificial Sequence
  chemically treated genomic DNA (Homo sapiens) CpG-island No: 27873
agttacgtttcgttcggttttttcgaatatttttttcggggttttggggtagtaggaaaggggatgtgggaaggttaaggaggacggtttagggcgtcgaggggtaggaagtgcggggagtaggagtcgcgtagggggcgggtgggagagggggtggattagcgggcgaggggttgttaggagcgaagtttcgggggtggggtcggtcgtttggtagagggcgcggcgggggaggggagaggagtgcgttttggggaggcggcgagggggtttcgttaaagttgttttaaagttttcggttcggggagcggttttttagttagtagtttcgaggtttatttgcgtagtggtcgaagacggtgggtacgtattttttcgggaaggcgtcgttggtatagtttatgagtaggtacgttttgtttatcgtttcgtcgtcgattattacgtatttgagtattagcgcgtcgggttcgtgagttatgttgttgtcggtcggttttcgggtatggttttttcggagttttcgtttcggtttcgggtttagttttagttcgtttgggg

SEQ ID NO: 27874 - DNA, 561 bp, Artificial Sequence
  chemically treated genomic DNA (Homo sapiens) CpG-island No: 27874
ccccaaacgaactaaaactaaacccgaaaccgaaacgaaaactccgaaaaaaccatacccgaaaaccgaccgacaacaacataactcacgaacccgacgcgctaatactcaaatacgtaataatcgacgacgaaacgataaacaaaacgtacctactcataaactataccaacgacgccttcccgaaaaaatacgtacccaccgtcttcgaccactacgcaaataaacctcgaaactactaactaaaaaaccgctccccgaaccgaaaactttaaaacaactttaacgaaaccccctcgccgcctccccaaaacgcactcctctcccctcccccgccgcgccctctaccaaacgaccgaccccacccccgaaacttcgctcctaacaacccctcgcccgctaatccaccccctctcccacccgccccctacgcgactcctactccccgcacttcctacccctcgacgccctaaaccgtcctccttaaccttcccacatcccctttcctactaccccaaaaccccgaaaaaaatattcgaaaaaaccgaacgaaacgtaact

SEQ ID NO: 27875 - DNA, 561 bp, Artificial Sequence
  chemically treated genomic DNA (Homo sapiens) CpG-island No: 27875
ttttaggcgggttggggttgagttcggggtcggggcgggggtttcggggggattatgttcggaggtcggtcggtagtagtatggtttacgggttcggcgcgttgatgtttaagtgcgtggtggtcggcgacggggcggtgggtaagacgtgtttatttatgagttatgttaacgacgttttttcggaggagtacgtgtttatcgttttcgattattacgtaggtaagtttcggaattgttgattaaggggtcgtttttcgggtcgggaattttggagtaattttggcggagttttttcgtcgtttttttagagcgtattttttttttttttttcgtcgcgttttttgttaggcggtcggttttattttcgaagtttcgtttttggtaatttttcgttcgttgatttatttttttttttattcgttttttacgcggtttttgtttttcgtattttttatttttcggcgttttgggtcgttttttttgatttttttatatttttttttttattgttttaaggtttcgggggaaatattcgaggggatcgagcgagacgtggtt

SEQ ID NO: 27876 - DNA, 561 bp, Artificial Sequence
  chemically treated genomic DNA (Homo sapiens) CpG-island No: 27876
aaccacgtctcgctcgatcccctcgaatatttcccccgaaaccttaaaacaataaaaaaaaaaatataaaaaaatcaaaaaaaacgacccaaaacgccgaaaaataaaaaatacgaaaaacaaaaaccgcgtaaaaaacgaataaaaaaaaaaataaatcaacgaacgaaaaattaccaaaaacgaaacttcgaaaataaaaccgaccgcctaacaaaaaacgcgacgaaaaaaaaaaaaaaaatacgctctaaaaaaacgacgaaaaaactccgccaaaattactccaaaattcccgacccgaaaaacgaccccttaatcaacaattccgaaacttacctacgtaataatcgaaaacgataaacacgtactcctccgaaaaaacgtcgttaacataactcataaataaacacgtcttacccaccgccccgtcgccgaccaccacgcacttaaacatcaacgcgccgaacccgtaaaccatactactaccgaccgacctccgaacataatccccccgaaacccccgccccgaccccgaactcaaccccaacccgcctaaaa

SEQ ID NO: 27877 - DNA, 711 bp, Artificial Sequence
  chemically treated genomic DNA (Homo sapiens) CpG-island No: 27877
gttcgtcgtcgtcgtcgtcgtttcgcgtcgtaggtcgttttttcggttttatgtagcggtttttttcgtaggaggggagggggcggcgggttcgggcgttgttcgtcgcggtcgtcgtcggattttcgtttcggtttcggtcgtcgcgttcgttcgttgttttcgttattcggcgttcgcgtttttttttcggttcggtttttttaggaggattcgtcggattataagatcggtcggtttcgggggagacggtaattttggggagggcggcggaggggaggggttaggcggtttttttcgtttcgcgttaattcgggtttttttcgcggcgtttcggaggagggcgggtttaggcgtttttttagacgcggtcgcgttacgcgttattcgtttgttgtcgtcggcggtttgtcggcgtattcgagttttattttttgcgagggtcgcgcggaggggcgcgtaggaggaggaggagtcgaggatcgcggaggggaggaggggagtcgtttgggagtcgagggtttttcgcgtaagtgttcgtagcgttcggaagcgtttaaaggtttcgatgttgggagaagacgtggaggtttttcggggaattacgacgatttttacgatgacgtaatagttatgttaaattatatatgtatattttatttttattcggaaggttagagttattttttcggtttttaagtgtataacgga

SEQ ID NO: 27878 - DNA, 711 bp, Artificial Sequence
  chemically treated genomic DNA (Homo sapiens) CpG-island No: 27878
tccgttatacacttaaaaaccgaaaaaataactctaaccttccgaataaaaataaaatatacatatataatttaacataactattacgtcatcgtaaaaatcgtcgtaattccccgaaaaacctccacgtcttctcccaacatcgaaacctttaaacgcttccgaacgctacgaacacttacgcgaaaaaccctcgactcccaaacgactcccctcctcccctccgcgatcctcgactcctcctcctcctacgcgcccctccgcgcgaccctcgcaaaaaataaaactcgaatacgccgacaaaccgccgacgacaacaaacgaataacgcgtaacgcgaccgcgtctaaaaaaacgcctaaacccgccctcctccgaaacgccgcgaaaaaaacccgaattaacgcgaaacgaaaaaaaccgcctaacccctcccctccgccgccctccccaaaattaccgtctcccccgaaaccgaccgatcttataatccgacgaatcctcctaaaaaaaccgaaccgaaaaaaaaacgcgaacgccgaataacgaaaacaacgaacgaacgcgacgaccgaaaccgaaacgaaaatccgacgacgaccgcgacgaacaacgcccgaacccgccgccccctcccctcctacgaaaaaaaccgctacataaaaccgaaaaaacgacctacgacgcgaaacgacgacgacgacgacgaac

SEQ ID NO: 27879 - DNA, 711 bp, Artificial Sequence
  chemically treated genomic DNA (Homo sapiens) CpG-island No: 27879
ttcgttgtgtatttagaggtcgagaggatggttttggtttttcgggtggaggtgaaatatgtatgtataatttggtatgattattgcgttatcgtggaggtcgtcgtggtttttcgagaggtttttacgtttttttttagtatcggggtttttggacgttttcgggcgttgcgggtatttgcgcgaggagttttcggtttttaggcgattttttttttttttttcgcggttttcggttttttttttttttgcgcgttttttcgcgcggttttcgtagggagtggggttcgggtgcgtcggtaggtcgtcggcggtagtaggcgggtggcgcgtggcgcggtcgcgtttggggaggcgtttgggttcgttttttttcggggcgtcgcgggaggggttcgggttggcgcggggcggggagagtcgtttggtttttttttttcgtcgttttttttaaagttgtcgtttttttcggggtcggtcggttttatgattcggcggatttttttggggaggtcgggtcggggagagggcgcgggcgtcgagtggcgggggtagcgggcgggcgcggcgatcggggtcggggcggggattcggcggcgatcgcggcgggtagcgttcgggttcgtcgttttttttttttttgcgaggggagtcgttgtatggggtcgggggggcggtttgcggcgcggagcggcggcgacggcggcggat

SEQ ID NO: 27880 - DNA, 711 bp, Artificial Sequence
  chemically treated genomic DNA (Homo sapiens) CpG-island No: 27880
atccgccgccgtcgccgccgctccgcgccgcaaaccgcccccccgaccccatacaacgactcccctcgcaaaaaaaaaaaaaacgacgaacccgaacgctacccgccgcgatcgccgccgaatccccgccccgaccccgatcgccgcgcccgcccgctacccccgccactcgacgcccgcgccctctccccgacccgacctccccaaaaaaatccgccgaatcataaaaccgaccgaccccgaaaaaaacgacaactttaaaaaaaacgacgaaaaaaaaaaaccaaacgactctccccgccccgcgccaacccgaacccctcccgcgacgccccgaaaaaaaacgaacccaaacgcctccccaaacgcgaccgcgccacgcgccacccgcctactaccgccgacgacctaccgacgcacccgaaccccactccctacgaaaaccgcgcgaaaaaacgcgcaaaaaaaaaaaaaaccgaaaaccgcgaaaaaaaaaaaaaaaatcgcctaaaaaccgaaaactcctcgcgcaaatacccgcaacgcccgaaaacgtccaaaaaccccgatactaaaaaaaaacgtaaaaacctctcgaaaaaccacgacgacctccacgataacgcaataatcataccaaattatacatacatatttcacctccacccgaaaaaccaaaaccatcctctcgacctctaaatacacaacgaa

SEQ ID NO: 27881 - DNA, 508 bp, Artificial Sequence
  chemically treated genomic DNA (Homo sapiens) CpG-island No: 27881
taattatcgtgtaagatttttgtttttagttgtatgtattgaggcggcgggaagaagcgtcgagggaaggtttagatcgtaatgttttttagtttgtagttattttcgggggttgtagttttcgtattcgcgacgttcggtttttagcgggtgtaggcgtagttttttcgtttttttttcgttcgcggttgcgttcggagagcgtttagttgatttaggggcggggtcggggcggggatttaaagtttcggttattttcgagggggtgagtggttttatcgtcggttttttgtagcgttgtttttcgatttttttatatttcggtggcgcgggattttaagatgcgtttttatttgtttttgttgttcgcgttgtgcgtgtaggtattatcgtcgcggagtttagttatagtttgcgtggtaattggagtatttgtaatgggaacggttcgttggagttgttcggggcggtttttggttgcgtgtatagcgttttgttttagtagggt

SEQ ID NO: 27882 - DNA, 508 bp, Artificial Sequence
  chemically treated genomic DNA (Homo sapiens) CpG-island No: 27882
accctactaaaacaaaacgctatacacgcaaccaaaaaccgccccgaacaactccaacgaaccgttcccattacaaatactccaattaccacgcaaactataactaaactccgcgacgataatacctacacgcacaacgcgaacaacaaaaacaaataaaaacgcatcttaaaatcccgcgccaccgaaatataaaaaaatcgaaaaacaacgctacaaaaaaccgacgataaaaccactcaccccctcgaaaataaccgaaactttaaatccccgccccgaccccgcccctaaatcaactaaacgctctccgaacgcaaccgcgaacgaaaaaaaaacgaaaaaactacgcctacacccgctaaaaaccgaacgtcgcgaatacgaaaactacaacccccgaaaataactacaaactaaaaaacattacgatctaaaccttccctcgacgcttcttcccgccgcctcaatacatacaactaaaaacaaaaatcttacacgataatta

SEQ ID NO: 27883 - DNA, 508 bp, Artificial Sequence
  chemically treated genomic DNA (Homo sapiens) CpG-island No: 27883
gttttgttggaataaggcgttgtgtacgtagttagggatcgtttcgggtagttttagcgagtcgtttttattgtagatgttttagttgttacgtaagttgtaattgagtttcgcggcggtggtgtttgtacgtatagcgcgagtagtaggagtaggtggaggcgtattttgagatttcgcgttatcgagatgtggagagatcgaaaggtagcgttgtaagggatcggcggtgaagttatttattttttcggaagtagtcgaggttttaggttttcgtttcggtttcgtttttaggttagttgagcgtttttcgggcgtagtcgcgggcgggaggggaacgaggaggttgcgtttgtattcgttgaaagtcgggcgtcgcgggtgcgggagttgtagttttcgagaatagttataggttggggggtattgcggtttgagttttttttcggcgttttttttcgtcgttttagtatatataattggaggtaagaattttgtacggtaattg

SEQ ID NO: 27884 - DNA, 508 bp, Artificial Sequence
  chemically treated genomic DNA (Homo sapiens) CpG-island No: 27884
caattaccgtacaaaattcttacctccaattatatatactaaaacgacgaaaaaaaacgccgaaaaaaaactcaaaccgcaataccccccaacctataactattctcgaaaactacaactcccgcacccgcgacgcccgactttcaacgaatacaaacgcaacctcctcgttcccctcccgcccgcgactacgcccgaaaaacgctcaactaacctaaaaacgaaaccgaaacgaaaacctaaaacctcgactacttccgaaaaaataaataacttcaccgccgatcccttacaacgctacctttcgatctctccacatctcgataacgcgaaatctcaaaatacgcctccacctactcctactactcgcgctatacgtacaaacaccaccgccgcgaaactcaattacaacttacgtaacaactaaaacatctacaataaaaacgactcgctaaaactacccgaaacgatccctaactacgtacacaacgccttattccaacaaaac

SEQ ID NO: 27885 - DNA, 617 bp, Artificial Sequence
  chemically treated genomic DNA (Homo sapiens) CpG-island No: 27885
tttcggtttttaaaaggtaaggtgtacgatttatttatttattcggttgtagggatattatttaaaacgggtattatcgttatcgaatcgcgggcgttttttgtggggtcgttcggagatcggttttttaaagttaacgacgatttgggatagttagcgcggtttttagtcgtcgtcgtcggcgatttgagagttcgttcgggtttgagtgttttttacgtttacgattattatcgaattcgggtttcgtttttgtcggtttttaggaaaataaagatagaggagagtcggttcgtttgtgtcgtagggtaaacgtcgttttgaagtatcgataatattggtaatatttatagtcgttttgaggggacgggcgtagaggagagttgtcgtttttcggttgttgggttcgggtgtcgcgcggcgcggtcgaggacgcgagtttaagtggcggtagcggcggttgcggcggtggcggaagtggagtggggaagagggggtggttgttagtgtttggcgtcggcggagggagttatttttgtagttgtattttcggtcggtattttgttttgagagggagagacggaacgagagagagatatatatagggtttttttttt

SEQ ID NO: 27886 - DNA, 617 bp, Artificial Sequence
  chemically treated genomic DNA (Homo sapiens) CpG-island No: 27886
aaaaaaaaaaccctatatatatctctctctcgttccgtctctccctctcaaaacaaaataccgaccgaaaatacaactacaaaaataactccctccgccgacgccaaacactaacaaccaccccctcttccccactccacttccgccaccgccgcaaccgccgctaccgccacttaaactcgcgtcctcgaccgcgccgcgcgacacccgaacccaacaaccgaaaaacgacaactctcctctacgcccgtcccctcaaaacgactataaatattaccaatattatcgatacttcaaaacgacgtttaccctacgacacaaacgaaccgactctcctctatctttattttcctaaaaaccgacaaaaacgaaacccgaattcgataataatcgtaaacgtaaaaaacactcaaacccgaacgaactctcaaatcgccgacgacgacgactaaaaaccgcgctaactatcccaaatcgtcgttaactttaaaaaaccgatctccgaacgaccccacaaaaaacgcccgcgattcgataacgataatacccgttttaaataatatccctacaaccgaataaataaataaatcgtacaccttaccttttaaaaaccgaaa

SEQ ID NO: 27887 - DNA, 617 bp, Artificial Sequence
  chemically treated genomic DNA (Homo sapiens) CpG-island No: 27887
ggggaaggagttttgtgtgtgtttttttttcgtttcgttttttttttttagaataaaatgtcgatcggaagtgtagttgtaggaatgatttttttcgtcggcgttaaatattaataattatttttttttttttattttattttcgttatcgtcgtagtcgtcgttgtcgttatttgggttcgcgttttcggtcgcgtcgcgcggtattcgggtttagtagtcgggaggcggtagtttttttttacgttcgtttttttagggcggttgtggatgttgttagtattgtcgatgttttagagcgacgtttgttttgcgatataggcgggtcggtttttttttgtttttatttttttggaggtcgataggagcggggttcgagttcggtggtggtcgtgagcgtggggggtatttaggttcggacgggtttttaggtcgtcgacggcggcggttggaggtcgcgttggttgttttaggtcgtcgttagttttagggagtcgattttcgggcggttttatagaggacgttcgcgattcgatggcgatgatgttcgttttaaatggtgtttttgtagtcgggtggatggatggatcgtatattttgttttttgagagtcggga

SEQ ID NO: 27888 - DNA, 617 bp, Artificial Sequence
  chemically treated genomic DNA (Homo sapiens) CpG-island No: 27888
tcccgactctcaaaaaacaaaatatacgatccatccatccacccgactacaaaaacaccatttaaaacgaacatcatcgccatcgaatcgcgaacgtcctctataaaaccgcccgaaaatcgactccctaaaactaacgacgacctaaaacaaccaacgcgacctccaaccgccgccgtcgacgacctaaaaacccgtccgaacctaaataccccccacgctcacgaccaccaccgaactcgaaccccgctcctatcgacctccaaaaaaataaaaacaaaaaaaaaccgacccgcctatatcgcaaaacaaacgtcgctctaaaacatcgacaatactaacaacatccacaaccgccctaaaaaaacgaacgtaaaaaaaaactaccgcctcccgactactaaacccgaataccgcgcgacgcgaccgaaaacgcgaacccaaataacgacaacgacgactacgacgataacgaaaataaaataaaaaaaaaaaaataattattaatatttaacgccgacgaaaaaaatcattcctacaactacacttccgatcgacattttattctaaaaaaaaaaaacgaaacgaaaaaaaaacacacacaaaactccttcccc

SEQ ID NO: 27889 - DNA, 573 bp, Artificial Sequence
  chemically treated genomic DNA (Homo sapiens) CpG-island No: 27889
gacggaagaggagtcgtagttattttttttttcggttcggattatagtttttcgttatagcggtttcggtttttttttggatttagacgtcgattcgtttaggtaaatttttgttttttatttcggcggcggcggcggcggcgtcggcgttaggtttttagcgtttttttttttcgttttttttttcgtcgtttttttagcggttttaggttttttttataggcgagtttagagttcgtttttttttggtggtagtcgttttgggtagcggtggttttgtattttttttcggtcggtttcggtggcggggattgggtttttgttgggcggtcggggaggcgtaggttcggcggagagtgtaggtcgcgggttagcggaatttatttgagttcggggattaggagagtttcgggttgagcggagcgattgttggtcggtgataggtttcgttcgggagtggagtcgtagttagtggggaggcggaaataatataattaatagtaaatgtgttttgatcgtttttatatttataattttttcggttcgggagtggggaacgttttagtgaaataa

SEQ ID NO: 27890 - DNA, 573 bp, Artificial Sequence
  chemically treated genomic DNA (Homo sapiens) CpG-island No: 27890
ttatttcactaaaacgttccccactcccgaaccgaaaaaattataaatataaaaacgatcaaaacacatttactattaattatattatttccgcctccccactaactacgactccactcccgaacgaaacctatcaccgaccaacaatcgctccgctcaacccgaaactctcctaatccccgaactcaaataaattccgctaacccgcgacctacactctccgccgaacctacgcctccccgaccgcccaacaaaaacccaatccccgccaccgaaaccgaccgaaaaaaaatacaaaaccaccgctacccaaaacgactaccaccaaaaaaaaacgaactctaaactcgcctataaaaaaaacctaaaaccgctaaaaaaacgacgaaaaaaaaaacgaaaaaaaaaaacgctaaaaacctaacgccgacgccgccgccgccgccgccgaaataaaaaacaaaaatttacctaaacgaatcgacgtctaaatccaaaaaaaaaccgaaaccgctataacgaaaaactataatccgaaccgaaaaaaaaaataactacgactcctcttccgtc

SEQ ID NO: 27891 - DNA, 573 bp, Artificial Sequence
  chemically treated genomic DNA (Homo sapiens) CpG-island No: 27891
ttgttttattgggacgttttttattttcggatcgggaaagttgtaaatatggggacgattagggtatatttgttgttagttgtattgttttcgtttttttattagttacggttttattttcgggcgaggtttgttatcgattagtagtcgtttcgtttagttcggagtttttttaattttcgagtttaagtagatttcgttggttcgcggtttgtatttttcgtcgggtttacgttttttcggtcgtttagtaggagtttagttttcgttatcggagtcggtcgggagagggtataaaattatcgttatttaaggcggttgttattagagaggagcgaattttagattcgtttgtggaagagatttggggtcgttaaggaaacggcggggaggggagcgaggaggagagacgttgaggatttggcgtcggcgtcgtcgtcgtcgtcgtcgaaataaagagtaggaatttatttgggcgaatcggcgtttgaatttaaggggaggtcgaggtcgttgtggcgagagattataattcgggtcgggagggggggtggttacggtttttttttcgtt

SEQ ID NO: 27892 - DNA, 573 bp, Artificial Sequence
  chemically treated genomic DNA (Homo sapiens) CpG-island No: 27892
aacgaaaaaaaaaccgtaaccaccccccctcccgacccgaattataatctctcgccacaacgacctcgacctccccttaaattcaaacgccgattcgcccaaataaattcctactctttatttcgacgacgacgacgacgacgccgacgccaaatcctcaacgtctctcctcctcgctcccctccccgccgtttccttaacgaccccaaatctcttccacaaacgaatctaaaattcgctcctctctaataacaaccgccttaaataacgataattttataccctctcccgaccgactccgataacgaaaactaaactcctactaaacgaccgaaaaaacgtaaacccgacgaaaaatacaaaccgcgaaccaacgaaatctacttaaactcgaaaattaaaaaaactccgaactaaacgaaacgactactaatcgataacaaacctcgcccgaaaataaaaccgtaactaataaaaaaacgaaaacaatacaactaacaacaaatataccctaatcgtccccatatttacaactttcccgatccgaaaataaaaaacgtcccaataaaacaa

SEQ ID NO: 27893 - DNA, 815 bp, Artificial Sequence
  chemically treated genomic DNA (Homo sapiens) CpG-island No: 27893
ttcgatagcgattgcgatatagttgtttcggtttttgtttttagtttagggcgttcgggcgttacgggttttattcgagtggttttgcgttttagttagtttttaaatttagttagttagcgttttcgttttcggatttcggcgaagttggttcgcgttttagtttttgttttgggatttttgtcgagttttcgttttttacgcgtcgtaaatttcgtattcgcgcgtattaaattttttgttcgtgcgtttttaatcgggttttcgcgttttttaatttgggttttttcgtgattttattttcgcgttttgagttttcgtatttcgcgtttttcgaattttgttttcgcgtttttcgaatttagttttcgcgttttagttttagatttttgtgttttttaagtttcgtttttgcgttcggagcgcgaaagttcgcgtcgggttcgaaataaagaggatcgcggcgcgtggtcgcgtttttttttttttcggttttagtatttgggggagtttgaggcgcggttcggtagggcgatggtcgtaacgaggttgggtttcgagtagcgcgcgggcgggttcgttttttttggttggttgtcggcgttcgcggtagggttttttcgaggcggcgcgggtaatcgttacggtcggttttcgcgttcgcgtttcgagtttggcgggttatttggttttattattttaataatgtagcgcgtttttaggcgttttttatcggggtttttcgttttgtcgaggtgcgttttgggattttttttcgttggtcgtagagaggatttggaattattagatttatt

SEQ ID NO: 27894 - DNA, 815 bp, Artificial Sequence
  chemically treated genomic DNA (Homo sapiens) CpG-island No: 27894
aataaatctaataattccaaatcctctctacgaccaacgaaaaaaaatcccaaaacgcacctcgacaaaacgaaaaaccccgataaaaaacgcctaaaaacgcgctacattattaaaataataaaaccaaataacccgccaaactcgaaacgcgaacgcgaaaaccgaccgtaacgattacccgcgccgcctcgaaaaaaccctaccgcgaacgccgacaaccaaccaaaaaaaacgaacccgcccgcgcgctactcgaaacccaacctcgttacgaccatcgccctaccgaaccgcgcctcaaactcccccaaatactaaaaccgaaaaaaaaaaaaacgcgaccacgcgccgcgatcctctttatttcgaacccgacgcgaactttcgcgctccgaacgcaaaaacgaaacttaaaaaacacaaaaatctaaaactaaaacgcgaaaactaaattcgaaaaacgcgaaaacaaaattcgaaaaacgcgaaatacgaaaactcaaaacgcgaaaataaaatcacgaaaaaacccaaattaaaaaacgcgaaaacccgattaaaaacgcacgaacaaaaaatttaatacgcgcgaatacgaaatttacgacgcgtaaaaaacgaaaactcgacaaaaatcccaaaacaaaaactaaaacgcgaaccaacttcgccgaaatccgaaaacgaaaacgctaactaactaaatttaaaaactaactaaaacgcaaaaccactcgaataaaacccgtaacgcccgaacgccctaaactaaaaacaaaaaccgaaacaactatatcgcaatcgctatcgaa

SEQ ID NO: 27895 - DNA, 815 bp, Artificial Sequence
  chemically treated genomic DNA (Homo sapiens) CpG-island No: 27895
aatgggtttgataattttaggttttttttgcggttagcgaagggaggttttagggcgtatttcggtagggcgggggatttcggtgaagggcgtttggaggcgcgttgtattgttagggtgatgaggttaggtgattcgttaggttcggggcgcgggcgcgggggtcggtcgtggcgattgttcgcgtcgtttcgagggggttttgtcgcgggcgtcggtagttagttaggagggacgggttcgttcgcgcgttattcggagtttagtttcgttgcggttatcgttttgtcggatcgcgttttaggtttttttaggtattggggtcggggaaggaggaaacgcggttacgcgtcgcggttttttttgtttcgggttcggcgcgggttttcgcgtttcgggcgtaggaacgaggtttggggagtatagagatttggagttggggcgcggggattgagttcggggagcgcggagatagagttcggggagcgcggggtacgggagtttagggcgcggggatggggttacgggagaatttaggttagggagcgcggggattcggttgggggcgtacgggtaaggggtttggtgcgcgcgggtacggggtttgcggcgcgtggggggcgggggttcggtaggagttttaggataggggttggggcgcgggttagtttcgtcggagttcggggacgggggcgttgattggttgggtttggggattggttggggcgtaggattattcgagtgggattcgtggcgttcgggcgttttggattgagggtagagatcggagtagttatgtcgtagtcgttgtcggg

SEQ ID NO: 27896 - DNA, 815 bp, Artificial Sequence
  chemically treated genomic DNA (Homo sapiens) CpG-island No: 27896
cccgacaacgactacgacataactactccgatctctaccctcaatccaaaacgcccgaacgccacgaatcccactcgaataatcctacgccccaaccaatccccaaacccaaccaatcaacgcccccgtccccgaactccgacgaaactaacccgcgccccaacccctatcctaaaactcctaccgaacccccgccccccacgcgccgcaaaccccgtacccgcgcgcaccaaaccccttacccgtacgcccccaaccgaatccccgcgctccctaacctaaattctcccgtaaccccatccccgcgccctaaactcccgtaccccgcgctccccgaactctatctccgcgctccccgaactcaatccccgcgccccaactccaaatctctatactccccaaacctcgttcctacgcccgaaacgcgaaaacccgcgccgaacccgaaacaaaaaaaaccgcgacgcgtaaccgcgtttcctccttccccgaccccaatacctaaaaaaacctaaaacgcgatccgacaaaacgataaccgcaacgaaactaaactccgaataacgcgcgaacgaacccgtccctcctaactaactaccgacgcccgcgacaaaaccccctcgaaacgacgcgaacaatcgccacgaccgacccccgcgcccgcgccccgaacctaacgaatcacctaacctcatcaccctaacaatacaacgcgcctccaaacgcccttcaccgaaatcccccgccctaccgaaatacgccctaaaacctcccttcgctaaccgcaaaaaaaacctaaaattatcaaacccatt

SEQ ID NO: 27897 - DNA, 1197 bp, Artificial Sequence
  chemically treated genomic DNA (Homo sapiens) CpG-island No: 27897
ggaatttaattaagtgttattgagagggaaaattttattcgagattcgcggatttcgggatttttcggtgtttacgttttttttttttgtcggtttttttcgcgcgcgtgcgcgatcgggttcgtttcgcggtggttatggtaatcggtcgtttcgtttcggttattcgcgagcgcggcgtttcgcgatttatttcgatttttaattttcggtagttcgcgtttttttaaattttggattttcggcgtttttttcgtatttttattggttcgcgcgggtcgcgttagcgagtttacgtttattttcgtcgtcgggattatagagggggttttcgttcgttaagtttcgtttttttttatttgagtcgttttttattggtttcgtagtattcggtcgtttcgtttcgttcgttttttattggtttagatgcgttcggggaatttagggcgcgcgaaatcgggttcgggcgcgataattgaatcgcggggcgttcgttaggcgcggagtttgatatttttttcggcggttcgttaggtttttttttattcggcgcgttcgattttcgtcgggtttcggggacgtagcgttggtttcggttttagtcggatgtgtgtcggggaacgattttcgagggttaggtggaaggggaggttttggatttcgggatagagtgcgggatatgcgtgcgttcgggttggtcgcgcgggaaagttttgtaaagttttcgagtttcgttgcgcggttcggttggtatttcgattcggttcgttcgtttattttttcggtcgtcgcgaatagtttgtttgtttgcgcgcgtggttcggttggggatggcgatgaaatcgcgtgcgtggttcggatttcgcgcggatttgcgtgcgattcggagcgttcgttcggtaaacgttgttcgtcgcgttgttagttgttttgatttttttttcgcgaaaattcggtatttgggagttgcggggtcgtaggaggcgtgtcgggggcgggcgtttgttttttgattggtcgacgtagtggcgggaagcgagaaagagggtggggggcgttttcgtttttgtttacggcgttttcgtttagtgggttacggtttcgtttagttttgcgcgttttgttgggcgcgtttagcgtgtaaaggggttgcgtggtagggtttggttatttttcgtacgtggatattttaggagt

SEQ ID NO: 27898 - DNA, 1197 bp, Artificial Sequence
  chemically treated genomic DNA (Homo sapiens) CpG-island No: 27898
actcctaaaatatccacgtacgaaaaataaccaaaccctaccacgcaacccctttacacgctaaacgcgcccaacaaaacgcgcaaaactaaacgaaaccgtaacccactaaacgaaaacgccgtaaacaaaaacgaaaacgccccccaccctctttctcgcttcccgccactacgtcgaccaatcaaaaaacaaacgcccgcccccgacacgcctcctacgaccccgcaactcccaaataccgaattttcgcgaaaaaaaaatcaaaacaactaacaacgcgacgaacaacgtttaccgaacgaacgctccgaatcgcacgcaaatccgcgcgaaatccgaaccacgcacgcgatttcatcgccatccccaaccgaaccacgcgcgcaaacaaacaaactattcgcgacgaccgaaaaaataaacgaacgaaccgaatcgaaataccaaccgaaccgcgcaacgaaactcgaaaactttacaaaactttcccgcgcgaccaacccgaacgcacgcatatcccgcactctatcccgaaatccaaaacctccccttccacctaaccctcgaaaatcgttccccgacacacatccgactaaaaccgaaaccaacgctacgtccccgaaacccgacgaaaatcgaacgcgccgaataaaaaaaaacctaacgaaccgccgaaaaaaatatcaaactccgcgcctaacgaacgccccgcgattcaattatcgcgcccgaacccgatttcgcgcgccctaaattccccgaacgcatctaaaccaataaaaaacgaacgaaacgaaacgaccgaatactacgaaaccaataaaaaacgactcaaataaaaaaaaacgaaacttaacgaacgaaaaccccctctataatcccgacgacgaaaataaacgtaaactcgctaacgcgacccgcgcgaaccaataaaaatacgaaaaaaacgccgaaaatccaaaatttaaaaaaacgcgaactaccgaaaattaaaaatcgaaataaatcgcgaaacgccgcgctcgcgaataaccgaaacgaaacgaccgattaccataaccaccgcgaaacgaacccgatcgcgcacgcgcgcgaaaaaaaccgacaaaaaaaaaaaacgtaaacaccgaaaaatcccgaaatccgcgaatctcgaataaaattttccctctcaataacacttaattaaattcc

SEQ ID NO: 27899 - DNA, 1197 bp, Artificial Sequence
  chemically treated genomic DNA (Homo sapiens) CpG-island No: 27899
gtttttggggtgtttacgtgcggggggtgattaggttttgttacgtagtttttttgtacgttgggcgcgtttagtagagcgcgtagggttgggcggagtcgtggtttattaggcggaggcgtcgtggatagaggcgggggcgttttttattttttttttcgtttttcgttattgcgtcggttaattaggaggtaggcgttcgttttcggtacgttttttgcggtttcgtaatttttaaatgtcgagttttcgcgggaaaaaaattagagtagttggtagcgcggcgggtagcgtttgtcgagcgggcgtttcgggtcgtacgtaagttcgcgcggggttcgggttacgtacgcggttttatcgttatttttagtcgggttacgcgcgtaggtagataagttgttcgcggcgatcggagaggtgagcgggcgggtcgggtcggggtgttagtcgggtcgcgtaacggggttcgggaattttgtaaaattttttcgcgcggttagttcgggcgtacgtatgtttcgtattttgtttcgggatttagggtttttttttttatttaattttcgggaatcgtttttcggtatatattcggttggagtcgggattagcgttgcgttttcggagttcggcgggggtcgagcgcgtcgggtgggggagggtttggcgagtcgtcggggaggatgttaggtttcgcgtttggcgggcgtttcgcgatttaattgtcgcgttcgagttcgatttcgcgcgttttgagtttttcgggcgtatttgggttaatggggagcgagcggggcggggcggtcgggtgttgcggagttaataagaggcggtttaagtgaaggggggcgggatttgacgagcgggggttttttttgtagtttcggcggcgggggtgggcgtgggttcgttggcgcgattcgcgcgggttagtgggagtgcgggagggacgtcgagggtttagggtttggaggggcgcgagttgtcgggggttggaggtcgaggtgagtcgcggggcgtcgcgttcgcgggtggtcgggacggggcggtcggttattatggttatcgcggggcgggttcggtcgcgtacgcgcgcggggggggtcggtaaggagggggggcgtgggtatcgaggggtttcggggttcgcggatttcgggtggggtttttttttttagtggtatttggttgagtttt

SEQ ID NO: 27900 - DNA, 1197 bp, Artificial Sequence
  chemically treated genomic DNA (Homo sapiens) CpG-island No: 27900
aaaactcaaccaaataccactaaaaaaaaaaaccccacccgaaatccgcgaaccccgaaacccctcgatacccacgccccccctccttaccgaccccccccgcgcgcgtacgcgaccgaacccgccccgcgataaccataataaccgaccgccccgtcccgaccacccgcgaacgcgacgccccgcgactcacctcgacctccaacccccgacaactcgcgcccctccaaaccctaaaccctcgacgtccctcccgcactcccactaacccgcgcgaatcgcgccaacgaacccacgcccacccccgccgccgaaactacaaaaaaaacccccgctcgtcaaatcccgccccccttcacttaaaccgcctcttattaactccgcaacacccgaccgccccgccccgctcgctccccattaacccaaatacgcccgaaaaactcaaaacgcgcgaaatcgaactcgaacgcgacaattaaatcgcgaaacgcccgccaaacgcgaaacctaacatcctccccgacgactcgccaaaccctcccccacccgacgcgctcgacccccgccgaactccgaaaacgcaacgctaatcccgactccaaccgaatatataccgaaaaacgattcccgaaaattaaataaaaaaaaaaaccctaaatcccgaaacaaaatacgaaacatacgtacgcccgaactaaccgcgcgaaaaaattttacaaaattcccgaaccccgttacgcgacccgactaacaccccgacccgacccgcccgctcacctctccgatcgccgcgaacaacttatctacctacgcgcgtaacccgactaaaaataacgataaaaccgcgtacgtaacccgaaccccgcgcgaacttacgtacgacccgaaacgcccgctcgacaaacgctacccgccgcgctaccaactactctaatttttttcccgcgaaaactcgacatttaaaaattacgaaaccgcaaaaaacgtaccgaaaacgaacgcctacctcctaattaaccgacgcaataacgaaaaacgaaaaaaaaaataaaaaacgcccccgcctctatccacgacgcctccgcctaataaaccacgactccgcccaaccctacgcgctctactaaacgcgcccaacgtacaaaaaaactacgtaacaaaacctaatcaccccccgcacgtaaacaccccaaaaac

SEQ ID NO: 27901 - DNA, 529 bp, Artificial Sequence
  chemically treated genomic DNA (Homo sapiens) CpG-island No: 27901
aggcggcgtgcgcggttcggttcgggagtagcggcgcgttttttttcgttttcggttcgtatttttaggtttcgttcgggcgtgtttcgttcggttgttggcgacgatttttcgtaagcgttcgcgtgggggtttataaggtcgcgcgttatttcgtttcgattgttattggttgtcggatttacgttcgagcgtttattggtcggagttgatagttcggtttttttttttcgtcgggtttattaataacgttacgttcgtttatcgcgcgtcgagttgggcgggataaacgtcggtttcgtttttttattggtagatcggcggggatacgtcggcgtttatttacgtgttcgttgatcggttttgtttttattggagggggcgtacgtagttaaggttgtcgcgattaattcgacggtagttgggttttggattgataagggagttttagggttcgttcgacgatcgtatagagaggagttagtattggtttgaggggttagttcgaggcgcggataggttggggtag

SEQ ID NO: 27902 - DNA, 529 bp, Artificial Sequence
  chemically treated genomic DNA (Homo sapiens) CpG-island No: 27902
ctaccccaacctatccgcgcctcgaactaacccctcaaaccaatactaactcctctctatacgatcgtcgaacgaaccctaaaactcccttatcaatccaaaacccaactaccgtcgaattaatcgcgacaaccttaactacgtacgccccctccaataaaaacaaaaccgatcaacgaacacgtaaataaacgccgacgtatccccgccgatctaccaataaaaaaacgaaaccgacgtttatcccgcccaactcgacgcgcgataaacgaacgtaacgttattaataaacccgacgaaaaaaaaaaaccgaactatcaactccgaccaataaacgctcgaacgtaaatccgacaaccaataacaatcgaaacgaaataacgcgcgaccttataaacccccacgcgaacgcttacgaaaaatcgtcgccaacaaccgaacgaaacacgcccgaacgaaacctaaaaatacgaaccgaaaacgaaaaaaaacgcgccgctactcccgaaccgaaccgcgcacgccgcct

SEQ ID NO: 27903 - DNA, 529 bp, Artificial Sequence
  chemically treated genomic DNA (Homo sapiens) CpG-island No: 27903
ttgttttagtttgttcgcgtttcgggttggttttttaagttaatattggtttttttttgtgcggtcgtcgggcgggttttgaggtttttttgttaatttaaggtttagttgtcgtcgggttggtcgcggtagttttggttgcgtgcgttttttttaatgagaatagagtcggttagcgggtacgtgggtgggcgtcggcgtgttttcgtcggtttgttaatgaagaggcgaggtcggcgtttgtttcgtttaattcggcgcgcggtgggcgggcgtagcgttgttgatgggttcggcggaggggaggggtcgagttattagtttcggttaatgggcgttcgggcgtggattcggtagttaatggtagtcggggcggagtggcgcgcggttttataagtttttacgcgagcgtttgcggagggtcgtcgttagtaatcgagcggggtacgttcgagcggggtttgggggtgcgagtcgagggcgggggagagcgcgtcgttgttttcggatcgggtcgcgtacgtcgttt

SEQ ID NO: 27904 - DNA, 529 bp, Artificial Sequence
  chemically treated genomic DNA (Homo sapiens) CpG-island No: 27904
aaacgacgtacgcgacccgatccgaaaacaacgacgcgctctcccccgccctcgactcgcacccccaaaccccgctcgaacgtaccccgctcgattactaacgacgaccctccgcaaacgctcgcgtaaaaacttataaaaccgcgcgccactccgccccgactaccattaactaccgaatccacgcccgaacgcccattaaccgaaactaataactcgacccctcccctccgccgaacccatcaacaacgctacgcccgcccaccgcgcgccgaattaaacgaaacaaacgccgacctcgcctcttcattaacaaaccgacgaaaacacgccgacgcccacccacgtacccgctaaccgactctattctcattaaaaaaaacgcacgcaaccaaaactaccgcgaccaacccgacgacaactaaaccttaaattaacaaaaaaacctcaaaacccgcccgacgaccgcacaaaaaaaaaccaatattaacttaaaaaaccaacccgaaacgcgaacaaactaaaacaa

SEQ ID NO: 27905 - DNA, 595 bp, Artificial Sequence
  chemically treated genomic DNA (Homo sapiens) CpG-island No: 27905
acgcgggataaggtggatattttatttcgataaatattacgcgggataaggtggatatttttatttcgataaatatcgcgtgggataaggtggatattttatttcgataaatattacgcgggataaggtggatattttatttcgataaatattacgcgggataaggtggatatttttatttcgataaatatcgcgtgggataaggtggatattttatttcgataaatatcgcgtgggataaggtggatattttatttcgataaatatcgcgtgggataaggtggatattttatttcgataaatattacgcgggataaggtggatatttttatttcgataaatattacgcgggataaggtggatatttttatttcgataaatatcgcgtgggataaggtggatattttatttcgataaatattacgcgggataaggtggatatttttatttcgataattattacgcgggatatagtggatatttttatttcgataaatattacgcgggataaggtggatatttttatttcgataaatatagtacgggataaggtggatattttatttcgataaatatagagtgggataaggtggat

SEQ ID NO: 27906 - DNA, 595 bp, Artificial Sequence
  chemically treated genomic DNA (Homo sapiens) CpG-island No: 27906
atccaccttatcccactctatatttatcgaaataaaatatccaccttatcccgtactatatttatcgaaataaaaatatccaccttatcccgcgtaatatttatcgaaataaaaatatccactatatcccgcgtaataattatcgaaataaaaatatccaccttatcccgcgtaatatttatcgaaataaaatatccaccttatcccacgcgatatttatcgaaataaaaatatccaccttatcccgcgtaatatttatcgaaataaaaatatccaccttatcccgcgtaatatttatcgaaataaaatatccaccttatcccacgcgatatttatcgaaataaaatatccaccttatcccacgcgatatttatcgaaataaaatatccaccttatcccacgcgatatttatcgaaataaaaatatccaccttatcccgcgtaatatttatcgaaataaaatatccaccttatcccgcgtaatatttatcgaaataaaatatccaccttatcccacgcgatatttatcgaaataaaaatatccaccttatcccgcgtaatatttatcgaaataaaatatccaccttatcccgcgt

SEQ ID NO: 27907 - DNA, 595 bp, Artificial Sequence
  chemically treated genomic DNA (Homo sapiens) CpG-island No: 27907
gtttattttattttattttgtgtttatcggagtggggtgtttattttatttcgtgttgtgtttatcggagtgggggtgtttattttatttcgcgtggtgtttatcggagtgggggtgtttattgtatttcgcgtggtggttatcggagtgggggtgtttattttatttcgcgtggtgtttatcggagtggggtgtttattttattttacgcggtgtttatcggagtgggggtgtttattttatttcgcgtggtgtttatcggagtgggggtgtttattttatttcgcgtggtgtttatcggagtggggtgtttattttattttacgcggtgtttatcggagtggggtgtttattttattttacgcggtgtttatcggagtggggtgtttattttattttacgcggtgtttatcggagtggggatgtttattttatttcgcgtggtgtttatcggagtggggtgtttattttatttcgcgtggtgtttatcggagtggggtgtttattttattttacgcggtgtttatcggagtgggggtgtttattttatttcgcgtggtgtttatcggagtggggtgtttattttatttcgcgt

SEQ ID NO: 27908 - DNA, 595 bp, Artificial Sequence
  chemically treated genomic DNA (Homo sapiens) CpG-island No: 27908
acgcgaaataaaataaacaccccactccgataaacaccacgcgaaataaaataaacacccccactccgataaacaccgcgtaaaataaaataaacaccccactccgataaacaccacgcgaaataaaataaacaccccactccgataaacaccacgcgaaataaaataaacatccccactccgataaacaccgcgtaaaataaaataaacaccccactccgataaacaccgcgtaaaataaaataaacaccccactccgataaacaccgcgtaaaataaaataaacaccccactccgataaacaccacgcgaaataaaataaacacccccactccgataaacaccacgcgaaataaaataaacacccccactccgataaacaccgcgtaaaataaaataaacaccccactccgataaacaccacgcgaaataaaataaacacccccactccgataaccaccacgcgaaatacaataaacacccccactccgataaacaccacgcgaaataaaataaacacccccactccgataaacacaacacgaaataaaataaacaccccactccgataaacacaaaataaaataaaataaac

SEQ ID NO: 27909 - DNA, 898 bp, Artificial Sequence
  chemically treated genomic DNA (Homo sapiens) CpG-island No: 27909
ggtatcgttaggttcgggtagcggtggtttttcgtcgaggtttttcgttttcgtatattttttgttttcgttgttttttcggtcgttttttttggttttatttttcgttcggcgttcgtcgttataattttcgtttgggttggcgcgagattcgcgagcgtcggagtgggcgcgcgggatgcgcgcgggtcggcgttcggagttttgggtatgtttagtcgcgcgggtagggtttcgggcgcgagttgggttttttttgtattatatttagcggttgttaagaggagtcgacgggcgttcgtaggtttagcgcgcgttgttcgcggtaggattcggtcgttttcgtcgtcgtcgtcgtttttaagtttttcgaagttatggtcgggttcggttatttcgtcgttttcggtcgggttatttacgtcgtggtgcgggcgttattcgagtcgttcggttagtacgcgttgagaagcgttaagggcgaggaggtggacgtcgttcgcgcggaacggtagtattagttttacgtgggcgtgttgggtagtaagttggggttgtaggtggtggagttgtcggtcgacgagagtttttcggattgcgttttcgtggaggacgtggtcgtggtgtgcgaggagacggtttttattattcgattcggggcgtcgagtcggaggaaggaggtaattgtcgattcgaggggcgcggtcggggcgcgcgttaggttttttttcgtcgtcggtcgtcgtgttgtttggggagtcgcgttattggttttcgggttagtagtttataatttttcgtcggggggcgagtgtgtgtgtgtgtgtgtgtgttagagagttagagagaagtttattgtttatatttttcggttgtcggtagttttttggaggattcg

SEQ ID NO: 27910 - DNA, 898 bp, Artificial Sequence
  chemically treated genomic DNA (Homo sapiens) CpG-island No: 27910
cgaatcctccaaaaaactaccgacaaccgaaaaatataaacaataaacttctctctaactctctaacacacacacacacacacacactcgccccccgacgaaaaattataaactactaacccgaaaaccaataacgcgactccccaaacaacacgacgaccgacgacgaaaaaaaacctaacgcgcgccccgaccgcgcccctcgaatcgacaattacctccttcctccgactcgacgccccgaatcgaataataaaaaccgtctcctcgcacaccacgaccacgtcctccacgaaaacgcaatccgaaaaactctcgtcgaccgacaactccaccacctacaaccccaacttactacccaacacgcccacgtaaaactaatactaccgttccgcgcgaacgacgtccacctcctcgcccttaacgcttctcaacgcgtactaaccgaacgactcgaataacgcccgcaccacgacgtaaataacccgaccgaaaacgacgaaataaccgaacccgaccataacttcgaaaaacttaaaaacgacgacgacgacgaaaacgaccgaatcctaccgcgaacaacgcgcgctaaacctacgaacgcccgtcgactcctcttaacaaccgctaaatataatacaaaaaaaacccaactcgcgcccgaaaccctacccgcgcgactaaacatacccaaaactccgaacgccgacccgcgcgcatcccgcgcgcccactccgacgctcgcgaatctcgcgccaacccaaacgaaaattataacgacgaacgccgaacgaaaaataaaaccaaaaaaaacgaccgaaaaaacaacgaaaacaaaaaatatacgaaaacgaaaaacctcgacgaaaaaccaccgctacccgaacctaacgatacc

SEQ ID NO: 27911 - DNA, 898 bp, Artificial Sequence
  chemically treated genomic DNA (Homo sapiens) CpG-island No: 27911
cggattttttagaaggttgtcggtagtcgggaggtgtgaataatgaatttttttttgattttttgatatatatatatatatatatattcgtttttcgacgggaagttgtgaattattagttcgagggttaatggcgcgattttttaggtaatacggcggtcggcggcgggggagggtttggcgcgcgtttcggtcgcgtttttcgagtcggtagttatttttttttttcggttcggcgtttcgggtcgggtgatgagggtcgttttttcgtatattacggttacgttttttacgaagacgtagttcggaaggttttcgtcggtcggtagttttattatttgtagttttagtttgttgtttagtacgtttacgtagagttggtgttgtcgtttcgcgcgggcgacgtttattttttcgtttttggcgttttttagcgcgtgttggtcgagcgattcgggtagcgttcgtattacggcgtgggtggttcggtcgaaggcggcggggtggtcgagttcggttatggtttcgggaggtttaggggcggcggcggcggcggaggcggtcgggttttgtcgcgggtagcgcgcgttgagtttgcgagcgttcgtcggttttttttggtagtcgttgaatgtggtgtagaaggagtttagttcgcgttcggagttttgttcgcgcgattgagtatgtttagagtttcgggcgtcggttcgcgcgtatttcgcgcgtttatttcggcgttcgcgggtttcgcgttagtttaggcgggagttgtagcggcgagcgtcgggcgaggagtggggttaggagaggcggtcggggaagtagcgagggtaagaagtatgcggaggcgggggatttcggcgaaaagttatcgttattcggatttggcggtatt

SEQ ID NO: 27912 - DNA, 898 bp, Artificial Sequence
  chemically treated genomic DNA (Homo sapiens) CpG-island No: 27912
aataccgccaaatccgaataacgataacttttcgccgaaatcccccgcctccgcatacttcttaccctcgctacttccccgaccgcctctcctaaccccactcctcgcccgacgctcgccgctacaactcccgcctaaactaacgcgaaacccgcgaacgccgaaataaacgcgcgaaatacgcgcgaaccgacgcccgaaactctaaacatactcaatcgcgcgaacaaaactccgaacgcgaactaaactccttctacaccacattcaacgactaccaaaaaaaaccgacgaacgctcgcaaactcaacgcgcgctacccgcgacaaaacccgaccgcctccgccgccgccgccgcccctaaacctcccgaaaccataaccgaactcgaccaccccgccgccttcgaccgaaccacccacgccgtaatacgaacgctacccgaatcgctcgaccaacacgcgctaaaaaacgccaaaaacgaaaaaataaacgtcgcccgcgcgaaacgacaacaccaactctacgtaaacgtactaaacaacaaactaaaactacaaataataaaactaccgaccgacgaaaaccttccgaactacgtcttcgtaaaaaacgtaaccgtaatatacgaaaaaacgaccctcatcacccgacccgaaacgccgaaccgaaaaaaaaaaataactaccgactcgaaaaacgcgaccgaaacgcgcgccaaaccctcccccgccgccgaccgccgtattacctaaaaaatcgcgccattaaccctcgaactaataattcacaacttcccgtcgaaaaacgaatatatatatatatatatatatcaaaaaatcaaaaaaaaattcattattcacacctcccgactaccgacaaccttctaaaaaatccg

SEQ ID NO: 27913 - DNA, 750 bp, Artificial Sequence
  chemically treated genomic DNA (Homo sapiens) CpG-island No: 27913
ggtttcgggatttttgcggagggagcggagagggttcgtatcgcgagagggtgcgggacgcgaggtattcggacgcgtttgttcggttgttatcgtcgttttttgtcggttatttcgttcgcgcgtttatagttatcgcggttgttaagaatcgaggttttcggcggcgcgcggcgtaggacgtttttagtttcggtttatatttggtgaaagttttttaagatttcgttatttagtttcggggggcggtggcggtggcggtggcggcggcggcggttgttttgcgattcggtttggtaggtttgcggtcgtcgcgtttttgaaaagtgcgtcgcggcggttcgcgtttaggttttttttcgcgcgggatttcggagcgttgcgggcggcggggtagattcgggtagtttggttttagtttttatttttttgagggtcgaagttcgttttgcgttgcgtgggaggttggcgcggagggcgtcgcggtttagttgtgttatttttttcgttcgtttttttgttgattagtttttttagcggggtagcgagttgtcgtgttgtgttagacgtagagggtgcgttcggcgtaagggtgtggggttgtgtgtgtatgtgtgtgtgtgggcggggggatgttcggaggatggcgtttgcgtggatattaagcgtattcgagagcgggacgtgtagttagttttggggaaaagtttcgaagggtttggattttattatttttagaagggatatatg

SEQ ID NO: 27914 - DNA, 750 bp, Artificial Sequence
  chemically treated genomic DNA (Homo sapiens) CpG-island No: 27914
catatatcccttctaaaaataataaaatccaaacccttcgaaacttttccccaaaactaactacacgtcccgctctcgaatacgcttaatatccacgcaaacgccatcctccgaacatccccccgcccacacacacacatacacacacaaccccacacccttacgccgaacgcaccctctacgtctaacacaacacgacaactcgctaccccgctaaaaaaactaatcaacaaaaaaacgaacgaaaaaaataacacaactaaaccgcgacgccctccgcgccaacctcccacgcaacgcaaaacgaacttcgaccctcaaaaaaataaaaactaaaaccaaactacccgaatctaccccgccgcccgcaacgctccgaaatcccgcgcgaaaaaaaacctaaacgcgaaccgccgcgacgcacttttcaaaaacgcgacgaccgcaaacctaccaaaccgaatcgcaaaacaaccgccgccgccgccaccgccaccgccaccgccccccgaaactaaataacgaaatcttaaaaaactttcaccaaatataaaccgaaactaaaaacgtcctacgccgcgcgccgccgaaaacctcgattcttaacaaccgcgataactataaacgcgcgaacgaaataaccgacaaaaaacgacgataacaaccgaacaaacgcgtccgaatacctcgcgtcccgcaccctctcgcgatacgaaccctctccgctccctccgcaaaaatcccgaaacc

SEQ ID NO: 27915 - DNA, 750 bp, Artificial Sequence
  chemically treated genomic DNA (Homo sapiens) CpG-island No: 27915
tatgtgttttttttggggataatggaatttaggtttttcggggtttttttttagagttggttatacgtttcgttttcgggtgcgtttggtgtttacgtaaacgttatttttcgaatattttttcgtttatatatatatatatatatatagttttatatttttgcgtcggacgtattttttacgtttggtatagtacggtaattcgttgtttcgttgggaggattagttaataggggggcggacgggaaaagtgatataattgggtcgcggcgtttttcgcgttagttttttacgtagcgtagggcggatttcggtttttagaggggtgaggattggggttaaattgttcgggtttatttcgtcgttcgtaacgtttcggggtttcgcgcggagggaggtttgggcgcgggtcgtcgcggcgtattttttaggaacgcggcggtcgtaagtttgttaggtcgggtcgtaggatagtcgtcgtcgtcgttatcgttatcgttatcgtttttcgaagttagatgacggagttttgaaagatttttattaaatatgggtcggggttggaaacgttttgcgtcgcgcgtcgtcggaaatttcgatttttggtaatcgcggtgattgtgggcgcgcgggcggggtggtcggtagggggcggcggtagtagtcgggtaggcgcgttcggatgtttcgcgtttcgtattttttcgcggtgcggatttttttcgtttttttcgtaggggtttcggagtt

SEQ ID NO: 27916 - DNA, 750 bp, Artificial Sequence
  chemically treated genomic DNA (Homo sapiens) CpG-island No: 27916
aactccgaaacccctacgaaaaaaacgaaaaaaatccgcaccgcgaaaaaatacgaaacgcgaaacatccgaacgcgcctacccgactactaccgccgccccctaccgaccaccccgcccgcgcgcccacaatcaccgcgattaccaaaaatcgaaatttccgacgacgcgcgacgcaaaacgtttccaaccccgacccatatttaataaaaatctttcaaaactccgtcatctaacttcgaaaaacgataacgataacgataacgacgacgacgactatcctacgacccgacctaacaaacttacgaccgccgcgttcctaaaaaatacgccgcgacgacccgcgcccaaacctccctccgcgcgaaaccccgaaacgttacgaacgacgaaataaacccgaacaatttaaccccaatcctcacccctctaaaaaccgaaatccgccctacgctacgtaaaaaactaacgcgaaaaacgccgcgacccaattatatcacttttcccgtccgcccccctattaactaatcctcccaacgaaacaacgaattaccgtactataccaaacgtaaaaaatacgtccgacgcaaaaatataaaactatatatatatatatatatataaacgaaaaaatattcgaaaaataacgtttacgtaaacaccaaacgcacccgaaaacgaaacgtataaccaactctaaaaaaaaaccccgaaaaacctaaattccattatccccaaaaaaaacacata

SEQ ID NO: 27917 - DNA, 969 bp, Artificial Sequence
  chemically treated genomic DNA (Homo sapiens) CpG-island No: 27917
tcgagcgttaagttgaggagtcgtttttaggggttggcgttagtttgtagcggcgtcgacgtggtcggcgcgattcgttacgtacgtgttcggttttaggtcgggggcgggggcgcgcgggggttttcggttttttttcgatttttggggttcgggcgttagttggtttcgagtttttagttcgcgggtgcgaagaacggagtagatgggtcgggaataagggagttgggttaaggcgaggagggggcggtcgggcgcgcgcgttttggtttcgtgtacgcgttgaaatcggagcgcgtagggcgcgttagggtgagggggacgggggcggggtgggggtagtttttttttaggcggtagcgggggcggcgtcgttgttgtttttttaagtcgcggggtcgtcgttttttgtcgttggagtcggttataaaggaagcgttatttaggtcgttatacgtcgaggttttcgcgtttttcgttattttttagtagcgttcgacgaggcggagtcgcgagagcgcggtttaggtcggtttcgcggggcggtcgcggtcgtgacggcggtttcgggttcggtttttttttcgcgttcggtttttttttcgcgtttttttcgtcggagatgaggggaagatgttcgtgttagggtttaaggtcgagttgaagtttttggcgtttattttcgataagaattacgagcgatttcgtatcgttagttggaagttggacgagttgtattgttagtttttggtgtcgtagtagggtagttcgtattcgttgtcgtcgttatttacgttttattgtaatattacggtgaggcgttcggtcgcggtttcgcggggtagggcgaggacggagagggggcgtttcgagtttcgggataaaggggagtttgtttcggagaggtttcggtttttcgggcggggtaggttcgtttttttttttcgcgatttgtttattttaggtcgg

SEQ ID NO: 27918 - DNA, 969 bp, Artificial Sequence
  chemically treated genomic DNA (Homo sapiens) CpG-island No: 27918
ccgacctaaaataaacaaatcgcgaaaaaaaaaaacgaacctaccccgcccgaaaaaccgaaacctctccgaaacaaactcccctttatcccgaaactcgaaacgccccctctccgtcctcgccctaccccgcgaaaccgcgaccgaacgcctcaccgtaatattacaataaaacgtaaataacgacgacaacgaatacgaactaccctactacgacaccaaaaactaacaatacaactcgtccaacttccaactaacgatacgaaatcgctcgtaattcttatcgaaaataaacgccaaaaacttcaactcgaccttaaaccctaacacgaacatcttcccctcatctccgacgaaaaaaacgcgaaaaaaaaaccgaacgcgaaaaaaaaaccgaacccgaaaccgccgtcacgaccgcgaccgccccgcgaaaccgacctaaaccgcgctctcgcgactccgcctcgtcgaacgctactaaaaaataacgaaaaacgcgaaaacctcgacgtataacgacctaaataacgcttcctttataaccgactccaacgacaaaaaacgacgaccccgcgacttaaaaaaacaacaacgacgccgcccccgctaccgcctaaaaaaaaactacccccaccccgcccccgtccccctcaccctaacgcgccctacgcgctccgatttcaacgcgtacacgaaaccaaaacgcgcgcgcccgaccgccccctcctcgccttaacccaactcccttattcccgacccatctactccgttcttcgcacccgcgaactaaaaactcgaaaccaactaacgcccgaaccccaaaaatcgaaaaaaaaccgaaaacccccgcgcgcccccgcccccgacctaaaaccgaacacgtacgtaacgaatcgcgccgaccacgtcgacgccgctacaaactaacgccaacccctaaaaacgactcctcaacttaacgctcga

SEQ ID NO: 27919 - DNA, 969 bp, Artificial Sequence
  chemically treated genomic DNA (Homo sapiens) CpG-island No: 27919
tcggtttgggatgggtaagtcgcgggggaaaggggcgggtttgtttcgttcggggagtcggagttttttcggggtaggtttttttttgtttcgggattcgaagcgtttttttttcgttttcgttttgtttcgcggggtcgcggtcgggcgttttatcgtgatgttgtagtggagcgtgagtggcggcggtagcgagtgcgggttgttttgttgcggtattaggaattggtagtgtagttcgtttagtttttaattgacgatgcggaatcgttcgtggtttttgtcgaagatggacgttaggaattttagttcggttttgagttttgatacggatattttttttttattttcggcgggaggggcgcggaaggggagtcgggcgcggaaggggagtcgggttcggagtcgtcgttacggtcgcgatcgtttcgcggggtcggtttgggtcgcgttttcgcggtttcgtttcgtcgagcgttgttggaaaatggcgaggggcgcggaagtttcggcgtgtggcggtttgggtggcgttttttttgtaatcgattttagcggtaggaggcggcggtttcgcggtttaaaagggtaatagcgacgtcgttttcgttatcgtttgggaaagggttgtttttatttcgttttcgttttttttattttggcgcgttttgcgcgtttcggttttagcgcgtgtacgaggttagagcgcgcgcgttcggtcgtttttttttcgttttgatttagtttttttgttttcgatttatttgtttcgtttttcgtattcgcggattggaggttcggggttagttggcgttcgggttttagaagtcggggaggagtcggagattttcgcgcgttttcgttttcggtttggagtcggatacgtgcgtggcggatcgcgtcggttacgtcggcgtcgttgtagattagcgttagtttttgggggcggttttttagtttggcgttcgg

SEQ ID NO: 27920 - DNA, 969 bp, Artificial Sequence
  chemically treated genomic DNA (Homo sapiens) CpG-island No: 27920
ccgaacgccaaactaaaaaaccgcccccaaaaactaacgctaatctacaacgacgccgacgtaaccgacgcgatccgccacgcacgtatccgactccaaaccgaaaacgaaaacgcgcgaaaatctccgactcctccccgacttctaaaacccgaacgccaactaaccccgaacctccaatccgcgaatacgaaaaacgaaacaaataaatcgaaaacaaaaaaactaaatcaaaacgaaaaaaaaacgaccgaacgcgcgcgctctaacctcgtacacgcgctaaaaccgaaacgcgcaaaacgcgccaaaataaaaaaaacgaaaacgaaataaaaacaaccctttcccaaacgataacgaaaacgacgtcgctattacccttttaaaccgcgaaaccgccgcctcctaccgctaaaatcgattacaaaaaaaacgccacccaaaccgccacacgccgaaacttccgcgcccctcgccattttccaacaacgctcgacgaaacgaaaccgcgaaaacgcgacccaaaccgaccccgcgaaacgatcgcgaccgtaacgacgactccgaacccgactccccttccgcgcccgactccccttccgcgcccctcccgccgaaaataaaaaaaaaatatccgtatcaaaactcaaaaccgaactaaaattcctaacgtccatcttcgacaaaaaccacgaacgattccgcatcgtcaattaaaaactaaacgaactacactaccaattcctaataccgcaacaaaacaacccgcactcgctaccgccgccactcacgctccactacaacatcacgataaaacgcccgaccgcgaccccgcgaaacaaaacgaaaacgaaaaaaaaacgcttcgaatcccgaaacaaaaaaaaacctaccccgaaaaaactccgactccccgaacgaaacaaacccgcccctttcccccgcgacttacccatcccaaaccga

SEQ ID NO: 27921 - DNA, 731 bp, Artificial Sequence
  chemically treated genomic DNA (Homo sapiens) CpG-island No: 27921
cgtcgcggggtattcgtttggttttttgttttttttttcgtcgcgggttaaggcggtgtaggtttgggcgattcgggcgagacgcggggtttcggggggtttcgggcggtttcgaggcgggttgtaggggttggcgattcgcgcgcggggcgacgatgatagttggcggggaaggagcgaggttgaggggttaggacgaggttgggcgcgagggtcgagggcgtttttcgggaattttcgggggagacgagagggtaaaagggcgtaggggcggggcgggcgtagagcggaaggggtagcggggtcggtacgaggggttcgacggcgttagggacggggttggttaggggggaagggaggggagaagagggagtcgggcgttttagcgcgggagcggttttagggttttcgggttttttttcgcgtttcgtcgttgattataggggcggggtcgtcggatttttacggcggtcgagggaagggcgcgtaggtatttgtcgttttcgtttcggcgtttaggagggttcggtttttatttcgtcggtttatgggtcgtattcgatcgttatttttattttggagtttttattttgtagtcgtcgaagaattcgttcggttttcgtttgtcgcggttatcgcgaattttttcgggttgatcggcggaaggggtcgtcgcgtacgagggtgggtacgggttggtgtcggtcgtttttatttcgggcgttttcgtt

SEQ ID NO: 27922 - DNA, 731 bp, Artificial Sequence
  chemically treated genomic DNA (Homo sapiens) CpG-island No: 27922
aacgaaaacgcccgaaataaaaacgaccgacaccaacccgtacccaccctcgtacgcgacgaccccttccgccgatcaacccgaaaaaattcgcgataaccgcgacaaacgaaaaccgaacgaattcttcgacgactacaaaataaaaactccaaaataaaaataacgatcgaatacgacccataaaccgacgaaataaaaaccgaaccctcctaaacgccgaaacgaaaacgacaaatacctacgcgcccttccctcgaccgccgtaaaaatccgacgaccccgcccctataatcaacgacgaaacgcgaaaaaaaacccgaaaaccctaaaaccgctcccgcgctaaaacgcccgactccctcttctcccctcccttcccccctaaccaaccccgtccctaacgccgtcgaacccctcgtaccgaccccgctaccccttccgctctacgcccgccccgcccctacgcccttttaccctctcgtctcccccgaaaattcccgaaaaacgccctcgaccctcgcgcccaacctcgtcctaacccctcaacctcgctccttccccgccaactatcatcgtcgccccgcgcgcgaatcgccaacccctacaacccgcctcgaaaccgcccgaaaccccccgaaaccccgcgtctcgcccgaatcgcccaaacctacaccgccttaacccgcgacgaaaaaaaaaacaaaaaaccaaacgaataccccgcgacg

SEQ ID NO: 27923 - DNA, 731 bp, Artificial Sequence
  chemically treated genomic DNA (Homo sapiens) CpG-island No: 27923
agcgggagcgttcggagtagggacgatcgatattagttcgtatttattttcgtgcgcgacggtttttttcgtcggttaattcggaagagttcgcggtggtcgcggtagacggaagtcgaacgagtttttcggcggttgtaggatggggattttaaagtgaaagtggcggtcggatacgatttatgaatcggcgaggtgagagtcgagtttttttgggcgtcggggcggaggcggtaggtgtttgcgcgtttttttttcggtcgtcgtgggggttcggcggtttcgtttttatagttagcggcggggcgcgaggaggggttcggggattttgaaatcgttttcgcgttgagacgttcggttttttttttttttttttttttttttttggttagtttcgtttttggcgtcgtcgggtttttcgtgtcggtttcgttgtttttttcgttttgcgttcgtttcgtttttgcgtttttttgttttttcgtttttttcggaggttttcggagggcgttttcggttttcgcgtttagtttcgttttggttttttagtttcgtttttttttcgttagttgttatcgtcgtttcgcgcgcgggtcgttagtttttgtagttcgtttcgggatcgttcgggatttttcgggatttcgcgtttcgttcgggtcgtttaagtttgtatcgttttggttcgcggcgggaagaagggtagggggttaggcgggtgtttcgcggcg

SEQ ID NO: 27924 - DNA, 731 bp, Artificial Sequence
  chemically treated genomic DNA (Homo sapiens) CpG-island No: 27924
cgccgcgaaacacccgcctaaccccctacccttcttcccgccgcgaaccaaaacgatacaaacttaaacgacccgaacgaaacgcgaaatcccgaaaaatcccgaacgatcccgaaacgaactacaaaaactaacgacccgcgcgcgaaacgacgataacaactaacgaaaaaaaaacgaaactaaaaaaccaaaacgaaactaaacgcgaaaaccgaaaacgccctccgaaaacctccgaaaaaaacgaaaaaacaaaaaaacgcaaaaacgaaacgaacgcaaaacgaaaaaaacaacgaaaccgacacgaaaaacccgacgacgccaaaaacgaaactaaccaaaaaaaaaaaaaaaaaaaaaaaaaaaaccgaacgtctcaacgcgaaaacgatttcaaaatccccgaacccctcctcgcgccccgccgctaactataaaaacgaaaccgccgaacccccacgacgaccgaaaaaaaaacgcgcaaacacctaccgcctccgccccgacgcccaaaaaaactcgactctcacctcgccgattcataaatcgtatccgaccgccactttcactttaaaatccccatcctacaaccgccgaaaaactcgttcgacttccgtctaccgcgaccaccgcgaactcttccgaattaaccgacgaaaaaaaccgtcgcgcacgaaaataaatacgaactaatatcgatcgtccctactccgaacgctcccgct

SEQ ID NO: 27925 - DNA, 523 bp, Artificial Sequence
  chemically treated genomic DNA (Homo sapiens) CpG-island No: 27925
gcggaatcggttttttagcgtttgtaaattcgggtagcggagaatgattattttttgtttagttcggattttcgattatttgatggcggcgcgtgtcggattttagcgagttttgcgaaattttcggcggcgagattgttttgttatatttggtagtcggaaattttggaaaaatcgcgtgttgttcgagtttttggagggatttggcgttcgttatatttgtagggtagggtgggttcgcggttttcgggttagggagcgggtagggcgcgtggggttcgggcgttttcgtcgcgttggttttcgtttttcgtcgtcgtatttcgcgtattttttcgcgcgggtagggtttgcgttttcgagttcggtaggtagtttagatttttttatatttattaaagagtcgtttttttttttcgtagcgttttcgtcgtttttttttttttttttttttttcgtttttttttcgatttgtttattcgggaggaagggagttggaaagggggcggaaattttttttttt

SEQ ID NO: 27926 - DNA, 523 bp, Artificial Sequence
  chemically treated genomic DNA (Homo sapiens) CpG-island No: 27926
aaaaaaaaaaatttccgccccctttccaactcccttcctcccgaataaacaaatcgaaaaaaaaacgaaaaaaaaaaaaaaaaaaaaaaacgacgaaaacgctacgaaaaaaaaaaacgactctttaataaatataaaaaaatctaaactacctaccgaactcgaaaacgcaaaccctacccgcgcgaaaaaatacgcgaaatacgacgacgaaaaacgaaaaccaacgcgacgaaaacgcccgaaccccacgcgccctacccgctccctaacccgaaaaccgcgaacccaccctaccctacaaatataacgaacgccaaatccctccaaaaactcgaacaacacgcgatttttccaaaatttccgactaccaaatataacaaaacaatctcgccgccgaaaatttcgcaaaactcgctaaaatccgacacgcgccgccatcaaataatcgaaaatccgaactaaacaaaaaataatcattctccgctacccgaatttacaaacgctaaaaaaccgattccgc

SEQ ID NO: 27927 - DNA, 523 bp, Artificial Sequence
  chemically treated genomic DNA (Homo sapiens) CpG-island No: 27927
gaggggagaggttttcgttttttttttagttttttttttttcgggtggataggtcggaagaggagcggaaaggaaaggaagggagggaggcggcgaaggcgttgcgggggggaggagcggttttttgatgggtgtgggggggtttgaattgtttatcgggttcggaagcgtagattttattcgcgcggaagaatgcgcggaatgcggcggcgggaggcggaggttagcgcggcgggggcgttcggattttacgcgttttgttcgttttttagttcgagggtcgcggatttattttgttttgtaggtgtggcgggcgttaggtttttttagggattcggatagtacgcgatttttttaggattttcgattattaaatgtgataagatagtttcgtcgtcgagagtttcgtagggttcgttaaaattcggtacgcgtcgttattagatagtcgaaaattcgggttgaataaaaggtgattatttttcgttgttcggatttgtaggcgttagaggatcggtttcgt

SEQ ID NO: 27928 - DNA, 523 bp, Artificial Sequence
  chemically treated genomic DNA (Homo sapiens) CpG-island No: 27928
acgaaaccgatcctctaacgcctacaaatccgaacaacgaaaaataatcaccttttattcaacccgaattttcgactatctaataacgacgcgtaccgaattttaacgaaccctacgaaactctcgacgacgaaactatcttatcacatttaataatcgaaaatcctaaaaaaatcgcgtactatccgaatccctaaaaaaacctaacgcccgccacacctacaaaacaaaataaatccgcgaccctcgaactaaaaaacgaacaaaacgcgtaaaatccgaacgcccccgccgcgctaacctccgcctcccgccgccgcattccgcgcattcttccgcgcgaataaaatctacgcttccgaacccgataaacaattcaaacccccccacacccatcaaaaaaccgctcctcccccccgcaacgccttcgccgcctccctcccttcctttcctttccgctcctcttccgacctatccacccgaaaaaaaaaaaactaaaaaaaaaacgaaaacctctcccctc

SEQ ID NO: 27929 - DNA, 536 bp, Artificial Sequence
  chemically treated genomic DNA (Homo sapiens) CpG-island No: 27929
  unsure (330..331, 335, 346, 427)
gggagggacggagaggatcgttacgcgggattaaagcgaatcgcggcgcgggcgtcgggcgcgtcgatagtattagacgaggaggggcgttcggcgtcgggcgcgcggggagtcgtcgcggacgggcgagggcgggtatcgcgcgcgcgtcgcgcgcggtcggcgcgatattaatcggggggcgcgggaggaggcggtcgagcgagcgcgggcgtcggttcgcgcggcggcggaggagaggcgcgggcgatcgtcgcggcgggcggcgcgacgcgcgtcgcggcgacggcgggcggcgacgcgatagtatattaatacgattattatatnnnatngggaggggggnggggatcgaaggcgagacgggaggacgagtaacgacgcgtacgatcgtaataggcgcggaggtcgggattacggcgcggangggagcgagcgggagcgatcggcggggcggacgcgaggggcgagacggagcggttcgtaacgcgcgcgacgtcgtagcgcgcgcggtcgtagtagggggggcgcgcggt

SEQ ID NO: 27930 - DNA, 536 bp, Artificial Sequence
  chemically treated genomic DNA (Homo sapiens) CpG-island No: 27930
  unsure (110, 191, 202, 205..)
accgcgcgccccccctactacgaccgcgcgcgctacgacgtcgcgcgcgttacgaaccgctccgtctcgcccctcgcgtccgccccgccgatcgctcccgctcgctcccntccgcgccgtaatcccgacctccgcgcctattacgatcgtacgcgtcgttactcgtcctcccgtctcgccttcgatccccncccccctcccnatnnnatataataatcgtattaatatactatcgcgtcgccgcccgccgtcgccgcgacgcgcgtcgcgccgcccgccgcgacgatcgcccgcgcctctcctccgccgccgcgcgaaccgacgcccgcgctcgctcgaccgcctcctcccgcgccccccgattaatatcgcgccgaccgcgcgcgacgcgcgcgcgatacccgccctcgcccgtccgcgacgactccccgcgcgcccgacgccgaacgcccctcctcgtctaatactatcgacgcgcccgacgcccgcgccgcgattcgctttaatcccgcgtaacgatcctctccgtccctccc

SEQ ID NO: 27931 - DNA, 536 bp, Artificial Sequence
  chemically treated genomic DNA (Homo sapiens) CpG-island No: 27931
  unsure (110, 191, 202, 205..)
gtcgcgcgttttttttgttgcggtcgcgcgcgttgcggcgtcgcgcgcgttgcgggtcgtttcgtttcgtttttcgcgttcgtttcgtcggtcgttttcgttcgtttttnttcgcgtcgtggtttcggttttcgcgtttgttgcggtcgtgcgcgtcgttgttcgttttttcgtttcgttttcggtttttnttttttttttnatnnngtgtggtggtcgtgttggtgtgttgtcgcgtcgtcgttcgtcgtcgtcgcggcgcgcgtcgcgtcgttcgtcgcggcggtcgttcgcgtttttttttcgtcgtcgcgcgggtcggcgttcgcgttcgttcggtcgttttttttcgcgtttttcggttggtgtcgcgtcggtcgcgcgcggcgcgcgcgcggtgttcgttttcgttcgttcgcggcggtttttcgcgcgttcggcgtcgggcgttttttttcgtttggtgttgtcggcgcgttcggcgttcgcgtcgcggttcgttttggtttcgcgtggcggtttttttcgtttttttt

SEQ ID NO: 27932 - DNA, 536 bp, Artificial Sequence
  chemically treated genomic DNA (Homo sapiens) CpG-island No: 27932
  unsure (330..331, 335, 346, 427)
aaaaaaaacgaaaaaaaccgccacgcgaaaccaaaacgaaccgcgacgcgaacgccgaacgcgccgacaacaccaaacgaaaaaaaacgcccgacgccgaacgcgcgaaaaaccgccgcgaacgaacgaaaacgaacaccgcgcgcgcgccgcgcgcgaccgacgcgacaccaaccgaaaaacgcgaaaaaaaacgaccgaacgaacgcgaacgccgacccgcgcgacgacgaaaaaaaaacgcgaacgaccgccgcgacgaacgacgcgacgcgcgccgcgacgacgacgaacgacgacgcgacaacacaccaacacgaccaccacacnnnatnaaaaaaaaaanaaaaaccgaaaacgaaacgaaaaaacgaacaacgacgcgcacgaccgcaacaaacgcgaaaaccgaaaccacgacgcgaanaaaaacgaacgaaaacgaccgacgaaacgaacgcgaaaaacgaaacgaaacgacccgcaacgcgcgcgacgccgcaacgcgcgcgaccgcaacaaaaaaaacgcgcgac

SEQ ID NO: 27933 - DNA, 543 bp, Artificial Sequence
  chemically treated genomic DNA (Homo sapiens) CpG-island No: 27933
cggggtcggtcggcgcgtcgggatttcgtattagtcgggcgattggtttttggtggggattgatggcgtagttttttgtatcgtttattttcggcgttgatcgattcgggttacgttgtaaagacgaagagattcggagttacggcgcgtgtagttgttgtgtaaggagttattgttttagttttaaggttatttcgttgcgggtcgtcgtaattttttcgtcgtttcgttttttgtttaatttcggtttcgggcgattcgggtttcgttttttgcgttttcgcgggcgtagttatttttaggaggaagcgcggcggcggcggcggaacgcgcgggtaggttgttttttcggtgggattaaattttgcggcggaaggatatagatttagagttatattttaagaaatttgatgattaatggggacgcggcggggtaacggggttcgttttcggagcgattttttttttagattttcgggcgtcgggttatttgttgtcgttaagttgggttgttagatggggtgtttttttttggttttcggt

SEQ ID NO: 27934 - DNA, 543 bp, Artificial Sequence
  chemically treated genomic DNA (Homo sapiens) CpG-island No: 27934
accgaaaaccaaaaaaaaacaccccatctaacaacccaacttaacgacaacaaataacccgacgcccgaaaatctaaaaaaaaaatcgctccgaaaacgaaccccgttaccccgccgcgtccccattaatcatcaaatttcttaaaatataactctaaatctatatccttccgccgcaaaatttaatcccaccgaaaaaacaacctacccgcgcgttccgccgccgccgccgcgcttcctcctaaaaataactacgcccgcgaaaacgcaaaaaacgaaacccgaatcgcccgaaaccgaaattaaacaaaaaacgaaacgacgaaaaaattacgacgacccgcaacgaaataaccttaaaactaaaacaataactccttacacaacaactacacgcgccgtaactccgaatctcttcgtctttacaacgtaacccgaatcgatcaacgccgaaaataaacgatacaaaaaactacgccatcaatccccaccaaaaaccaatcgcccgactaatacgaaatcccgacgcgccgaccgaccccg

SEQ ID NO: 27935 - DNA, 543 bp, Artificial Sequence
  chemically treated genomic DNA (Homo sapiens) CpG-island No: 27935
gtcgagagttaagaaaagatattttatttggtagtttaatttggcggtaataggtggttcggcgttcgggggtttgggaggaaagtcgtttcgggggcgggtttcgttgtttcgtcgcgtttttattggttattaggttttttaaaatgtgattttgaatttgtgttttttcgtcgtagaatttagttttatcgaaagggtaatttgttcgcgcgtttcgtcgtcgtcgtcgcgtttttttttgaaggtgattgcgttcgcggggacgtagggggcggggttcgggtcgttcggagtcgggattgggtagagggcggggcggcggagggattgcggcggttcgtagcgggataattttgaggttgaggtagtggttttttgtatagtagttgtacgcgtcgtggtttcggattttttcgtttttgtagcgtagttcgagtcggttagcgtcggaggtgagcggtgtaggaggttacgttattagtttttattaagggttagtcgttcggttagtgcggaatttcggcgcgtcggtcggtttcg

SEQ ID NO: 27936 - DNA, 543 bp, Artificial Sequence
  chemically treated genomic DNA (Homo sapiens) CpG-island No: 27936
cgaaaccgaccgacgcgccgaaattccgcactaaccgaacgactaacccttaataaaaactaataacgtaacctcctacaccgctcacctccgacgctaaccgactcgaactacgctacaaaaacgaaaaaatccgaaaccacgacgcgtacaactactatacaaaaaaccactacctcaacctcaaaattatcccgctacgaaccgccgcaatccctccgccgccccgccctctacccaatcccgactccgaacgacccgaaccccgccccctacgtccccgcgaacgcaatcaccttcaaaaaaaaacgcgacgacgacgacgaaacgcgcgaacaaattaccctttcgataaaactaaattctacgacgaaaaaacacaaattcaaaatcacattttaaaaaacctaataaccaataaaaacgcgacgaaacaacgaaacccgcccccgaaacgactttcctcccaaacccccgaacgccgaaccacctattaccgccaaattaaactaccaaataaaatatcttttcttaactctcgac

SEQ ID NO: 27937 - DNA, 521 bp, Artificial Sequence
  chemically treated genomic DNA (Homo sapiens) CpG-island No: 27937
aaagggggcgtgtttgcgtaagcgtacgttgtattttttagtggcgttacgtgcgggggcgggatagggcggggtcgattcgtgttggtagtagggggcgtgggaggtaagtgcgcgcgcgtttgttcgtttgtagtcggggagtcgcgcggggcggggtcgcgtgcgcggggtcgggggcgcgcgatcgaagcggataagggacgcggcggcggttggttgtgtttgttgagagagtataggatagttcggattgcgagaggcggcggcggaggtagtagttgtatcggtagaggcggtcgttggtagcggttgaggcggcggtttaacgcgtgttttttgggcggggtgcggcgggggatgtgtttgtttaggtcgggcggagtttttttgatagggcgggggatgcgtcgcggtcgttcgttcggattttgaggttgttgggtttattttttcggaatcgttcgattttcggtggtttcggttttttttgttattttcggttttattttggggcggag

SEQ ID NO: 27938 - DNA, 521 bp, Artificial Sequence
  chemically treated genomic DNA (Homo sapiens) CpG-island No: 27938
ctccgccccaaaataaaaccgaaaataacaaaaaaaaccgaaaccaccgaaaatcgaacgattccgaaaaaataaacccaacaacctcaaaatccgaacgaacgaccgcgacgcatcccccgccctatcaaaaaaactccgcccgacctaaacaaacacatcccccgccgcaccccgcccaaaaaacacgcgttaaaccgccgcctcaaccgctaccaacgaccgcctctaccgatacaactactacctccgccgccgcctctcgcaatccgaactatcctatactctctcaacaaacacaaccaaccgccgccgcgtcccttatccgcttcgatcgcgcgcccccgaccccgcgcacgcgaccccgccccgcgcgactccccgactacaaacgaacaaacgcgcgcgcacttacctcccacgccccctactaccaacacgaatcgaccccgccctatcccgcccccgcacgtaacgccactaaaaaatacaacgtacgcttacgcaaacacgcccccttt

SEQ ID NO: 27939 - DNA, 521 bp, Artificial Sequence
  chemically treated genomic DNA (Homo sapiens) CpG-island No: 27939
tttcgttttagggtaggatcggagatggtagaagaggtcgaggttatcgagggtcggacggtttcgggagggtgggtttagtagttttagggttcgggcgagcggtcgcggcgtatttttcgttttgttagagagatttcgttcggtttgagtaggtatatttttcgtcgtatttcgtttagagagtacgcgttggatcgtcgttttaatcgttgttagcggtcgtttttgtcggtgtaattattgttttcgtcgtcgtttttcgtagttcgggttgttttgtatttttttaatagatatagttaatcgtcgtcgcgttttttattcgtttcggtcgcgcgttttcgatttcgcgtacgcggtttcgtttcgcgcgatttttcggttgtaggcgagtaggcgcgcgcgtatttattttttacgttttttattgttagtacgggtcggtttcgttttgtttcgttttcgtacgtgacgttattggagagtatagcgtgcgtttgcgtagatacgtttttttt

SEQ ID NO: 27940 - DNA, 521 bp, Artificial Sequence
  chemically treated genomic DNA (Homo sapiens) CpG-island No: 27940
aaaaaaaacgtatctacgcaaacgcacgctatactctccaataacgtcacgtacgaaaacgaaacaaaacgaaaccgacccgtactaacaataaaaaacgtaaaaaataaatacgcgcgcgcctactcgcctacaaccgaaaaatcgcgcgaaacgaaaccgcgtacgcgaaatcgaaaacgcgcgaccgaaacgaataaaaaacgcgacgacgattaactatatctattaaaaaaatacaaaacaacccgaactacgaaaaacgacgacgaaaacaataattacaccgacaaaaacgaccgctaacaacgattaaaacgacgatccaacgcgtactctctaaacgaaatacgacgaaaaatatacctactcaaaccgaacgaaatctctctaacaaaacgaaaaatacgccgcgaccgctcgcccgaaccctaaaactactaaacccaccctcccgaaaccgtccgaccctcgataacctcgacctcttctaccatctccgatcctaccctaaaacgaaa

SEQ ID NO: 27941 - DNA, 732 bp, Artificial Sequence
  chemically treated genomic DNA (Homo sapiens) CpG-island No: 27941
aaaatcggttcgtggcgcgttttcggcgttcgattgttgcgtggtttcgagcgatttgtattttattcgttttcgtttttattttcgttttagttcgtagcggttatagttcgggaggttttaagggaattttcgtacgtttgcgcgcgtaattacgggacggcgggtcggcgtggcgcgcgtaattgttttggaaattacggcgcgcgtacgcgtaaacgcgggtgatggggggaagaaagattgagttgagagttttgtcgcggggggagggttttatttcgttttttcgcggtgggcgcgcgcgttggttcgtttttttgttgtacgttttcggttcgcgcgtttttttcggtgttttttttcgttttataagtatttttgttttttcgtatttgtgcgtcggtgtagtaggtagtgggaatattcgggtattttcgtagttgagcggcgattcgggcggcggcggcggtcgaggagtttttatggtagggacgaggcggagggaaggcgaaaggggggcgaggagttaagttagagttttcgcggggcgggttttcgagggaggtatagagggaaacggttttcgtagttcgaggagggttaggcgcggagtttgtcgtatttttcgcgtattttgtttagttcgggtttcggagatgtatttgtattaggtttttatcggagttgttaattttggagataattgttatttcgtgggtagcgtcgggg

SEQ ID NO: 27942 - DNA, 732 bp, Artificial Sequence
  chemically treated genomic DNA (Homo sapiens) CpG-island No: 27942
ccccgacgctacccacgaaataacaattatctccaaaattaacaactccgataaaaacctaatacaaatacatctccgaaacccgaactaaacaaaatacgcgaaaaatacgacaaactccgcgcctaaccctcctcgaactacgaaaaccgtttccctctatacctccctcgaaaacccgccccgcgaaaactctaacttaactcctcgcccccctttcgccttccctccgcctcgtccctaccataaaaactcctcgaccgccgccgccgcccgaatcgccgctcaactacgaaaatacccgaatattcccactacctactacaccgacgcacaaatacgaaaaaacaaaaatacttataaaacgaaaaaaaacaccgaaaaaaacgcgcgaaccgaaaacgtacaacaaaaaaacgaaccaacgcgcgcgcccaccgcgaaaaaacgaaataaaaccctccccccgcgacaaaactctcaactcaatctttcttccccccatcacccgcgtttacgcgtacgcgcgccgtaatttccaaaacaattacgcgcgccacgccgacccgccgtcccgtaattacgcgcgcaaacgtacgaaaattcccttaaaacctcccgaactataaccgctacgaactaaaacgaaaataaaaacgaaaacgaataaaatacaaatcgctcgaaaccacgcaacaatcgaacgccgaaaacgcgccacgaaccgatttt

SEQ ID NO: 27943 - DNA, 732 bp, Artificial Sequence
  chemically treated genomic DNA (Homo sapiens) CpG-island No: 27943
tttcgacgttgtttacggagtagtagttgtttttagggttgatagtttcggtgaggatttgatgtagatgtattttcggagttcgggttggatagaatgcgcgggaggtgcgataagtttcgcgtttgatttttttcgggttgcgagagtcgtttttttttgtgtttttttcggaaattcgtttcgcggaggttttggtttaatttttcgtttttttttcgtttttttttcgtttcgtttttgttatgggagtttttcgatcgtcgtcgtcgttcgggtcgtcgtttagttgcggaaatgttcggatgtttttattgtttgttgtatcggcgtataaatgcgggagggtaagggtgtttgtgaggcgggggagggtatcggggggaacgcgcgagtcgggagcgtgtagtaagggagcgggttagcgcgcgcgtttatcgcgggggagcgaggtagagtttttttttcgcggtaaagtttttagtttagttttttttttttttattattcgcgtttgcgcgtgcgcgcgtcgtggtttttagggtaattgcgcgcgttacgtcgattcgtcgtttcgtgattgcgcgcgtagacgtgcgggagtttttttggagtttttcgggttgtagtcgttgcggattggggcggaggtgggggcgggggcgagtggggtgtaggtcgttcggggttacgtagtagtcggacgtcggggacgcgttacgagtcggtttt

SEQ ID NO: 27944 - DNA, 732 bp, Artificial Sequence
  chemically treated genomic DNA (Homo sapiens) CpG-island No: 27944
aaaaccgactcgtaacgcgtccccgacgtccgactactacgtaaccccgaacgacctacaccccactcgcccccgcccccacctccgccccaatccgcaacgactacaacccgaaaaactccaaaaaaactcccgcacgtctacgcgcgcaatcacgaaacgacgaatcgacgtaacgcgcgcaattaccctaaaaaccacgacgcgcgcacgcgcaaacgcgaataataaaaaaaaaaaaaactaaactaaaaactttaccgcgaaaaaaaaactctacctcgctcccccgcgataaacgcgcgcgctaacccgctcccttactacacgctcccgactcgcgcgttccccccgataccctcccccgcctcacaaacacccttaccctcccgcatttatacgccgatacaacaaacaataaaaacatccgaacatttccgcaactaaacgacgacccgaacgacgacgacgatcgaaaaactcccataacaaaaacgaaacgaaaaaaaaacgaaaaaaaaacgaaaaattaaaccaaaacctccgcgaaacgaatttccgaaaaaaacacaaaaaaaaacgactctcgcaacccgaaaaaaatcaaacgcgaaacttatcgcacctcccgcgcattctatccaacccgaactccgaaaatacatctacatcaaatcctcaccgaaactatcaaccctaaaaacaactactactccgtaaacaacgtcgaaa

SEQ ID NO: 27945 - DNA, 713 bp, Artificial Sequence
  chemically treated genomic DNA (Homo sapiens) CpG-island No: 27945
gaaaggtatgtaagtatgtttatatacgtgtatatacgggtttttaaaagatttgcgtgtggtcgtaggggtttgtttcgtttttttcgggtttttttaggtttcggcgtttagcgattttattagtatttgggttcggcgcgcggtttttttttttttcgcgtttttcggggttttttgtttcgttcgcgtgttttattttttttagttttgttttatcgttgttttttgtttcgtttacgggttttattttatttttatttcgattcgtttttcgtttttttttgtttcgtttatcgcgtttcgtttttgttcgtttcgtttggtttttagtatttttaagatcggtgcgcgtttcgttttttttttttttttcgcgaggtagtttcgacgtcggaagtgtttggagcgcgcgatagcggcggggcggggcggggcggtttggaggttgtggcgcgcggtcggtagagggaggggagaggttattggggtcgtgttagtttgtcggtggggatttttgtaggtataggcgcggtcggggtttttcgtggagagtcgggggtttttgtcggtttttgattggggtgtcgttgtagggtcgtttttatgttgcgtttttcgatttgttttttattttttcgggtggtgggagagaagtagttttcgtaggagattatttttttggtttggtcgtttaagcgggattttattgt

SEQ ID NO: 27946 - DNA, 713 bp, Artificial Sequence
  chemically treated genomic DNA (Homo sapiens) CpG-island No: 27946
acaataaaatcccgcttaaacgaccaaaccaaaaaaataatctcctacgaaaactacttctctcccaccacccgaaaaaataaaaaacaaatcgaaaaacgcaacataaaaacgaccctacaacgacaccccaatcaaaaaccgacaaaaacccccgactctccacgaaaaaccccgaccgcgcctatacctacaaaaatccccaccgacaaactaacacgaccccaataacctctcccctccctctaccgaccgcgcgccacaacctccaaaccgccccgccccgccccgccgctatcgcgcgctccaaacacttccgacgtcgaaactacctcgcgaaaaaaaaaaaaaaaacgaaacgcgcaccgatcttaaaaatactaaaaaccaaacgaaacgaacaaaaacgaaacgcgataaacgaaacaaaaaaaaacgaaaaacgaatcgaaataaaaataaaataaaacccgtaaacgaaacaaaaaacaacgataaaacaaaactaaaaaaaataaaacacgcgaacgaaacaaaaaaccccgaaaaacgcgaaaaaaaaaaaaaccgcgcgccgaacccaaatactaataaaatcgctaaacgccgaaacctaaaaaaacccgaaaaaaacgaaacaaacccctacgaccacacgcaaatcttttaaaaacccgtatatacacgtatataaacatacttacatacctttc

SEQ ID NO: 27947 - DNA, 713 bp, Artificial Sequence
  chemically treated genomic DNA (Homo sapiens) CpG-island No: 27947
gtaatgagatttcgtttgggcgattagattaggaaaataattttttgcgggagttgttttttttttattattcggaaggatgggaaataggtcggaaaacgtaatatggggacggttttgtaacgatattttagttagaggtcggtaggagttttcggttttttacgaggagtttcgatcgcgtttgtatttgtaagagtttttatcggtagattaatacggttttagtggttttttttttttttttgtcggtcgcgcgttatagtttttaggtcgtttcgtttcgtttcgtcgttgtcgcgcgttttaggtattttcggcgtcgggattgtttcgcgagaggaggaggaggggcggggcgcgtatcggttttgggggtgttgagagttagacggggcggatagggacggggcgcggtgggcggggtagggaggagcgaggggcggatcgaggtgggggtaggatggggttcgtgggcggggtagggagtagcgatggggtagagttaggaagggtggggtacgcgggcggggtagggagtttcgaggggcgcggagagggagggagtcgcgcgtcggatttaggtgttggtgggatcgttgggcgtcgggatttgaaagggttcgagaagggcggggtaggtttttgcggttatacgtaggttttttgggaattcgtgtgtgtacgtgtgtgggtatgtttgtatatttttt

SEQ ID NO: 27948 - DNA, 713 bp, Artificial Sequence
  chemically treated genomic DNA (Homo sapiens) CpG-island No: 27948
aaaaaatatacaaacatacccacacacgtacacacacgaattcccaaaaaacctacgtataaccgcaaaaacctaccccgcccttctcgaaccctttcaaatcccgacgcccaacgatcccaccaacacctaaatccgacgcgcgactccctccctctccgcgcccctcgaaactccctaccccgcccgcgtaccccacccttcctaactctaccccatcgctactccctaccccgcccacgaaccccatcctacccccacctcgatccgcccctcgctcctccctaccccgcccaccgcgccccgtccctatccgccccgtctaactctcaacacccccaaaaccgatacgcgccccgcccctcctcctcctctcgcgaaacaatcccgacgccgaaaatacctaaaacgcgcgacaacgacgaaacgaaacgaaacgacctaaaaactataacgcgcgaccgacaaaaaaaaaaaaaaaaccactaaaaccgtattaatctaccgataaaaactcttacaaatacaaacgcgatcgaaactcctcgtaaaaaaccgaaaactcctaccgacctctaactaaaatatcgttacaaaaccgtccccatattacgttttccgacctatttcccatccttccgaataataaaaaaaaaacaactcccgcaaaaaattattttcctaatctaatcgcccaaacgaaatctcattac

SEQ ID NO: 27949 - DNA, 520 bp, Artificial Sequence
  chemically treated genomic DNA (Homo sapiens) CpG-island No: 27949
ttagagttaggacgtggtttttggtttcgaggttatcgaggtttagtataagtattagataacgcgcgttagaagtaagggcggcgttttcgaggtgtattttaagtttacgtattttatttttcggatcgttcggttcgtatgtgtttaggttacgggttatgtttgtcgtttgcggtggtaataacggatttacgtttatcgtcgcggtgttggttaatttattgcgtttgttttggtttacgcgtaggggtcgtaagggggttaattattacggtttattgttttaggtgggtatcgtgagttcggttttggacgttaagggttaggaggtgttcgcgttttttcgcggttgttgtttatggtggcgtttaacgatttcgtgttcgatggttgggatattttgtcgtcgaatttggtcgaggcgatgcggttcgcgaaggtgttgattgagggttgtaggagtaattgtggtcgtatatggaggttttgtagtttcggtttttggtatatattttat

SEQ ID NO: 27950 - DNA, 520 bp, Artificial Sequence
  chemically treated genomic DNA (Homo sapiens) CpG-island No: 27950
ataaaatatataccaaaaaccgaaactacaaaacctccatatacgaccacaattactcctacaaccctcaatcaacaccttcgcgaaccgcatcgcctcgaccaaattcgacgacaaaatatcccaaccatcgaacacgaaatcgttaaacgccaccataaacaacaaccgcgaaaaaacgcgaacacctcctaacccttaacgtccaaaaccgaactcacgatacccacctaaaacaataaaccgtaataattaacccccttacgacccctacgcgtaaaccaaaacaaacgcaataaattaaccaacaccgcgacgataaacgtaaatccgttattaccaccgcaaacgacaaacataacccgtaacctaaacacatacgaaccgaacgatccgaaaaataaaatacgtaaacttaaaatacacctcgaaaacgccgcccttacttctaacgcgcgttatctaatacttatactaaacctcgataacctcgaaaccaaaaaccacgtcctaactctaa

SEQ ID NO: 27951 - DNA, 520 bp, Artificial Sequence
  chemically treated genomic DNA (Homo sapiens) CpG-island No: 27951
gtgggatgtatattaaaggtcggggttgtagggtttttatgtgcggttatagttgtttttgtagtttttaattagtattttcgcgagtcgtatcgtttcggttaggttcggcgataagatgttttagttatcgaatacgaggtcgttgggcgttattatgggtagtagtcgcggaagggcgcgaatattttttggtttttggcgtttaagatcgggtttacggtgtttatttgagatagtgaatcgtagtagttggtttttttgcgatttttgcgcgtgggttaggatagacgtagtaggttggttagtatcgcggcggtgagcgtggattcgttgttattatcgtaggcgataagtatgattcgtagtttgggtatatgcgggtcgggcggttcggaaggtgaagtgcgtggatttgaggtgtatttcgaggacgtcgtttttgtttttgacgcgcgttgtttggtatttgtattgagtttcgatggtttcgaggttaaagattacgttttggttttgg

SEQ ID NO: 27952 - DNA, 520 bp, Artificial Sequence
  chemically treated genomic DNA (Homo sapiens) CpG-island No: 27952
ccaaaaccaaaacgtaatctttaacctcgaaaccatcgaaactcaatacaaataccaaacaacgcgcgtcaaaaacaaaaacgacgtcctcgaaatacacctcaaatccacgcacttcaccttccgaaccgcccgacccgcatatacccaaactacgaatcatacttatcgcctacgataataacaacgaatccacgctcaccgccgcgatactaaccaacctactacgtctatcctaacccacgcgcaaaaatcgcaaaaaaaccaactactacgattcactatctcaaataaacaccgtaaacccgatcttaaacgccaaaaaccaaaaaatattcgcgcccttccgcgactactacccataataacgcccaacgacctcgtattcgataactaaaacatcttatcgccgaacctaaccgaaacgatacgactcgcgaaaatactaattaaaaactacaaaaacaactataaccgcacataaaaaccctacaaccccgacctttaatatacatcccac

SEQ ID NO: 27953 - DNA, 561 bp, Artificial Sequence
  chemically treated genomic DNA (Homo sapiens) CpG-island No: 27953
tttttaggtgagttcgttttcgcgggattgggttcggggaaggtttttaggattcgtttcgcgtgagcggtttggaggttgcgggagggtagagtagggcgcgcgggagattgttcgttttcgggcgtttagggttcggttttttagcgttatcgtcgtagtaggtgggggtttagtgggcgggggcggggttcggttttgggcggagtcgaggcggcggcggcgtaggttggggtcggggtcggggcgggagtcggagttcgagttggagtagcgagtcgggttgtcggggcgatcgcgggagttcgtcgtgcgtcgtggttgggatcggtttggtcgagcgcgtcggcgtcgcggtcgtagataaagggcggttcgcgttcgggtcgttacgttttcgggttttgtttcggtaagtggttttttttcgttggtttttttttttcgtcgtttgcgtttttcggagttcggcgggtttcggagaagcggggaagagatgagattttttcgttcgtattgtttttttattttattttaataataagttttttaggttaagtt

SEQ ID NO: 27954 - DNA, 561 bp, Artificial Sequence
  chemically treated genomic DNA (Homo sapiens) CpG-island No: 27954
aacttaacctaaaaaacttattattaaaataaaataaaaaaacaatacgaacgaaaaaatctcatctcttccccgcttctccgaaacccgccgaactccgaaaaacgcaaacgacgaaaaaaaaaaaccaacgaaaaaaaaccacttaccgaaacaaaacccgaaaacgtaacgacccgaacgcgaaccgccctttatctacgaccgcgacgccgacgcgctcgaccaaaccgatcccaaccacgacgcacgacgaactcccgcgatcgccccgacaacccgactcgctactccaactcgaactccgactcccgccccgaccccgaccccaacctacgccgccgccgcctcgactccgcccaaaaccgaaccccgcccccgcccactaaacccccacctactacgacgataacgctaaaaaaccgaaccctaaacgcccgaaaacgaacaatctcccgcgcgccctactctaccctcccgcaacctccaaaccgctcacgcgaaacgaatcctaaaaaccttccccgaacccaatcccgcgaaaacgaactcacctaaaaa

SEQ ID NO: 27955 - DNA, 561 bp, Artificial Sequence
  chemically treated genomic DNA (Homo sapiens) CpG-island No: 27955
ggtttggtttggggggtttattgttagggtaaggtggggaggtagtgcgggcggggaagttttatttttttttcgttttttcggagttcgtcgaatttcgagaggcgtaggcggcgggaggagaaagttagcggaggggagttatttatcgaggtagagttcgagagcgtggcggttcgggcgcgagtcgttttttgtttgcggtcgcggcgtcggcgcgttcggttaggtcggttttagttacggcgtacggcgagttttcgcggtcgtttcgatagttcggttcgttgttttagttcgggtttcggttttcgtttcggtttcggttttagtttgcgtcgtcgtcgtttcggtttcgtttagagtcgggtttcgttttcgtttattgggtttttatttgttgcggcggtggcgttggggagtcgggttttgggcgttcggaggcgggtagtttttcgcgcgttttgttttgttttttcgtagtttttaggtcgtttacgcggggcgggttttgggggtttttttcggatttagtttcgcggagacgagtttatttgggga

SEQ ID NO: 27956 - DNA, 561 bp, Artificial Sequence
  chemically treated genomic DNA (Homo sapiens) CpG-island No: 27956
tccccaaataaactcgtctccgcgaaactaaatccgaaaaaaacccccaaaacccgccccgcgtaaacgacctaaaaactacgaaaaaacaaaacaaaacgcgcgaaaaactacccgcctccgaacgcccaaaacccgactccccaacgccaccgccgcaacaaataaaaacccaataaacgaaaacgaaacccgactctaaacgaaaccgaaacgacgacgacgcaaactaaaaccgaaaccgaaacgaaaaccgaaacccgaactaaaacaacgaaccgaactatcgaaacgaccgcgaaaactcgccgtacgccgtaactaaaaccgacctaaccgaacgcgccgacgccgcgaccgcaaacaaaaaacgactcgcgcccgaaccgccacgctctcgaactctacctcgataaataactcccctccgctaactttctcctcccgccgcctacgcctctcgaaattcgacgaactccgaaaaaacgaaaaaaaaataaaacttccccgcccgcactacctccccaccttaccctaacaataaaccccccaaaccaaacc

SEQ ID NO: 27957 - DNA, 629 bp, Artificial Sequence
  chemically treated genomic DNA (Homo sapiens) CpG-island No: 27957
ttatcgcgggtcgagggtagtgggtagagtttttcggttttttgtaggaagcgttgggttttttcgcggttgtcggcgtttagggtttttcgggcgatttcgatatattttttagttttatttttgtttttttttatagtttgttttttttttcgtttttttcggtagcgtagttaagaagggcggaagtcgtcgtcgcggaggaggcgaggcgggatcggttgggggcgtgcggcggtagcggggaggagcgtaggggatcgcggtagcggttgcgacggttcgggcggacgggcgggtttcgtagtttcgtttttttacggcggttttttcgtttttcgcgggtttttagggcgcgattcgtattcgtttcggtttaggattaattttttgggtcggggcgttcgagttgattcggtggttcgcgtacggcgttagtaggttcgaagcggatttgttcgggaggcggacgatagtagtcgggttgtttatcgcggggaggggtttcgttcgggattcgattgtcggtattggtagcgtcgtgttttgtgatttttaggcgaggttttcgtagtttaggttaggaggatagggttcgggaaggggatattcgtttttagtaaaattgt

SEQ ID NO: 27958 - DNA, 629 bp, Artificial Sequence
  chemically treated genomic DNA (Homo sapiens) CpG-island No: 27958
acaattttactaaaaacgaatatccccttcccgaaccctatcctcctaacctaaactacgaaaacctcgcctaaaaatcacaaaacacgacgctaccaataccgacaatcgaatcccgaacgaaacccctccccgcgataaacaacccgactactatcgtccgcctcccgaacaaatccgcttcgaacctactaacgccgtacgcgaaccaccgaatcaactcgaacgccccgacccaaaaaattaatcctaaaccgaaacgaatacgaatcgcgccctaaaaacccgcgaaaaacgaaaaaaccgccgtaaaaaaacgaaactacgaaacccgcccgtccgcccgaaccgtcgcaaccgctaccgcgatcccctacgctcctccccgctaccgccgcacgcccccaaccgatcccgcctcgcctcctccgcgacgacgacttccgcccttcttaactacgctaccgaaaaaaacgaaaaaaaaaacaaactataaaaaaaaacaaaaataaaactaaaaaatatatcgaaatcgcccgaaaaaccctaaacgccgacaaccgcgaaaaaacccaacgcttcctacaaaaaaccgaaaaactctacccactaccctcgacccgcgataa

SEQ ID NO: 27959 - DNA, 629 bp, Artificial Sequence
  chemically treated genomic DNA (Homo sapiens) CpG-island No: 27959
gtaattttattgaaaacgagtgtttttttttcggattttgtttttttggtttgagttgcgagggtttcgtttggaggttatagggtacggcgttattaatgtcggtaatcgggtttcgggcggaattttttttcgcgatgggtagttcggttgttatcgttcgtttttcgggtaggttcgtttcgagtttgttggcgtcgtgcgcggattatcgagttagttcggacgtttcggtttaggaggttggttttgggtcgggacggatgcggatcgcgttttaggggttcgcggggggcggggaggtcgtcgtgaggaggcggagttgcgaggttcgttcgttcgttcgggtcgtcgtagtcgttgtcgcggttttttgcgttttttttcgttgtcgtcgtacgtttttagtcggtttcgtttcgtttttttcgcggcggcggttttcgttttttttagttgcgttgtcggaggaaacggaagaaggagtaagttatggaggggaatagggatgaggttgagaaatgtgtcgagatcgttcgggaggttttgaacgtcggtaatcgcgagaaggtttagcgttttttgtagaaggtcgagaagttttatttattgttttcggttcgcggtga

SEQ ID NO: 27960 - DNA, 629 bp, Artificial Sequence
  chemically treated genomic DNA (Homo sapiens) CpG-island No: 27960
tcaccgcgaaccgaaaacaataaataaaacttctcgaccttctacaaaaaacgctaaaccttctcgcgattaccgacgttcaaaacctcccgaacgatctcgacacatttctcaacctcatccctattcccctccataacttactccttcttccgtttcctccgacaacgcaactaaaaaaaacgaaaaccgccgccgcgaaaaaaacgaaacgaaaccgactaaaaacgtacgacgacaacgaaaaaaaacgcaaaaaaccgcgacaacgactacgacgacccgaacgaacgaacgaacctcgcaactccgcctcctcacgacgacctccccgccccccgcgaacccctaaaacgcgatccgcatccgtcccgacccaaaaccaacctcctaaaccgaaacgtccgaactaactcgataatccgcgcacgacgccaacaaactcgaaacgaacctacccgaaaaacgaacgataacaaccgaactacccatcgcgaaaaaaaattccgcccgaaacccgattaccgacattaataacgccgtaccctataacctccaaacgaaaccctcgcaactcaaaccaaaaaaacaaaatccgaaaaaaaaacactcgttttcaataaaattac

SEQ ID NO: 27961 - DNA, 1234 bp, Artificial Sequence
  chemically treated genomic DNA (Homo sapiens) CpG-island No: 27961
ttttggttttttcggagttttttttagttttatcgttagtttgcggcgcgtatacgttcgcgagcggaggaggaacggagaatatagaattattaaggcggcgcgtttattttttatcgcggcgcgtttcgtcgcgagcgcgttttcgtattttgtcggggttttcggttcgcggcgcgtcgtaggggcgatttcgttcgttcgtttttcgtcgcgcgttcgttacggtcgcgcgttttcgttcgtcggtttttagcggcgttgcgcgcgttatttaatcgtcgtcgttcgtcgcgagattcgaggttgtttcgttagtagtcgataaaatatttttttttatttttttaaattttgttttcgcgcgtttttaatcgtcgttattttatttttatttttttgtgtaacgggtttttttttcgtcggtaaaaattcgcggagttatcgagcgtttttgcgaagtttattatttcgaatttcgttgaagtttaagtaagtaaggtagagaaaaggttaatcggatttacggtgagattttattatttattttttcgtcgtatcgcgatttaaattgcgttgtttttcgttttttttgttttttttatattgtagaatgtttttttattcgggaattcggattgtttattttattaatggttgttattcgttttcgggacgcgtttttgagattttagttaatgagtaagcgaagaaaagggtggaggggcgggcgtttttaattttaagtcgcgattggggcgtggggggagaggcgggggaaggcggagggatgggaacgggggagaagaagggtatcgcggcgggagggaagaaatagagcgagttacgttgtaggagcgtagttattagtcggttgcgattacgtgtttgggaggaggagttgagattttaggggaggggcgcgcggtagcgtttcgggttttttagtagggttttagagattacgtgaagttttttcggtatgtagtacgtcgtttttattatttttagttttatttttagcgtttttcgggcggagatttgcgattcgtagtcgtttttcggggtttcggatattttttttttatttttttaatttttggcggtttttttcgtttgataggtggcgcgaacgcgtttagtgagaggagtttgaggtttgttttgacgttttttatagttttagtagagatttcgtgtttttttcgtttaggcgagtttttagttattaata

SEQ ID NO: 27962 - DNA, 1234 bp, Artificial Sequence
  chemically treated genomic DNA (Homo sapiens) CpG-island No: 27962
tattaataactaaaaactcgcctaaacgaaaaaaacacgaaatctctactaaaactataaaaaacgtcaaaacaaacctcaaactcctctcactaaacgcgttcgcgccacctatcaaacgaaaaaaaccgccaaaaattaaaaaaataaaaaaaaaatatccgaaaccccgaaaaacgactacgaatcgcaaatctccgcccgaaaaacgctaaaaataaaactaaaaataataaaaacgacgtactacataccgaaaaaacttcacgtaatctctaaaaccctactaaaaaacccgaaacgctaccgcgcgcccctcccctaaaatctcaactcctcctcccaaacacgtaatcgcaaccgactaataactacgctcctacaacgtaactcgctctatttcttccctcccgccgcgatacccttcttctcccccgttcccatccctccgccttcccccgcctctccccccacgccccaatcgcgacttaaaattaaaaacgcccgcccctccacccttttcttcgcttactcattaactaaaatctcaaaaacgcgtcccgaaaacgaataacaaccattaataaaataaacaatccgaattcccgaataaaaaaacattctacaatataaaaaaaacaaaaaaaacgaaaaacaacgcaatttaaatcgcgatacgacgaaaaaataaataataaaatctcaccgtaaatccgattaaccttttctctaccttacttacttaaacttcaacgaaattcgaaataataaacttcgcaaaaacgctcgataactccgcgaatttttaccgacgaaaaaaaaacccgttacacaaaaaaataaaaataaaataacgacgattaaaaacgcgcgaaaacaaaatttaaaaaaataaaaaaaaatattttatcgactactaacgaaacaacctcgaatctcgcgacgaacgacgacgattaaataacgcgcgcaacgccgctaaaaaccgacgaacgaaaacgcgcgaccgtaacgaacgcgcgacgaaaaacgaacgaacgaaatcgcccctacgacgcgccgcgaaccgaaaaccccgacaaaatacgaaaacgcgctcgcgacgaaacgcgccgcgataaaaaataaacgcgccgccttaataattctatattctccgttcctcctccgctcgcgaacgtatacgcgccgcaaactaacgataaaactaaaaaaaactccgaaaaaaccaaaa

SEQ ID NO: 27963 - DNA, 1234 bp, Artificial Sequence
  chemically treated genomic DNA (Homo sapiens) CpG-island No: 27963
tgttggtggttggggattcgtttagacggaagaaatacggaatttttattaaggttgtggaaggcgttagggtaaattttagattttttttattggacgcgttcgcgttatttgttagacgggaggagtcgttagggattgagagggtagggaaggggtgttcggggtttcggaaagcggttgcgggtcgtaggttttcgttcgagaggcgttgggaatggggttgggagtggtgggggcggcgtgttatatatcgaggagattttacgtggtttttagagttttgttaggggattcgggacgttatcgcgcgttttttttttgaggttttagtttttttttttaggtacgtgatcgtagtcggttggtaattgcgtttttgtagcgtagttcgttttgttttttttttttcgtcgcggtgttttttttttttttcgtttttattttttcgttttttttcgtttttttttttacgttttaatcgcggtttgagattagaagcgttcgtttttttattttttttttcgtttgtttattggttgaagttttaaggacgcgtttcgagggcgggtggtagttattggtgggatgagtaattcgagttttcggatgagggaatattttgtagtataaagggagtagggaaggcgggagatagcgtagtttgaatcgcggtgcgacgaaggagtaggtggtgggattttatcgtgggttcgattagttttttttttgttttgtttgtttgagttttagcggaattcgaaatggtaaatttcgtagagacgttcgatgatttcgcgggtttttgtcggcgagagaaaaattcgttatatagagggatgggggtgaagtggcgacggttgggaacgcgcggagataggatttagaagagtggggggaggtgttttgtcggttgttagcggagtagtttcggatttcgcggcgggcggcgacggttgggtggcgcgcgtagcgtcgttgggggtcggcgggcggaggcgcgcggtcgtggcgagcgcgcggcggggggcgaacgggcggggtcgtttttgcggcgcgtcgcgggtcggagatttcggtagggtgcggggacgcgttcgcggcgggacgcgtcgcggtgggggatgggcgcgtcgttttggtaattttatatttttcgtttttttttcgttcgcgggcgtgtgcgcgtcgtaggttggcggtaaggttggaaaggatttcggaaaggttaaga

SEQ ID NO: 27964 - DNA, 1234 bp, Artificial Sequence
  chemically treated genomic DNA (Homo sapiens) CpG-island No: 27964
tcttaacctttccgaaatcctttccaaccttaccgccaacctacgacgcgcacacgcccgcgaacgaaaaaaaaacgaaaaatataaaattaccaaaacgacgcgcccatcccccaccgcgacgcgtcccgccgcgaacgcgtccccgcaccctaccgaaatctccgacccgcgacgcgccgcaaaaacgaccccgcccgttcgccccccgccgcgcgctcgccacgaccgcgcgcctccgcccgccgacccccaacgacgctacgcgcgccacccaaccgtcgccgcccgccgcgaaatccgaaactactccgctaacaaccgacaaaacacctccccccactcttctaaatcctatctccgcgcgttcccaaccgtcgccacttcacccccatccctctatataacgaatttttctctcgccgacaaaaacccgcgaaatcatcgaacgtctctacgaaatttaccatttcgaattccgctaaaactcaaacaaacaaaacaaaaaaaaaactaatcgaacccacgataaaatcccaccacctactccttcgtcgcaccgcgattcaaactacgctatctcccgccttccctactccctttatactacaaaatattccctcatccgaaaactcgaattactcatcccaccaataactaccacccgccctcgaaacgcgtccttaaaacttcaaccaataaacaaacgaaaaaaaaaataaaaaaacgaacgcttctaatctcaaaccgcgattaaaacgtaaaaaaaaaaacgaaaaaaaacgaaaaaataaaaacgaaaaaaaaaaaaaacaccgcgacgaaaaaaaaaaaacaaaacgaactacgctacaaaaacgcaattaccaaccgactacgatcacgtacctaaaaaaaaaaactaaaacctcaaaaaaaaaacgcgcgataacgtcccgaatcccctaacaaaactctaaaaaccacgtaaaatctcctcgatatataacacgccgcccccaccactcccaaccccattcccaacgcctctcgaacgaaaacctacgacccgcaaccgctttccgaaaccccgaacaccccttccctaccctctcaatccctaacgactcctcccgtctaacaaataacgcgaacgcgtccaataaaaaaaatctaaaatttaccctaacgccttccacaaccttaataaaaattccgtatttcttccgtctaaacgaatccccaaccaccaaca

SEQ ID NO: 27965 - DNA, 571 bp, Artificial Sequence
  chemically treated genomic DNA (Homo sapiens) CpG-island No: 27965
cgtgataagtacgttttcggttgttaaaataatttaaaaatgtgttttaaaatacgttcgtaaagtttcgggtcggtcggtcgtttgttttttatttagttcgatcgttcgacgttttattgtcgagcgagggcgagtaagttaatgtgtttagtttttttttttcgatttttttcgtttcgttttttcgtttttttcgttttcggatagtttagtagtttttattttttagatttttttcgaattcgtagttttttgggtagtcgttgttcgagtgttgacggaagcggtcgaagttcgggttcggagttggttcgggcgcggagcggaggttcgcgcgtttttcgggtagtcgagcgcgtaggcgtaggttttagtaatcgtcggttggaggcgggcgaatcgtagtagggaaagatttacgttgcgggacgcggtgtatgttgcggcgttgacggtttttgtttttttcgcgggttttcgattttttgttttagattttttgtttagcgatttggggttttttttcgtttgtttattggtaggagtcgtaattttagtagtaatagtt

SEQ ID NO: 27966 - DNA, 571 bp, Artificial Sequence
  chemically treated genomic DNA (Homo sapiens) CpG-island No: 27966
aactattactactaaaattacgactcctaccaataaacaaacgaaaaaaaaccccaaatcgctaaacaaaaaatctaaaacaaaaaatcgaaaacccgcgaaaaaaacaaaaaccgtcaacgccgcaacatacaccgcgtcccgcaacgtaaatctttccctactacgattcgcccgcctccaaccgacgattactaaaacctacgcctacgcgctcgactacccgaaaaacgcgcgaacctccgctccgcgcccgaaccaactccgaacccgaacttcgaccgcttccgtcaacactcgaacaacgactacccaaaaaactacgaattcgaaaaaaatctaaaaaataaaaactactaaactatccgaaaacgaaaaaaacgaaaaaacgaaacgaaaaaaatcgaaaaaaaaaaactaaacacattaacttactcgccctcgctcgacaataaaacgtcgaacgatcgaactaaataaaaaacaaacgaccgaccgacccgaaactttacgaacgtattttaaaacacatttttaaattattttaacaaccgaaaacgtacttatcacg

SEQ ID NO: 27967 - DNA, 571 bp, Artificial Sequence
  chemically treated genomic DNA (Homo sapiens) CpG-island No: 27967
ggttattgttgttgggattgcgatttttattagtaagtaaacgagaggggattttaagtcgttaagtagaaaatttagggtagggagtcggaaattcgcggaaggagtagaggtcgttagcgtcgtagtatgtatcgcgtttcgtagcgtgggtttttttttattgcggttcgttcgtttttaatcggcggttattgggatttgcgtttgcgcgttcggttgttcgggaggcgcgcgagttttcgtttcgcgttcgagttagtttcgggttcggatttcggtcgttttcgttagtattcgggtaacggttgtttaagaagttgcgggttcgagaaagatttggaaaatggaggttgttgagttattcgggggcgggaaaagcgggaaggcggggcggggaggatcggggaaaggaggttaggtatattggtttgttcgttttcgttcggtagtaggacgtcgggcggtcgggttaggtgagaggtaggcgatcggtcggttcggggttttgcgaacgtgttttgaggtatatttttgggttgttttggtaatcggaggcgtgtttgttacg

SEQ ID NO: 27968 - DNA, 571 bp, Artificial Sequence
  chemically treated genomic DNA (Homo sapiens) CpG-island No: 27968
cgtaacaaacacgcctccgattaccaaaacaacccaaaaatatacctcaaaacacgttcgcaaaaccccgaaccgaccgatcgcctacctctcacctaacccgaccgcccgacgtcctactaccgaacgaaaacgaacaaaccaatatacctaacctcctttccccgatcctccccgccccgccttcccgcttttcccgcccccgaataactcaacaacctccattttccaaatctttctcgaacccgcaacttcttaaacaaccgttacccgaatactaacgaaaacgaccgaaatccgaacccgaaactaactcgaacgcgaaacgaaaactcgcgcgcctcccgaacaaccgaacgcgcaaacgcaaatcccaataaccgccgattaaaaacgaacgaaccgcaataaaaaaaaacccacgctacgaaacgcgatacatactacgacgctaacgacctctactccttccgcgaatttccgactccctaccctaaattttctacttaacgacttaaaatcccctctcgtttacttactaataaaaatcgcaatcccaacaacaataacc

SEQ ID NO: 27969 - DNA, 653 bp, Artificial Sequence
  chemically treated genomic DNA (Homo sapiens) CpG-island No: 27969
ttttcgtatcgaagggtttagtattagtagttcgattattacgcggcgggatgtttgtggttggtattgatttcggtttttttaattgttatattgttgtcgcgagaagtggcggtatcgagattatcgttaatgagtatagcgataggtgtatttcgtaagtgtttttgttgagtattatttcgattttaagaaacgtttttttttttcgtttttaacgtttgttttgtttgttcgttttttcggatttttttttaacgtgcgtcgaatttcgagatgataggtgtaattcgttaatcgtagtttttagagatcgtcgggtggtagtcggattttttcgtttcgtaaagtttttttttttttaaggacgagggatcgtattagtttgcgtagtttttttttttgtatttacgtacgttttttgtttcgtgtcgttgttttttaacgttttttttgtttgcgaggaagaggttgttgtgggatagtttttggcgttcggaatattgagaaagattttcggttgtttttaacgaggtttacgtgggattatcggtttcgcgttagttgttttttttttttttttcgtttttttgggtgatagtttttttttagaaaagtaaaaagttagtttcggttgtatacgttagagatga

SEQ ID NO: 27970 - DNA, 653 bp, Artificial Sequence
  chemically treated genomic DNA (Homo sapiens) CpG-island No: 27970
tcatctctaacgtatacaaccgaaactaactttttacttttctaaaaaaaaactatcacccaaaaaaacgaaaaaaaaaaaaaaaacaactaacgcgaaaccgataatcccacgtaaacctcgttaaaaacaaccgaaaatctttctcaatattccgaacgccaaaaactatcccacaacaacctcttcctcgcaaacaaaaaaaacgttaaaaaacaacgacacgaaacaaaaaacgtacgtaaatacaaaaaaaaaaactacgcaaactaatacgatccctcgtccttaaaaaaaaaaaaactttacgaaacgaaaaaatccgactaccacccgacgatctctaaaaactacgattaacgaattacacctatcatctcgaaattcgacgcacgttaaaaaaaaatccgaaaaaacgaacaaacaaaacaaacgttaaaaacgaaaaaaaaaaacgtttcttaaaatcgaaataatactcaacaaaaacacttacgaaatacacctatcgctatactcattaacgataatctcgataccgccacttctcgcgacaacaatataacaattaaaaaaaccgaaatcaataccaaccacaaacatcccgccgcgtaataatcgaactactaatactaaacccttcgatacgaaaa

SEQ ID NO: 27971 - DNA, 653 bp, Artificial Sequence
  chemically treated genomic DNA (Homo sapiens) CpG-island No: 27971
ttatttttgacgtgtgtagtcgaagttgattttttatttttttgagaaaaagttgttatttagagggacggggaaaggaaggagggtagttggcgcggggtcgataattttacgtaaatttcgttagaggtaatcggagattttttttaatatttcggacgttaggggttgttttatagtaatttttttttcgtaagtaaaagaggcgttgggggatagcggtacgaggtaggggacgtgcgtaggtatagaaaagagagttgcgtaaattagtgcggtttttcgtttttgaaggaaaagaagttttgcggggcgaggaagttcgattgttattcggcggtttttagggattgcggttgacgggttgtatttgttatttcggggttcggcgtacgttaggggaaaattcgaggaagcgagtagataggataaacgttaaggacgggagagaaaaacgttttttagggtcgaggtgatgtttagtagaggtatttacggggtatatttgtcgttgtatttattggcgatggtttcgatgtcgttatttttcgcgatagtaatgtagtagttgagaaagtcgaggttaatgttaattatagatatttcgtcgcgtgatggtcgggttgttggtattgaatttttcggtacgggaa

SEQ ID NO: 27972 - DNA, 653 bp, Artificial Sequence
  chemically treated genomic DNA (Homo sapiens) CpG-island No: 27972
ttcccgtaccgaaaaattcaataccaacaacccgaccatcacgcgacgaaatatctataattaacattaacctcgactttctcaactactacattactatcgcgaaaaataacgacatcgaaaccatcgccaataaatacaacgacaaatataccccgtaaatacctctactaaacatcacctcgaccctaaaaaacgtttttctctcccgtccttaacgtttatcctatctactcgcttcctcgaattttcccctaacgtacgccgaaccccgaaataacaaatacaacccgtcaaccgcaatccctaaaaaccgccgaataacaatcgaacttcctcgccccgcaaaacttcttttccttcaaaaacgaaaaaccgcactaatttacgcaactctcttttctatacctacgcacgtcccctacctcgtaccgctatcccccaacgcctcttttacttacgaaaaaaaaattactataaaacaacccctaacgtccgaaatattaaaaaaaatctccgattacctctaacgaaatttacgtaaaattatcgaccccgcgccaactaccctccttcctttccccgtccctctaaataacaactttttctcaaaaaaataaaaaatcaacttcgactacacacgtcaaaaataa

SEQ ID NO: 27973 - DNA, 586 bp, Artificial Sequence
  chemically treated genomic DNA (Homo sapiens) CpG-island No: 27973
ttcggtatcgcggcgaggtttaggttgtggaggcggcggcgagaggagcggttgaagacgagaaggaggaggggaggaggcggagggtcgaggaagagtaggcggcgagcgagggagggggcggtagttgttagttatatttatcgagcgcgggcgatcgtcggaggagagcgatcgggggagtttggggggcgggggagagatttagtcggagcgttaggggttgggaaggaggcggtgcgggcggattggcgggcgagttgtttacggggaagggggcggaggggagggaaggggaggagggttagtaaggagggatggagagggggaagtggtggcggcggttgcgtgcgcggtttcgtcggtcgggcgcgttttcgtggagtgcgcgcgtacgtcggggtagagggcggagcggcgaggacgagggcgcggtcggcggggcgggagggcgtagggttgttcgcgcgagcgtagggcgggaggcgggcgttgtatttgtcggcgtcgtttaggattgggggcggttttttaattggaaggagtcgggaagggtttgattagaggaaggaaaggtataaggggt

SEQ ID NO: 27974 - DNA, 586 bp, Artificial Sequence
  chemically treated genomic DNA (Homo sapiens) CpG-island No: 27974
accccttatacctttccttcctctaatcaaacccttcccgactccttccaattaaaaaaccgcccccaatcctaaacgacgccgacaaatacaacgcccgcctcccgccctacgctcgcgcgaacaaccctacgccctcccgccccgccgaccgcgccctcgtcctcgccgctccgccctctaccccgacgtacgcgcgcactccacgaaaacgcgcccgaccgacgaaaccgcgcacgcaaccgccgccaccacttccccctctccatccctccttactaaccctcctccccttccctcccctccgcccccttccccgtaaacaactcgcccgccaatccgcccgcaccgcctccttcccaacccctaacgctccgactaaatctctcccccgccccccaaactcccccgatcgctctcctccgacgatcgcccgcgctcgataaatataactaacaactaccgccccctccctcgctcgccgcctactcttcctcgaccctccgcctcctcccctcctccttctcgtcttcaaccgctcctctcgccgccgcctccacaacctaaacctcgccgcgataccgaa

SEQ ID NO: 27975 - DNA, 586 bp, Artificial Sequence
  chemically treated genomic DNA (Homo sapiens) CpG-island No: 27975
gttttttatgttttttttttttttgattaagtttttttcggttttttttagttggaaggtcgtttttagttttgagcggcgtcgataggtgtagcgttcgtttttcgttttgcgttcgcgcgggtaattttacgttttttcgtttcgtcggtcgcgttttcgttttcgtcgtttcgttttttgtttcggcgtgcgcgcgtattttacgggggcgcgttcggtcggcggggtcgcgtacgtagtcgtcgttattatttttttttttttatttttttttgttggtttttttttttttttttttttttcgttttttttttcgtaggtagttcgttcgttagttcgttcgtatcgttttttttttagtttttagcgtttcggttgggtttttttttcgttttttaggttttttcggtcgttttttttcggcggtcgttcgcgttcggtggatgtggttggtagttgtcgttttttttttcgttcgtcgtttgttttttttcggtttttcgttttttttttttttttttttcgtttttagtcgtttttttcgtcgtcgtttttatagtttgggtttcgtcgcgatgtcgga

SEQ ID NO: 27976 - DNA, 586 bp, Artificial Sequence
  chemically treated genomic DNA (Homo sapiens) CpG-island No: 27976
tccgacatcgcgacgaaacccaaactataaaaacgacgacgaaaaaaacgactaaaaacgaaaaaaaaaaaaaaaaaaaacgaaaaaccgaaaaaaaacaaacgacgaacgaaaaaaaaaacgacaactaccaaccacatccaccgaacgcgaacgaccgccgaaaaaaaacgaccgaaaaaacctaaaaaacgaaaaaaaaacccaaccgaaacgctaaaaactaaaaaaaaaacgatacgaacgaactaacgaacgaactacctacgaaaaaaaaaacgaaaaaaaaaaaaaaaaaaaaaaaccaacaaaaaaaaataaaaaaaaaaaaataataacgacgactacgtacgcgaccccgccgaccgaacgcgcccccgtaaaatacgcgcgcacgccgaaacaaaaaacgaaacgacgaaaacgaaaacgcgaccgacgaaacgaaaaaacgtaaaattacccgcgcgaacgcaaaacgaaaaacgaacgctacacctatcgacgccgctcaaaactaaaaacgaccttccaactaaaaaaaaccgaaaaaaacttaatcaaaaaaaaaaaaaacataaaaaac

SEQ ID NO: 27977 - DNA, 752 bp, Artificial Sequence
  chemically treated genomic DNA (Homo sapiens) CpG-island No: 27977
gtgggggtcggaaaagcgcgggagggggcgtggtttcgagaaggcggagataagatggtcgtttatagcgtttggaggatttaagaggcggtggtcggggttacgtttcgggtaggagggtcgttttgtgcgcgttcgttttatgatgtttgcgcgcgtttttcgcgcgtcgcgttgcgggcggggcgggttttcgggattttaagggttcggttacggaagaagcgtagcgtcggttggggagggggttggatgcgcgcgtattcggggggaggtcgttgttgttcggagtaggaggagggggagagtgcggcgggcggtagcggcgttggcggcgatttcgttatagagtaggggggttagggtagcgcgttcgtttcgttttcggtgagcggcgtgcgtagggaaggcgttcggggcggcggtcgtggtcgggggcggtggaagtaggcgggtcggggcggcggcgtttgtggtcgtggtcggggtcggggtcgtggtcggggacggggacggggtcggggtcggggtcgcggtcgtttttcgagtggcggtagcggttttggcggcgacggcggcggttgcggcggcggcggtagcggtggcggcggcgtttttcggcgggagtcggtttttttttcgtcggggagcgcggggtcggggtttaggggatttcgggttacggagagcgggaagaggatggattgttcggttttttttttcggatggaagaaggaggaagtgattcgaaa

SEQ ID NO: 27978 - DNA, 752 bp, Artificial Sequence
  chemically treated genomic DNA (Homo sapiens) CpG-island No: 27978
tttcgaatcacttcctccttcttccatccgaaaaaaaaaaccgaacaatccatcctcttcccgctctccgtaacccgaaatcccctaaaccccgaccccgcgctccccgacgaaaaaaaaaccgactcccgccgaaaaacgccgccgccaccgctaccgccgccgccgcaaccgccgccgtcgccgccaaaaccgctaccgccactcgaaaaacgaccgcgaccccgaccccgaccccgtccccgtccccgaccacgaccccgaccccgaccacgaccacaaacgccgccgccccgacccgcctacttccaccgcccccgaccacgaccgccgccccgaacgccttccctacgcacgccgctcaccgaaaacgaaacgaacgcgctaccctaacccccctactctataacgaaatcgccgccaacgccgctaccgcccgccgcactctccccctcctcctactccgaacaacaacgacctccccccgaatacgcgcgcatccaaccccctccccaaccgacgctacgcttcttccgtaaccgaacccttaaaatcccgaaaacccgccccgcccgcaacgcgacgcgcgaaaaacgcgcgcaaacatcataaaacgaacgcgcacaaaacgaccctcctacccgaaacgtaaccccgaccaccgcctcttaaatcctccaaacgctataaacgaccatcttatctccgccttctcgaaaccacgccccctcccgcgcttttccgacccccac

SEQ ID NO: 27979 - DNA, 752 bp, Artificial Sequence
  chemically treated genomic DNA (Homo sapiens) CpG-island No: 27979
tttcggattatttttttttttttttattcgggggggagggtcgggtaatttatttttttttcgtttttcgtggttcggggttttttgggtttcggtttcgcgtttttcgacgggaaagggatcggttttcgtcggggggcgtcgtcgttatcgttgtcgtcgtcgtcgtagtcgtcgtcgtcgtcgttaaggtcgttgtcgttattcgggggacggtcgcggtttcggtttcggtttcgttttcgttttcggttacggtttcggtttcggttacggttatagacgtcgtcgtttcggttcgtttgtttttatcgttttcggttacggtcgtcgtttcgagcgttttttttgcgtacgtcgtttatcggggacggggcgagcgcgttgttttggtttttttgttttatggcggagtcgtcgttagcgtcgttgtcgttcgtcgtattttttttttttttttgtttcgggtagtagcggttttttttcgggtgcgcgcgtatttagttttttttttagtcggcgttgcgtttttttcgtaatcgagtttttggaatttcggagattcgtttcgttcgtagcgcggcgcgcgggggacgcgcgtaagtattatagagcgggcgcgtatagagcggtttttttgttcggggcgtggtttcggttatcgttttttaggttttttaagcgttatgggcggttattttgttttcgttttttcggggttacgttttttttcgcgttttttcggtttttat

SEQ ID NO: 27980 - DNA, 752 bp, Artificial Sequence
  chemically treated genomic DNA (Homo sapiens) CpG-island No: 27980
ataaaaaccgaaaaaacgcgaaaaaaaacgtaaccccgaaaaaacgaaaacaaaataaccgcccataacgcttaaaaaacctaaaaaacgataaccgaaaccacgccccgaacaaaaaaaccgctctatacgcgcccgctctataatacttacgcgcgtcccccgcgcgccgcgctacgaacgaaacgaatctccgaaattccaaaaactcgattacgaaaaaaacgcaacgccgactaaaaaaaaaactaaatacgcgcgcacccgaaaaaaaaccgctactacccgaaacaaaaaaaaaaaaaaaatacgacgaacgacaacgacgctaacgacgactccgccataaaacaaaaaaaccaaaacaacgcgctcgccccgtccccgataaacgacgtacgcaaaaaaaacgctcgaaacgacgaccgtaaccgaaaacgataaaaacaaacgaaccgaaacgacgacgtctataaccgtaaccgaaaccgaaaccgtaaccgaaaacgaaaacgaaaccgaaaccgaaaccgcgaccgtcccccgaataacgacaacgaccttaacgacgacgacgacgactacgacgacgacgacaacgataacgacgacgccccccgacgaaaaccgatccctttcccgtcgaaaaacgcgaaaccgaaacccaaaaaaccccgaaccacgaaaaacgaaaaaaaaataaattacccgaccctcccccccgaataaaaaaaaaaaaaaataatccgaaa

SEQ ID NO: 27981 - DNA, 1032 bp, Artificial Sequence
  chemically treated genomic DNA (Homo sapiens) CpG-island No: 27981
tcgcggcgacggcgaggagggggcgcggaggagtagttttatttttttagttttttaatcgcgttttaggcggagtcgttagagttttttttcgcgcggagaagtgtggttttaatttttaaaattaaagtcgtttattatttatttaggtcgtttttgttcggcgggatcggggtttcggttcgttttatttcgggagtttcgtttttcgtcgttttggtttcgagtttcgtatttattattcggtcgggtttcgcgggatgtgcgcgtcgaggcgggcgtcggtcgtttcgggttcgggtttcgcgcgtagcggttttttttcgggtttggtggagtcgtagttgttattcggagatcgaggggcggaaaattgcgttcgttgttcgtttttttcgcgcggcgttgttatcgtcgggaataaaggagataaagtcgcgtcggtcgggttcgttttcgttttttttttttcgtttgtcgggttgtttttttttcgttcgtcgttcgggttaggtcggaagtagttcggagagtcgggcgcgcggtttcgaatcgttcgggatttcgtattttagtttcgcgggtttcgtatcggtcgagggttggggattcgatttttttcgtacgggggagggcgggggcgggttgtatcgcggcggtcgttatggtaacgcgggtcgttcggaggggtgaggagtgaattcggggagttagagtcgtttcgtttcgtcggttttatttgttcgtttttttggaatcggaattgggaatttttttggttgttaggagtcgaggcggggggtcgcgtttcgtattcgtaggtgttggtggaatagcgtttcggttttttttcgttcgtttagagtcgggtagtattcgagttttttattagttcgattcgtttttttgttagcgttcggtttcgtttcgcgttcggagtttttttttttttttttattcggtttcggtggttattttttttaattttttttatttgaattttaaggcgttttgttttttttttgcgtattt

SEQ ID NO: 27982 - DNA, 1032 bp, Artificial Sequence
  chemically treated genomic DNA (Homo sapiens) CpG-island No: 27982
aaatacgcaaaaaaaaaacaaaacgccttaaaattcaaataaaaaaaattaaaaaaaataaccaccgaaaccgaataaaaaaaaaaaaaaaaactccgaacgcgaaacgaaaccgaacgctaacaaaaaaacgaatcgaactaataaaaaactcgaatactacccgactctaaacgaacgaaaaaaaaccgaaacgctattccaccaacacctacgaatacgaaacgcgaccccccgcctcgactcctaacaaccaaaaaaattcccaattccgattccaaaaaaacgaacaaataaaaccgacgaaacgaaacgactctaactccccgaattcactcctcacccctccgaacgacccgcgttaccataacgaccgccgcgatacaacccgcccccgccctcccccgtacgaaaaaaatcgaatccccaaccctcgaccgatacgaaacccgcgaaactaaaatacgaaatcccgaacgattcgaaaccgcgcgcccgactctccgaactacttccgacctaacccgaacgacgaacgaaaaaaaaacaacccgacaaacgaaaaaaaaaaaacgaaaacgaacccgaccgacgcgactttatctcctttattcccgacgataacaacgccgcgcgaaaaaaacgaacaacgaacgcaattttccgcccctcgatctccgaataacaactacgactccaccaaacccgaaaaaaaaccgctacgcgcgaaacccgaacccgaaacgaccgacgcccgcctcgacgcgcacatcccgcgaaacccgaccgaataataaatacgaaactcgaaaccaaaacgacgaaaaacgaaactcccgaaataaaacgaaccgaaaccccgatcccgccgaacaaaaacgacctaaataaataataaacgactttaattttaaaaattaaaaccacacttctccgcgcgaaaaaaaactctaacgactccgcctaaaacgcgattaaaaaactaaaaaaataaaactactcctccgcgccccctcctcgccgtcgccgcga

SEQ ID NO: 27983 - DNA, 1032 bp, Artificial Sequence
  chemically treated genomic DNA (Homo sapiens) CpG-island No: 27983
aggtgcgtaggggagaaataaggcgttttggagtttaggtaaagaaagttggggaggatgattatcggagtcgggtaaggaagggaaagggagtttcgggcgcggggcgaggtcgggcgttggtagaagaacgggtcgggttggtgagggattcgggtgttattcggttttggacgggcgggaagaggtcgggacgttgttttattagtatttgcgggtgcggagcgcgatttttcgtttcggtttttggtaattaggaaagtttttagtttcggttttaaggaggcgagtaggtgaggtcgacggggcggggcggttttggtttttcgggtttattttttattttttcgggcgattcgcgttgttatggcgatcgtcgcggtgtagttcgttttcgttttttttcgtgcgggaggggtcgggtttttagttttcggtcgatgcggagttcgcggggttggaatgcggggtttcgggcggttcggggtcgcgcgttcggtttttcgggttgttttcggtttggttcgggcggcgggcggggggagggtagttcggtaggcgagggggaaggagcggagacgagttcggtcgacgcggttttgttttttttgttttcggcggtggtagcgtcgcgcgggaggggcgggtagcgggcgtagtttttcgtttttcggttttcgggtaatagttgcggttttattagattcggggagaggtcgttgcgcgcggagttcgagttcggagcggtcgacgttcgtttcggcgcgtatatttcgcggggttcggtcgggtggtgagtgcggggttcggggttagggcggcgaggaacggggttttcgaggtggaacgggtcggggtttcgatttcgtcgggtaggggcggtttgggtgagtggtgggcggttttggttttgagagttgggattatattttttcgcgcgaagggaaattttggcgatttcgtttggaacgcgattgggagattgaggaggtggagttgttttttcgcgtttttttttcgtcgtcgtcgcgg

SEQ ID NO: 27984 - DNA, 1032 bp, Artificial Sequence
  chemically treated genomic DNA (Homo sapiens) CpG-island No: 27984
ccgcgacgacgacgaaaaaaaaacgcgaaaaaacaactccacctcctcaatctcccaatcgcgttccaaacgaaatcgccaaaatttcccttcgcgcgaaaaaatataatcccaactctcaaaaccaaaaccgcccaccactcacccaaaccgcccctacccgacgaaatcgaaaccccgacccgttccacctcgaaaaccccgttcctcgccgccctaaccccgaaccccgcactcaccacccgaccgaaccccgcgaaatatacgcgccgaaacgaacgtcgaccgctccgaactcgaactccgcgcgcaacgacctctccccgaatctaataaaaccgcaactattacccgaaaaccgaaaaacgaaaaactacgcccgctacccgcccctcccgcgcgacgctaccaccgccgaaaacaaaaaaaacaaaaccgcgtcgaccgaactcgtctccgctccttccccctcgcctaccgaactaccctccccccgcccgccgcccgaaccaaaccgaaaacaacccgaaaaaccgaacgcgcgaccccgaaccgcccgaaaccccgcattccaaccccgcgaactccgcatcgaccgaaaactaaaaacccgacccctcccgcacgaaaaaaaacgaaaacgaactacaccgcgacgatcgccataacaacgcgaatcgcccgaaaaaataaaaaataaacccgaaaaaccaaaaccgccccgccccgtcgacctcacctactcgcctccttaaaaccgaaactaaaaactttcctaattaccaaaaaccgaaacgaaaaatcgcgctccgcacccgcaaatactaataaaacaacgtcccgacctcttcccgcccgtccaaaaccgaataacacccgaatccctcaccaacccgacccgttcttctaccaacgcccgacctcgccccgcgcccgaaactccctttcccttccttacccgactccgataatcatcctccccaactttctttacctaaactccaaaacgccttatttctcccctacgcacct

SEQ ID NO: 27985 - DNA, 803 bp, Artificial Sequence
  chemically treated genomic DNA (Homo sapiens) CpG-island No: 27985
acgtaatacgcgtgaatgttagggtaggttgtttttgcgcggtttttttttacggagtgttagggagggagcgtaaagttattagcgcggcggagttggtgcgttttcggttcgttttttcggtaacgggtcgcgtcgtattgagtttttgtagtaaatttgtcgaatttcgttcgtggatttttaaatatcgggcggggtcgggtgtggcggcgcgttcggacgttcgttattttttcgcgtttttcgtttgttagttgattggtttttgggttaggggcggggtattcgcggcggaggtaagcggcggcgcgcggacggttggtttagtttttcggtttggcggtaggtaagtttagttcggcgttgtcggatatttggggtgagcggaaagtatggcggggattttcgcgttaggtagtaagaggcggagcgagttttcggcgtttcgtttcggttcgtcgtcgggtatcgggtatttttcgagtaagcgggttcggggttttttcgtagtcgttgtttcggattttgacgattcgttcggcgcgtatggggattttattgtcgacgatttggaggagtttgatattttcgcgttataggttttgagttaatgttcggtcgcggttcgggacgtgtttagtgagtgtttttcgcggttttttgttcggagggagttgttaatcgcgttagatttttttgatggttgtggtttcggaatttcgcggttagtattgttttttcgtttttttaaaatatgggaatattttgatttaagtagcggttgttttttagaaggtttt

SEQ ID NO: 27986 - DNA, 803 bp, Artificial Sequence
  chemically treated genomic DNA (Homo sapiens) CpG-island No: 27986
aaaaccttctaaaaaacaaccgctacttaaatcaaaatattcccatattttaaaaaaacgaaaaaacaatactaaccgcgaaattccgaaaccacaaccatcaaaaaaatctaacgcgattaacaactccctccgaacaaaaaaccgcgaaaaacactcactaaacacgtcccgaaccgcgaccgaacattaactcaaaacctataacgcgaaaatatcaaactcctccaaatcgtcgacaataaaatccccatacgcgccgaacgaatcgtcaaaatccgaaacaacgactacgaaaaaaccccgaacccgcttactcgaaaaatacccgatacccgacgacgaaccgaaacgaaacgccgaaaactcgctccgcctcttactacctaacgcgaaaatccccgccatactttccgctcaccccaaatatccgacaacgccgaactaaacttacctaccgccaaaccgaaaaactaaaccaaccgtccgcgcgccgccgcttacctccgccgcgaataccccgcccctaacccaaaaaccaatcaactaacaaacgaaaaacgcgaaaaaataacgaacgtccgaacgcgccgccacacccgaccccgcccgatatttaaaaatccacgaacgaaattcgacaaatttactacaaaaactcaatacgacgcgacccgttaccgaaaaaacgaaccgaaaacgcaccaactccgccgcgctaataactttacgctccctccctaacactccgtaaaaaaaaaccgcgcaaaaacaacctaccctaacattcacgcgtattacgt

SEQ ID NO: 27987 - DNA, 803 bp, Artificial Sequence
  chemically treated genomic DNA (Homo sapiens) CpG-island No: 27987
aggattttttggaagataatcgttgtttaaattagggtgtttttatattttaaaaaggcgaaaaggtagtgttggtcgcgaggtttcgaagttatagttattaaggggatttggcgcggttgataatttttttcgagtaaaaggtcgcgaggagtatttattggatacgtttcgagtcgcggtcggatattggtttagggtttgtgacgcgagggtgttaagtttttttaggtcgtcggtagtgaagtttttatgcgcgtcgaacgggtcgttagggttcggggtagcggttgcggagaagtttcgggttcgtttgttcggggggtgttcggtgttcggcggcgggtcggggcgaggcgtcgggggttcgtttcgttttttgttgtttggcgcggaggttttcgttatgtttttcgtttattttaagtattcgatagcgtcgagttagatttgtttgtcgttaggtcggagaattggattaatcgttcgcgcgtcgtcgtttgttttcgtcgcgagtgtttcgtttttggtttaggggttaattagttggtaggcggagggcgcggaggaatgacgaacgttcgagcgcgtcgttatattcggtttcgttcggtgtttagaggtttacgggcgggattcggtaggtttgttgtaaggatttagtgcggcgcgattcgttatcggagaggcgggtcggaggcgtattagtttcgtcgcgttggtggttttgcgttttttttttggtatttcgtggaggagggtcgcgtaggagtagtttgttttagtatttacgcgtgttgcgt

SEQ ID NO: 27988 - DNA, 803 bp, Artificial Sequence
  chemically treated genomic DNA (Homo sapiens) CpG-island No: 27988
acgcaacacgcgtaaatactaaaacaaactactcctacgcgaccctcctccacgaaataccaaaaaaaaaacgcaaaaccaccaacgcgacgaaactaatacgcctccgacccgcctctccgataacgaatcgcgccgcactaaatccttacaacaaacctaccgaatcccgcccgtaaacctctaaacaccgaacgaaaccgaatataacgacgcgctcgaacgttcgtcattcctccgcgccctccgcctaccaactaattaacccctaaaccaaaaacgaaacactcgcgacgaaaacaaacgacgacgcgcgaacgattaatccaattctccgacctaacgacaaacaaatctaactcgacgctatcgaatacttaaaataaacgaaaaacataacgaaaacctccgcgccaaacaacaaaaaacgaaacgaacccccgacgcctcgccccgacccgccgccgaacaccgaacaccccccgaacaaacgaacccgaaacttctccgcaaccgctaccccgaaccctaacgacccgttcgacgcgcataaaaacttcactaccgacgacctaaaaaaacttaacaccctcgcgtcacaaaccctaaaccaatatccgaccgcgactcgaaacgtatccaataaatactcctcgcgaccttttactcgaaaaaaattatcaaccgcgccaaatccccttaataactataacttcgaaacctcgcgaccaacactaccttttcgcctttttaaaatataaaaacaccctaatttaaacaacgattatcttccaaaaaatcct

SEQ ID NO: 27989 - DNA, 594 bp, Artificial Sequence
  chemically treated genomic DNA (Homo sapiens) CpG-island No: 27989
tcggttggattttcgatcggggcgtttgcgaggtgcggtttttgggtaatttgagtcgtaattttttgcgtaacggtatcgaggtggtgtcgtgttattcgtagggttcgacggtcggcgtggtgtatcgcgcgggtcggaataatcgttggtatttggcggtggtcgttatttacgtgttgtttgagtcggagacggcgagtcgttgtaatttcgcggtattcgattacgatacggttatcgcgtttaaggatacggaggggcgtagtttggttacgtaggagttggggcgttttaagttgtgcgagggcgcgggtagtttgtatttcgtggacgtttttttttggaacggtagtatttattttttttattatttttataattatacgagcggcgttgttatcggttggtttagtatggcgcgtatcgcgtagagtatcgaggtgttgttttagggttaggtatttttcgattgcggttacggttatttcgacggtcgtcgtttgttttttttttttagtttagtggaggttttggacgtttgggcgggagtgtttagcgcggtcgttggagagggttaggagcggcgttttt

SEQ ID NO: 27990 - DNA, 594 bp, Artificial Sequence
  chemically treated genomic DNA (Homo sapiens) CpG-island No: 27990
aaaaacgccgctcctaaccctctccaacgaccgcgctaaacactcccgcccaaacgtccaaaacctccactaaactaaaaaaaaaaaacaaacgacgaccgtcgaaataaccgtaaccgcaatcgaaaaatacctaaccctaaaacaacacctcgatactctacgcgatacgcgccatactaaaccaaccgataacaacgccgctcgtataattataaaaataataaaaaaaataaatactaccgttccaaaaaaaaacgtccacgaaatacaaactacccgcgccctcgcacaacttaaaacgccccaactcctacgtaaccaaactacgcccctccgtatccttaaacgcgataaccgtatcgtaatcgaataccgcgaaattacaacgactcgccgtctccgactcaaacaacacgtaaataacgaccaccgccaaataccaacgattattccgacccgcgcgatacaccacgccgaccgtcgaaccctacgaataacacgacaccacctcgataccgttacgcaaaaaattacgactcaaattacccaaaaaccgcacctcgcaaacgccccgatcgaaaatccaaccga

SEQ ID NO: 27991 - DNA, 594 bp, Artificial Sequence
  chemically treated genomic DNA (Homo sapiens) CpG-island No: 27991
gggagcgtcgtttttggttttttttagcggtcgcgttgaatattttcgtttagacgtttagggtttttattaggttggaggagaggagtaggcggcggtcgtcggggtggtcgtggtcgtagtcgagggatgtttggttttggaatagtatttcggtgttttgcgcgatgcgcgttatgttgggttagtcggtggtagcgtcgttcgtgtagttgtaggggtagtaggggaagtagatgttgtcgttttagagaaaggcgtttacgaagtgtaggttgttcgcgttttcgtatagtttgaggcgttttagtttttgcgtggttaggttgcgttttttcgtgtttttgagcgcgatggtcgtgtcgtggtcggatgtcgcggggttgtagcggttcgtcgttttcggtttaggtagtacgtaggtggcggttatcgttaggtattagcggttgtttcggttcgcgcggtatattacgtcggtcgtcgagttttgcgggtggtacgatattatttcggtgtcgttgcgtagggagttgcggtttaggttgtttaggggtcgtatttcgtaggcgtttcggtcgaaggtttagtcgg

SEQ ID NO: 27992 - DNA, 594 bp, Artificial Sequence
  chemically treated genomic DNA (Homo sapiens) CpG-island No: 27992
ccgactaaaccttcgaccgaaacgcctacgaaatacgacccctaaacaacctaaaccgcaactccctacgcaacgacaccgaaataatatcgtaccacccgcaaaactcgacgaccgacgtaatataccgcgcgaaccgaaacaaccgctaatacctaacgataaccgccacctacgtactacctaaaccgaaaacgacgaaccgctacaaccccgcgacatccgaccacgacacgaccatcgcgctcaaaaacacgaaaaaacgcaacctaaccacgcaaaaactaaaacgcctcaaactatacgaaaacgcgaacaacctacacttcgtaaacgcctttctctaaaacgacaacatctacttcccctactacccctacaactacacgaacgacgctaccaccgactaacccaacataacgcgcatcgcgcaaaacaccgaaatactattccaaaaccaaacatccctcgactacgaccacgaccaccccgacgaccgccgcctactcctctcctccaacctaataaaaaccctaaacgtctaaacgaaaatattcaacgcgaccgctaaaaaaaaccaaaaacgacgctccc

SEQ ID NO: 27993 - DNA, 712 bp, Artificial Sequence
  chemically treated genomic DNA (Homo sapiens) CpG-island No: 27993
cgtttttttttttcggtttagcgtgaaaatacggacggcgaagggttgtcgttagtcgtttttttgttatcgcgatcgggaaataaagatatattattttttattttttgcgtttttaagggattcgaggaatttttggttgtaagcggttggtatttcggaacgggcgttttattcgttcgggcgaaggtttttggtttattaggcggttttggcgttcgtagttggcgagttttcgtttcgttttcgtcgtcgttttcgtcgcgggttttcggcgttagtttatagttcgttcgcgtttttcgcgtcgagtttggttcggcgttagtgagtttcgtcgtcggttcgtttttcgttcgcgttcggttcgtcgtatggtgcgtttagcgcgtttcgagttagttttcggcgcgttgttaggtcgggtgttaggcggttatcgcgcgttatcgtcgtcgttatcgttcgtcgttcgattttggataataatgcgcgttttcgtttttttagaaagttagggacgtttttagtcgtcgttagagttggttcggttttttagttttttttcgtggtattcgtaggcgagataaagttcgttttcggtgaggttgcgcgcgtttaaagcgtgcgggatgtttagtacggaggtttttaagcgggggatttttggtttttttataaaatttatttaaagttatcgttcgaggttttt

SEQ ID NO: 27994 - DNA, 712 bp, Artificial Sequence
  chemically treated genomic DNA (Homo sapiens) CpG-island No: 27994
aaaaacctcgaacgataactttaaataaattttataaaaaaaccaaaaatcccccgcttaaaaacctccgtactaaacatcccgcacgctttaaacgcgcgcaacctcaccgaaaacgaactttatctcgcctacgaataccacgaaaaaaaactaaaaaaccgaaccaactctaacgacgactaaaaacgtccctaactttctaaaaaaacgaaaacgcgcattattatccaaaatcgaacgacgaacgataacgacgacgataacgcgcgataaccgcctaacacccgacctaacaacgcgccgaaaactaactcgaaacgcgctaaacgcaccatacgacgaaccgaacgcgaacgaaaaacgaaccgacgacgaaactcactaacgccgaaccaaactcgacgcgaaaaacgcgaacgaactataaactaacgccgaaaacccgcgacgaaaacgacgacgaaaacgaaacgaaaactcgccaactacgaacgccaaaaccgcctaataaaccaaaaaccttcgcccgaacgaataaaacgcccgttccgaaataccaaccgcttacaaccaaaaattcctcgaatcccttaaaaacgcaaaaaataaaaaataatatatctttatttcccgatcgcgataacaaaaaaacgactaacgacaacccttcgccgtccgtattttcacgctaaaccgaaaaaaaaaaacg

SEQ ID NO: 27995 - DNA, 712 bp, Artificial Sequence
  chemically treated genomic DNA (Homo sapiens) CpG-island No: 27995
gagggtttcgagcggtggttttgggtgggttttgtgggggagttaggggtttttcgtttggggattttcgtgttgggtatttcgtacgttttggacgcgcgtagttttatcgggagcgaattttgtttcgtttgcgggtgttacggagaggggttgggaagtcgagttagttttggcggcgattgggggcgtttttggttttttgggggggcgggggcgcgtattgttgtttaggatcgggcggcgggcggtggcggcggcggtggcgcgcggtggtcgtttagtattcgatttagtagcgcgtcggggattggttcggggcgcgttgggcgtattatgcggcgggtcgggcgcgggcgaggggcgggtcggcggcggggtttattggcgtcgggttaggttcggcgcgagaggcgcgagcgggttatgggttgacgtcgagggttcgcggcgggggcggcggcggggacggggcgggggttcgttagttgcgggcgttaaggtcgtttagtaggttaagggttttcgttcgggcgaatgggacgttcgtttcggggtattagtcgtttgtagttagaagtttttcggattttttggaagcgtaaaaaataaaaggtaatgtgtttttgtttttcggtcgcggtggtagggaggcgattgacggtagtttttcgtcgttcgtgtttttacgttgggtcggggaaaagggacg

SEQ ID NO: 27996 - DNA, 712 bp, Artificial Sequence
  chemically treated genomic DNA (Homo sapiens) CpG-island No: 27996
cgtcccttttccccgacccaacgtaaaaacacgaacgacgaaaaactaccgtcaatcgcctccctaccaccgcgaccgaaaaacaaaaacacattaccttttattttttacgcttccaaaaaatccgaaaaacttctaactacaaacgactaataccccgaaacgaacgtcccattcgcccgaacgaaaacccttaacctactaaacgaccttaacgcccgcaactaacgaacccccgccccgtccccgccgccgcccccgccgcgaaccctcgacgtcaacccataacccgctcgcgcctctcgcgccgaacctaacccgacgccaataaaccccgccgccgacccgcccctcgcccgcgcccgacccgccgcataatacgcccaacgcgccccgaaccaatccccgacgcgctactaaatcgaatactaaacgaccaccgcgcgccaccgccgccgccaccgcccgccgcccgatcctaaacaacaatacgcgcccccgcccccccaaaaaaccaaaaacgcccccaatcgccgccaaaactaactcgacttcccaacccctctccgtaacacccgcaaacgaaacaaaattcgctcccgataaaactacgcgcgtccaaaacgtacgaaatacccaacacgaaaatccccaaacgaaaaacccctaactcccccacaaaacccacccaaaaccaccgctcgaaaccctc

SEQ ID NO: 27997 - DNA, 971 bp, Artificial Sequence
  chemically treated genomic DNA (Homo sapiens) CpG-island No: 27997
tcggggttcgcgtcgagggttcgcgtttttgtttcgtgtttgcgttgttcgtatgtaaatgagggcgcgtgacgcgggacgtagatggataagggaagagagagaatggtcgttgtcgtcgtcgttgttgtcgtcgtcgtcgtcgtcgtttagtgtcggagttttcggtgcgcggcggagagaagaggatttcggcgggaattcgatttttggcgttatcgttttatgtattgtgtaggtaagagagacgcgggtcggggtttcgggtttcgcgcggcgatcgttgtcgtagttcgaggagtttgtggttgaggggtttagttgaatttttcgttcgggttagttcggtgggggagcgagatgggagcggcgcggcgcggcggtttcggcgttcgttttttgttttgcgggttgttggttcggcgcggttcgcgttttttcgtttttttagtttttgggtttttcgggaattgttagtttggattcgtttgttgagttttcgcggaagtcgttcgttcgtttttttttcgaaatttttcggcgttcgtcgttgttcgtcgtcgttcgtcgtttattttgataggacggaggaagcggttcggtgggtcggcgttttggcggaggggagtcggcgggtagggcggtcggaggaaggcgggttggttcgcgttttcgtcgagcgtatatatatttttttgtcgtcgtcgggggtcgggtgagtagacgcggttagttttcggggatttggatttggagatttacgggtattcgtagggcgggggtcgttgatgggtcggttgggggcgaggggcggcgggggcgtcgttcgaggggcggggggcgtttaattttgttttttcgcgttcggcggcggcgttgtgtgtatttttttaagaaggagtcgtttgagcgttgacggttgggatttgaagttttttttttttttttggaagtttggacggtgggggggg

SEQ ID NO: 27998 - DNA, 971 bp, Artificial Sequence
  chemically treated genomic DNA (Homo sapiens) CpG-island No: 27998
ccccccccaccgtccaaacttccaaaaaaaaaaaaaaaacttcaaatcccaaccgtcaacgctcaaacgactccttcttaaaaaaatacacacaacgccgccgccgaacgcgaaaaaacaaaattaaacgccccccgcccctcgaacgacgcccccgccgcccctcgcccccaaccgacccatcaacgacccccgccctacgaatacccgtaaatctccaaatccaaatccccgaaaactaaccgcgtctactcacccgacccccgacgacgacaaaaaaatatatatacgctcgacgaaaacgcgaaccaacccgccttcctccgaccgccctacccgccgactcccctccgccaaaacgccgacccaccgaaccgcttcctccgtcctatcaaaataaacgacgaacgacgacgaacaacgacgaacgccgaaaaatttcgaaaaaaaaacgaacgaacgacttccgcgaaaactcaacaaacgaatccaaactaacaattcccgaaaaacccaaaaactaaaaaaacgaaaaaacgcgaaccgcgccgaaccaacaacccgcaaaacaaaaaacgaacgccgaaaccgccgcgccgcgccgctcccatctcgctcccccaccgaactaacccgaacgaaaaattcaactaaacccctcaaccacaaactcctcgaactacgacaacgatcgccgcgcgaaacccgaaaccccgacccgcgtctctcttacctacacaatacataaaacgataacgccaaaaatcgaattcccgccgaaatcctcttctctccgccgcgcaccgaaaactccgacactaaacgacgacgacgacgacgacaacaacgacgacgacaacgaccattctctctcttcccttatccatctacgtcccgcgtcacgcgccctcatttacatacgaacaacgcaaacacgaaacaaaaacgcgaaccctcgacgcgaaccccga

SEQ ID NO: 27999 - DNA, 971 bp, Artificial Sequence
  chemically treated genomic DNA (Homo sapiens) CpG-island No: 27999
ttttttttatcgtttagatttttaaagagggaggaagaattttaaattttaatcgttagcgtttaagcggtttttttttaaaggggtatatatagcgtcgtcgtcgagcgcgagagggtagagttgggcgtttttcgtttttcggacgacgttttcgtcgtttttcgtttttagtcggtttattagcggttttcgttttgcgagtgttcgtgggtttttaggtttaggttttcgggaattggtcgcgtttgtttattcggttttcggcggcgataagggggtgtgtgtgcgttcggcgggggcgcggattagttcgttttttttcggtcgttttgttcgtcggttttttttcgttagggcgtcgatttatcgggtcgtttttttcgttttgttagggtggacggcgggcgacggcgggtagcgacgggcgtcgaggagtttcggggagagagcgagcgggcggttttcgcgggggtttagtaagcgggtttaaattaatagttttcggggagtttaagagttgggaaggcgaaggagcgcggatcgcgtcgggttagtagttcgtaagataaaaggcgagcgtcggggtcgtcgcgtcgcgtcgtttttatttcgtttttttatcgaattaattcgaacgggagatttaattaaattttttagttataaatttttcgggttgcgatagcggtcgtcgcgcggagttcggggtttcggttcgcgttttttttatttatatagtgtatgaggcggtggcgttaagagtcgagttttcgtcggaattttttttttttcgtcgcgtatcgagggtttcggtattgagcggcggcggcggcggcggtagtagcggcggcggtagcggttattttttttttttttttgtttatttgcgtttcgcgttacgcgtttttatttatatacgagtagcgtaggtacgaggtaggggcgcgagttttcggcgcgagtttcgg

SEQ ID NO: 28000 - DNA, 971 bp, Artificial Sequence
  chemically treated genomic DNA (Homo sapiens) CpG-island No: 28000
ccgaaactcgcgccgaaaactcgcgcccctacctcgtacctacgctactcgtatataaataaaaacgcgtaacgcgaaacgcaaataaacaaaaaaaaaaaaaaaataaccgctaccgccgccgctactaccgccgccgccgccgccgctcaataccgaaaccctcgatacgcgacgaaaaaaaaaaaattccgacgaaaactcgactcttaacgccaccgcctcatacactatataaataaaaaaaacgcgaaccgaaaccccgaactccgcgcgacgaccgctatcgcaacccgaaaaatttataactaaaaaatttaattaaatctcccgttcgaattaattcgataaaaaaacgaaataaaaacgacgcgacgcgacgaccccgacgctcgccttttatcttacgaactactaacccgacgcgatccgcgctccttcgccttcccaactcttaaactccccgaaaactattaatttaaacccgcttactaaacccccgcgaaaaccgcccgctcgctctctccccgaaactcctcgacgcccgtcgctacccgccgtcgcccgccgtccaccctaacaaaacgaaaaaaacgacccgataaatcgacgccctaacgaaaaaaaaccgacgaacaaaacgaccgaaaaaaaacgaactaatccgcgcccccgccgaacgcacacacacccccttatcgccgccgaaaaccgaataaacaaacgcgaccaattcccgaaaacctaaacctaaaaacccacgaacactcgcaaaacgaaaaccgctaataaaccgactaaaaacgaaaaacgacgaaaacgtcgtccgaaaaacgaaaaacgcccaactctaccctctcgcgctcgacgacgacgctatatatacccctttaaaaaaaaaccgcttaaacgctaacgattaaaatttaaaattcttcctccctctttaaaaatctaaacgataaaaaaaa

SEQ ID NO: 28001 - DNA, 561 bp, Artificial Sequence
  chemically treated genomic DNA (Homo sapiens) CpG-island No: 28001
tattatcgtggtagtcgttttcgcgttttgttttcgtttcgttttttttttttttattcgcgaatttagttagcggttcgcgtcgtcgagcgtttattggttagcggaacgcgtcgcgttataatggagtcggtcggaggcggcgagtcggatagcgtcggggtttttcgttgagttcgtagttttcggtagtcgggaaagtgcgggcgcggggtcgtagtttgttcgttcggagcggtttaggagtacgtcgcggggagcgcgggcgttcggggttggagtcgcgtaggtaggtcggagcgtgatatttcggttttaggagggcgagtcgcgtcgatcgaggtggtggaggaggaggatcggatacggggacgtagtaggtggggttggtcgaataggtgcggttatttgtttacgttttatttgcgagttaggttgcgggtcggtagcgcggttgtagagacgagtggtcgtttcgttgtgttttttgttttcgggagagacggagttttacgttgagaggattttttttgtgtgttggggttatttggagtaagaggt

SEQ ID NO: 28002 - DNA, 561 bp, Artificial Sequence
  chemically treated genomic DNA (Homo sapiens) CpG-island No: 28002
acctcttactccaaataaccccaacacacaaaaaaaatcctctcaacgtaaaactccgtctctcccgaaaacaaaaaacacaacgaaacgaccactcgtctctacaaccgcgctaccgacccgcaacctaactcgcaaataaaacgtaaacaaataaccgcacctattcgaccaaccccacctactacgtccccgtatccgatcctcctcctccaccacctcgatcgacgcgactcgccctcctaaaaccgaaatatcacgctccgacctacctacgcgactccaaccccgaacgcccgcgctccccgcgacgtactcctaaaccgctccgaacgaacaaactacgaccccgcgcccgcactttcccgactaccgaaaactacgaactcaacgaaaaaccccgacgctatccgactcgccgcctccgaccgactccattataacgcgacgcgttccgctaaccaataaacgctcgacgacgcgaaccgctaactaaattcgcgaataaaaaaaaaaaaaacgaaacgaaaacaaaacgcgaaaacgactaccacgataata

SEQ ID NO: 28003 - DNA, 561 bp, Artificial Sequence
  chemically treated genomic DNA (Homo sapiens) CpG-island No: 28003
attttttgttttaaatgattttagtatataggagaggtttttttagcgtgggatttcgtttttttcgaaggtagggagtataacgaagcggttattcgtttttgtagtcgcgttatcggttcgtagtttggttcgtaggtgaggcgtgaataggtaatcgtatttgttcggttagttttatttgttgcgttttcgtattcggttttttttttttattatttcggtcggcgcggttcgtttttttggaatcggggtgttacgtttcgatttatttgcgcgattttagtttcggacgttcgcgtttttcgcggcgtgtttttgggtcgtttcgggcgggtaggttgcggtttcgcgttcgtattttttcggttgtcggaggttgcgggtttagcgggaagtttcggcgttgttcggttcgtcgttttcgatcggttttattgtgacgcgacgcgtttcgttggttaatgggcgttcggcggcgcgaatcgttgattaagttcgcgggtggaggaggaggggacggggcggaggtagggcgcggaggcggttattacggtggtg

SEQ ID NO: 28004 - DNA, 561 bp, Artificial Sequence
  chemically treated genomic DNA (Homo sapiens) CpG-island No: 28004
caccaccgtaataaccgcctccgcgccctacctccgccccgtcccctcctcctccacccgcgaacttaatcaacgattcgcgccgccgaacgcccattaaccaacgaaacgcgtcgcgtcacaataaaaccgatcgaaaacgacgaaccgaacaacgccgaaacttcccgctaaacccgcaacctccgacaaccgaaaaaatacgaacgcgaaaccgcaacctacccgcccgaaacgacccaaaaacacgccgcgaaaaacgcgaacgtccgaaactaaaatcgcgcaaataaatcgaaacgtaacaccccgattccaaaaaaacgaaccgcgccgaccgaaataataaaaaaaaaaaaccgaatacgaaaacgcaacaaataaaactaaccgaacaaatacgattacctattcacgcctcacctacgaaccaaactacgaaccgataacgcgactacaaaaacgaataaccgcttcgttatactccctaccttcgaaaaaaacgaaatcccacgctaaaaaaacctctcctatatactaaaatcatttaaaacaaaaaat

SEQ ID NO: 28005 - DNA, 683 bp, Artificial Sequence
  chemically treated genomic DNA (Homo sapiens) CpG-island No: 28005
gacggacggatggacggtcggacgcgtggatatttgtgggacggtatcggttgggaggcggtcggacgcggagatagcggtacggatacgggttttaagtgataggagtcgacgagggagaggggcgtcgggatagaagaaggggatgggggtagcgggaggatgggggtagggaagggttgagtaggcgaagagagcgaggagagcgaagataggaattcgggagcggggtttgtaaggaggggaaagatgggtatcgcggagcgaggttaggcgcgggaatggttggggttgggatcgtagttaggacggaggggttcgcgggatggggatagcgtcgagaggcggtttcgagtacggaggggacgcgggggtcggagggaaggacggttttcggtagcgagtagttttcgttttatagtttcgatagttttttttttcgttattattatttttttttacgttttttttttattttcgtcgcgttgggttcggcggcggcgcggggtttggaatttttatcgcgttttgttttcgtagtttttattttcggcggggaggtggcgcgtttcggggcgtagagagaggtcggattcgacgggcgtcgtcgaggggtcgtgagggagcgcggggtcgtttttagttggtcgcggggtcgggcgtcgaagcggttgttatttttt

SEQ ID NO: 28006 - DNA, 683 bp, Artificial Sequence
  chemically treated genomic DNA (Homo sapiens) CpG-island No: 28006
aaaaaataacaaccgcttcgacgcccgaccccgcgaccaactaaaaacgaccccgcgctccctcacgacccctcgacgacgcccgtcgaatccgacctctctctacgccccgaaacgcgccacctccccgccgaaaataaaaactacgaaaacaaaacgcgataaaaattccaaaccccgcgccgccgccgaacccaacgcgacgaaaataaaaaaaaaacgtaaaaaaaaataataataacgaaaaaaaaaactatcgaaactataaaacgaaaactactcgctaccgaaaaccgtccttccctccgacccccgcgtcccctccgtactcgaaaccgcctctcgacgctatccccatcccgcgaacccctccgtcctaactacgatcccaaccccaaccattcccgcgcctaacctcgctccgcgatacccatctttcccctccttacaaaccccgctcccgaattcctatcttcgctctcctcgctctcttcgcctactcaacccttccctacccccatcctcccgctacccccatccccttcttctatcccgacgcccctctccctcgtcgactcctatcacttaaaacccgtatccgtaccgctatctccgcgtccgaccgcctcccaaccgataccgtcccacaaatatccacgcgtccgaccgtccatccgtccgtc

SEQ ID NO: 28007 - DNA, 683 bp, Artificial Sequence
  chemically treated genomic DNA (Homo sapiens) CpG-island No: 28007
gggggatggtagtcgtttcggcgttcggtttcgcggttagttaggggcggtttcgcgtttttttacggtttttcggcggcgttcgtcggattcggtttttttttgcgtttcggggcgcgttattttttcgtcggaggtgaggattgcggggatagggcgcggtggggattttaggtttcgcgtcgtcgtcgaatttagcgcggcggagatagaaaggggacgtgggagagagtggtggtggcgggggggggggttgtcggagttgtggggcggagattgttcgttgtcgggaatcgttttttttttcggttttcgcgtttttttcgtgttcgaggtcgtttttcggcgttgtttttatttcgcggattttttcgttttgattacgattttaattttagttattttcgcgtttggtttcgtttcgcgatgtttattttttttttttttgtagatttcgttttcgggtttttgttttcgtttttttcgtttttttcgtttgtttaatttttttttgtttttattttttcgttatttttattttttttttttgtttcggcgtttttttttttcgtcggtttttgttatttggaattcgtattcgtgtcgttattttcgcgttcggtcgttttttaatcggtgtcgttttataggtgtttacgcgttcggtcgtttattcgttcgtt

SEQ ID NO: 28008 - DNA, 683 bp, Artificial Sequence
  chemically treated genomic DNA (Homo sapiens) CpG-island No: 28008
aacgaacgaataaacgaccgaacgcgtaaacacctataaaacgacaccgattaaaaaacgaccgaacgcgaaaataacgacacgaatacgaattccaaataacaaaaaccgacgaaaaaaaaaaacgccgaaacaaaaaaaaaaaataaaaataacgaaaaaataaaaacaaaaaaaaattaaacaaacgaaaaaaacgaaaaaaacgaaaacaaaaacccgaaaacgaaatctacaaaaaaaaaaaaaataaacatcgcgaaacgaaaccaaacgcgaaaataactaaaattaaaatcgtaatcaaaacgaaaaaatccgcgaaataaaaacaacgccgaaaaacgacctcgaacacgaaaaaaacgcgaaaaccgaaaaaaaaaacgattcccgacaacgaacaatctccgccccacaactccgacaacccccccccccgccaccaccactctctcccacgtcccctttctatctccgccgcgctaaattcgacgacgacgcgaaacctaaaatccccaccgcgccctatccccgcaatcctcacctccgacgaaaaaataacgcgccccgaaacgcaaaaaaaaaccgaatccgacgaacgccgccgaaaaaccgtaaaaaaacgcgaaaccgcccctaactaaccgcgaaaccgaacgccgaaacgactaccatccccc

SEQ ID NO: 28009 - DNA, 746 bp, Artificial Sequence
  chemically treated genomic DNA (Homo sapiens) CpG-island No: 28009
aaggaacggagcgcgtattttcgacgagacgttcgtgcgttttcgagttcgttattgtgttaacgttttcgggtttgatagaagtttttaggttcggtattttcgagggagttggtcggaggtttcgcgtttaggattttggtttggaggtttcgggcgtttttggaaacgggaatttcgggggaggggattgggggatggagggagttttggacgaggggtgggattattcggttgtcgttgtcgtttggatggttttcgcggtcgtttcgggtatagtcggcgcgggatttttttcggttgttgtttttgaagtcggtcgggttcggcgggaagagtcgtcggtttcgcggtggcgacggggagtcgcgacgggttcgaggcggggacggggagacgcgacgatttcgtggcggggacggcgaggttcggcggtcgcggtgttttgagggcgagcggggtcggcgagtcggggttcgcgacgaggagtcggagggcggaggcggttttgagttgcggcgagtcgggtttgaggaggagttagagttgcggtcgttgcgcgggtcgttttcgtcgtcgtttttaggtcggtgggaagagacggaggagcgagcgttgttgcggtatatggtttttgtagcggcggttacggcgatagttttgattcgggggcgttttagacgtaggttcggagcgcgtcgtcgtagttgtagtcgtcgttatttcggtcgttgcgcgtcgtttta

SEQ ID NO: 28010 - DNA, 746 bp, Artificial Sequence
  chemically treated genomic DNA (Homo sapiens) CpG-island No: 28010
taaaacgacgcgcaacgaccgaaataacgacgactacaactacgacgacgcgctccgaacctacgtctaaaacgcccccgaatcaaaactatcgccgtaaccgccgctacaaaaaccatataccgcaacaacgctcgctcctccgtctcttcccaccgacctaaaaacgacgacgaaaacgacccgcgcaacgaccgcaactctaactcctcctcaaacccgactcgccgcaactcaaaaccgcctccgccctccgactcctcgtcgcgaaccccgactcgccgaccccgctcgccctcaaaacaccgcgaccgccgaacctcgccgtccccgccacgaaatcgtcgcgtctccccgtccccgcctcgaacccgtcgcgactccccgtcgccaccgcgaaaccgacgactcttcccgccgaacccgaccgacttcaaaaacaacaaccgaaaaaaatcccgcgccgactatacccgaaacgaccgcgaaaaccatccaaacgacaacgacaaccgaataatcccacccctcgtccaaaactccctccatcccccaatcccctcccccgaaattcccgtttccaaaaacgcccgaaacctccaaaccaaaatcctaaacgcgaaacctccgaccaactccctcgaaaataccgaacctaaaaacttctatcaaacccgaaaacgttaacacaataacgaactcgaaaacgcacgaacgtctcgtcgaaaatacgcgctccgttcctt

SEQ ID NO: 28011 - DNA, 746 bp, Artificial Sequence
  chemically treated genomic DNA (Homo sapiens) CpG-island No: 28011
tgaggcggcgcgtagcggtcgaggtggcggcggttgtagttgcggcggcgcgtttcgagtttgcgtttagggcgttttcgggttagagttgtcgtcgtggtcgtcgttgtaagaattatgtatcgtagtagcgttcgttttttcgtttttttttatcggtttaaagacgacggcgggggcggttcgcgtagcggtcgtagttttggtttttttttaggttcggttcgtcgtagtttaaagtcgttttcgtttttcggtttttcgtcgcggatttcggttcgtcgatttcgttcgtttttagggtatcgcggtcgtcgggtttcgtcgttttcgttacggggtcgtcgcgttttttcgttttcgtttcgggttcgtcgcggtttttcgtcgttatcgcggggtcgacgatttttttcgtcgggttcggtcggttttagaggtagtagtcggggggagtttcgcgtcgattatgttcgggacggtcgcggagattatttaggcgatagcggtagtcgggtaattttatttttcgtttaggattttttttattttttagttttttttttcggaattttcgtttttagaaacgttcggggtttttagattagggttttaagcgcgaagttttcggttaattttttcggggatgtcgagtttggaggtttttgttagattcgggagcgttgatataataacggattcgggagcgtacgggcgtttcgtcgggagtgcgcgtttcgtttttt

SEQ ID NO: 28012 - DNA, 746 bp, Artificial Sequence
  chemically treated genomic DNA (Homo sapiens) CpG-island No: 28012
aaaaaacgaaacgcgcactcccgacgaaacgcccgtacgctcccgaatccgttattatatcaacgctcccgaatctaacaaaaacctccaaactcgacatccccgaaaaaattaaccgaaaacttcgcgcttaaaaccctaatctaaaaaccccgaacgtttctaaaaacgaaaattccgaaaaaaaaaactaaaaaataaaaaaaatcctaaacgaaaaataaaattacccgactaccgctatcgcctaaataatctccgcgaccgtcccgaacataatcgacgcgaaactccccccgactactacctctaaaaccgaccgaacccgacgaaaaaaatcgtcgaccccgcgataacgacgaaaaaccgcgacgaacccgaaacgaaaacgaaaaaacgcgacgaccccgtaacgaaaacgacgaaacccgacgaccgcgataccctaaaaacgaacgaaatcgacgaaccgaaatccgcgacgaaaaaccgaaaaacgaaaacgactttaaactacgacgaaccgaacctaaaaaaaaaccaaaactacgaccgctacgcgaaccgcccccgccgtcgtctttaaaccgataaaaaaaaacgaaaaaacgaacgctactacgatacataattcttacaacgacgaccacgacgacaactctaacccgaaaacgccctaaacgcaaactcgaaacgcgccgccgcaactacaaccgccgccacctcgaccgctacgcgccgcctca

SEQ ID NO: 28013 - DNA, 511 bp, Artificial Sequence
  chemically treated genomic DNA (Homo sapiens) CpG-island No: 28013
ttcggagttgggcgtaggggggcgttcgggaggcggcgtagttcgcgttacgttgttgtcgttttttttcggtttcgtcgggtgtaggtgcgtggcgagtttttgtagtacggtcgcgcgttcgatttggtcgttgcgtcgtttttttatgattaggttttttagattttggaattcgagcgtgtggttgcgttgcgtcgatagttgaatttgtagtcggtagggttgtttgtcgatgcgtagttcgtcgtcgattttgaattcgcgtttgtcgtagcggtattaggcggcgaaatttttcgagttgcgttagtttagttcgcgttttttggtatttacgtgcgttagcgcgttgcgtattacggcgttggagtttagcggtttgtagcggtatagatcgttgattacgcggtcgcgacggttttggttggcgttagttaggaagttgttaattatttttagtcggtgtaggtgtattatttggaagttatttatatatacggtttagtgt

SEQ ID NO: 28014 - DNA, 511 bp, Artificial Sequence
  chemically treated genomic DNA (Homo sapiens) CpG-island No: 28014
acactaaaccgtatatataaataacttccaaataatacacctacaccgactaaaaataattaacaacttcctaactaacgccaaccaaaaccgtcgcgaccgcgtaatcaacgatctataccgctacaaaccgctaaactccaacgccgtaatacgcaacgcgctaacgcacgtaaataccaaaaaacgcgaactaaactaacgcaactcgaaaaatttcgccgcctaataccgctacgacaaacgcgaattcaaaatcgacgacgaactacgcatcgacaaacaaccctaccgactacaaattcaactatcgacgcaacgcaaccacacgctcgaattccaaaatctaaaaaacctaatcataaaaaaacgacgcaacgaccaaatcgaacgcgcgaccgtactacaaaaactcgccacgcacctacacccgacgaaaccgaaaaaaaacgacaacaacgtaacgcgaactacgccgcctcccgaacgcccccctacgcccaactccgaa

SEQ ID NO: 28015 - DNA, 511 bp, Artificial Sequence
  chemically treated genomic DNA (Homo sapiens) CpG-island No: 28015
gtattgggtcgtatatgtgggtaatttttaggtggtgtatttgtatcggttggaggtgattaatagttttttgattgacgttagttagggtcgtcgcggtcgcgtggttaacgatttgtatcgttataagtcgttaagttttagcgtcgtggtgcgtaacgcgttggcgtacgtgggtgttaaggagcgcgagttgagttggcgtaattcggagagtttcgtcgtttggtgtcgttacggtaagcgcgagtttaagatcggcggcgagttgcgtatcggtaagtagttttatcggttgtagatttagttgtcggcgtagcgtagttatacgttcgagttttagagtttagaggatttgattatggagaagcgacgtaacgattagatcgggcgcgcggtcgtgttgtaggagttcgttacgtatttgtattcggcggagtcggaggagggcgatagtaacgtggcgcggattacgtcgtttttcgggcgtttttttgcgtttagtttcgag

SEQ ID NO: 28016 - DNA, 511 bp, Artificial Sequence
  chemically treated genomic DNA (Homo sapiens) CpG-island No: 28016
ctcgaaactaaacgcaaaaaaacgcccgaaaaacgacgtaatccgcgccacgttactatcgccctcctccgactccgccgaatacaaatacgtaacgaactcctacaacacgaccgcgcgcccgatctaatcgttacgtcgcttctccataatcaaatcctctaaactctaaaactcgaacgtataactacgctacgccgacaactaaatctacaaccgataaaactacttaccgatacgcaactcgccgccgatcttaaactcgcgcttaccgtaacgacaccaaacgacgaaactctccgaattacgccaactcaactcgcgctccttaacacccacgtacgccaacgcgttacgcaccacgacgctaaaacttaacgacttataacgatacaaatcgttaaccacgcgaccgcgacgaccctaactaacgtcaatcaaaaaactattaatcacctccaaccgatacaaatacaccacctaaaaattacccacatatacgacccaatac

SEQ ID NO: 28017 - DNA, 639 bp, Artificial Sequence
  chemically treated genomic DNA (Homo sapiens) CpG-island No: 28017
agttattgcgcgtattgtttttacggttttatgttcgacggtttcgggacgcggttgggtcggggcgggcggtaaggatgcggtcgtcgtcgtcgtcgtcgcggttttttcgcgtttcgtcgacgttaatagtcgtcggtttttttttcgcgcgggatcgagggagtaggagtcgcggttgacgggtcgcgggcgtcgcgttaggttcggtttcggtttcggttcgggtgcgtcgcgattcggtcgtcgttgtagcgagtttcgcgcgtttttcgtgcgtttcggtcggttcggcggcggttgtcgcgtataggttttcgattttagcgttcggttcgttattgagtatgtttagtacgtcggtcggtttcgttgcggttcgtaagtttttagacgcgcgggtgggagcgcgtcggcggtcggggttggggtttgtggtcgagggcggggcgcgggggaggggtcggcggaggggggcggcggttagaaaggggatttcgcgttttcgtttgtagttttgcggggtttacgtagttttcggcgttttggggttttttttcggggcggtttttcggttttgcggggagtgtggttgaatattgtaatacgatggggttttttaggattttttaaataata

SEQ ID NO: 28018 - DNA, 639 bp, Artificial Sequence
  chemically treated genomic DNA (Homo sapiens) CpG-island No: 28018
tattatttaaaaaatcctaaaaaaccccatcgtattacaatattcaaccacactccccgcaaaaccgaaaaaccgccccgaaaaaaaaccccaaaacgccgaaaactacgtaaaccccgcaaaactacaaacgaaaacgcgaaatcccctttctaaccgccgcccccctccgccgacccctcccccgcgccccgccctcgaccacaaaccccaaccccgaccgccgacgcgctcccacccgcgcgtctaaaaacttacgaaccgcaacgaaaccgaccgacgtactaaacatactcaataacgaaccgaacgctaaaatcgaaaacctatacgcgacaaccgccgccgaaccgaccgaaacgcacgaaaaacgcgcgaaactcgctacaacgacgaccgaatcgcgacgcacccgaaccgaaaccgaaaccgaacctaacgcgacgcccgcgacccgtcaaccgcgactcctactccctcgatcccgcgcgaaaaaaaaaccgacgactattaacgtcgacgaaacgcgaaaaaaccgcgacgacgacgacgacgaccgcatccttaccgcccgccccgacccaaccgcgtcccgaaaccgtcgaacataaaaccgtaaaaacaatacgcgcaataact

SEQ ID NO: 28019 - DNA, 639 bp, Artificial Sequence
  chemically treated genomic DNA (Homo sapiens) CpG-island No: 28019
tgttgtttagggggttttgggggattttatcgtattatagtatttagttatatttttcgtaaagtcgggaagtcgtttcgagagaagattttaggacgtcgggggttgcgtgagtttcgtaaggttgtaggcgggggcgcgggattttttttttggtcgtcgttttttttcgtcggtttttttttcgcgtttcgttttcggttatagattttagtttcggtcgtcggcgcgtttttattcgcgcgtttggggatttgcggatcgtagcgagatcggtcggcgtgttgggtatgtttagtggcgggtcgggcgttggagtcggaagtttgtgcgcggtagtcgtcgtcgagtcggtcggggcgtacggagagcgcgcgggattcgttgtagcggcggtcgggtcgcggcgtattcgggtcgggatcggagtcgagtttagcgcggcgttcgcgattcgttagtcgcggtttttgttttttcgatttcgcgcggggaaagggtcggcggttgttggcgtcggcggggcgcggaggaatcgcggcggcggcggcggcggtcgtatttttgtcgttcgtttcggtttagtcgcgtttcggagtcgtcgggtatggagtcgtggaagtagtgcgcgtagtggtt

SEQ ID NO: 28020 - DNA, 639 bp, Artificial Sequence
  chemically treated genomic DNA (Homo sapiens) CpG-island No: 28020
aaccactacgcgcactacttccacgactccatacccgacgactccgaaacgcgactaaaccgaaacgaacgacaaaaatacgaccgccgccgccgccgccgcgattcctccgcgccccgccgacgccaacaaccgccgaccctttccccgcgcgaaatcgaaaaaacaaaaaccgcgactaacgaatcgcgaacgccgcgctaaactcgactccgatcccgacccgaatacgccgcgacccgaccgccgctacaacgaatcccgcgcgctctccgtacgccccgaccgactcgacgacgactaccgcgcacaaacttccgactccaacgcccgacccgccactaaacatacccaacacgccgaccgatctcgctacgatccgcaaatccccaaacgcgcgaataaaaacgcgccgacgaccgaaactaaaatctataaccgaaaacgaaacgcgaaaaaaaaaccgacgaaaaaaaacgacgaccaaaaaaaaaatcccgcgcccccgcctacaaccttacgaaactcacgcaacccccgacgtcctaaaatcttctctcgaaacgacttcccgactttacgaaaaatataactaaatactataatacgataaaatcccccaaaaccccctaaacaaca

SEQ ID NO: 28021 - DNA, 694 bp, Artificial Sequence
  chemically treated genomic DNA (Homo sapiens) CpG-island No: 28021
gacgcggcgcggattcgtattattgcgcgtagtagtcgttgtagtagtcgtcggggatcgcggagtcgggacgttttcgttcggttcgcgtttcgtttttcgttttattttcgttcgtcgggtttagtaacgtagggtgtttaggagtcgcgggttgcgtagggaggcgggtagcggttttcgcgcgtttttgtcgttttcggagtcggcgcgcggcgagcgtagggcgagcgcgcgtcgggcggcggtcgcgttggggggcgtgaggcgagcggcgcggagagcggtaggggcgaaatttcgcgggttagatgttcgagggcgcggcggcgttgttaggttgtcgttgttgtttttgcgggtttcgggcgcgttttcgtaggcggtattgttcgcggcgcggcgtgtgtatcgagcgagtgaaggtatgtgtggcgggcgcggttggagttgtcgtcgtcgtcgtcgtcgcgttagtaggttttaatgtttgttattttttaggacgttggtagtagtagtagttcggagttttcgagttttcggtaggtttgcgtgttttttttcgcgatttgattggataaagtgggggttcgacggtggtcgacgtgggatagtttggttgtggtaggggtttcggaaattatgggttattgtagtggtaggtgtacgtttatttttatttgtggtatgt

SEQ ID NO: 28022 - DNA, 694 bp, Artificial Sequence
  chemically treated genomic DNA (Homo sapiens) CpG-island No: 28022
acataccacaaataaaaataaacgtacacctaccactacaataacccataatttccgaaacccctaccacaaccaaactatcccacgtcgaccaccgtcgaacccccactttatccaatcaaatcgcgaaaaaaaacacgcaaacctaccgaaaactcgaaaactccgaactactactactaccaacgtcctaaaaaataacaaacattaaaacctactaacgcgacgacgacgacgacgacaactccaaccgcgcccgccacacataccttcactcgctcgatacacacgccgcgccgcgaacaataccgcctacgaaaacgcgcccgaaacccgcaaaaacaacaacgacaacctaacaacgccgccgcgccctcgaacatctaacccgcgaaatttcgcccctaccgctctccgcgccgctcgcctcacgccccccaacgcgaccgccgcccgacgcgcgctcgccctacgctcgccgcgcgccgactccgaaaacgacaaaaacgcgcgaaaaccgctacccgcctccctacgcaacccgcgactcctaaacaccctacgttactaaacccgacgaacgaaaataaaacgaaaaacgaaacgcgaaccgaacgaaaacgtcccgactccgcgatccccgacgactactacaacgactactacgcgcaataatacgaatccgcgccgcgtc

SEQ ID NO: 28023 - DNA, 694 bp, Artificial Sequence
  chemically treated genomic DNA (Homo sapiens) CpG-island No: 28023
gtatgttatagataaagataagcgtgtatttgttattgtaataatttatggttttcgagatttttgttatagttagattgttttacgtcggttatcgtcgagtttttattttatttaattagatcgcggggaaggatacgtaaatttgtcgagggttcgagggtttcgggttgttgttgttgttagcgttttgggaagtgataggtattaggatttgttggcgcggcggcggcggcggcggtagttttagtcgcgttcgttatatatatttttattcgttcggtgtatacgtcgcgtcgcgggtagtgtcgtttgcggaggcgcgttcggggttcgtaggggtagtagcggtagtttggtagcgtcgtcgcgttttcgggtatttggttcgcgaagtttcgtttttgtcgtttttcgcgtcgttcgttttacgttttttagcgcggtcgtcgttcgacgcgcgttcgttttgcgttcgtcgcgcgtcggtttcgggggcggtagaagcgcgcgagggtcgttgttcgtttttttgcgtagttcgcggtttttaggtattttgcgttgttgggttcggcgggcgggggtggggcggggagcggggcgcgggtcgagcgggggcgtttcggtttcgcggttttcggcggttgttgtagcggttgttgcgcgtaatgatgcgggttcgcgtcgcgtt

SEQ ID NO: 28024 - DNA, 694 bp, Artificial Sequence
  chemically treated genomic DNA (Homo sapiens) CpG-island No: 28024
aacgcgacgcgaacccgcatcattacgcgcaacaaccgctacaacaaccgccgaaaaccgcgaaaccgaaacgcccccgctcgacccgcgccccgctccccgccccacccccgcccgccgaacccaacaacgcaaaatacctaaaaaccgcgaactacgcaaaaaaacgaacaacgaccctcgcgcgcttctaccgcccccgaaaccgacgcgcgacgaacgcaaaacgaacgcgcgtcgaacgacgaccgcgctaaaaaacgtaaaacgaacgacgcgaaaaacgacaaaaacgaaacttcgcgaaccaaatacccgaaaacgcgacgacgctaccaaactaccgctactacccctacgaaccccgaacgcgcctccgcaaacgacactacccgcgacgcgacgtatacaccgaacgaataaaaatatatataacgaacgcgactaaaactaccgccgccgccgccgccgcgccaacaaatcctaatacctatcacttcccaaaacgctaacaacaacaacaacccgaaaccctcgaaccctcgacaaatttacgtatccttccccgcgatctaattaaataaaataaaaactcgacgataaccgacgtaaaacaatctaactataacaaaaatctcgaaaaccataaattattacaataacaaatacacgcttatctttatctataacatac

SEQ ID NO: 28025 - DNA, 650 bp, Artificial Sequence
  chemically treated genomic DNA (Homo sapiens) CpG-island No: 28025
tgttcggattatttgcgttagttattgtagtacgtcgggttattttggtcgggggtaggtttagggacggtgtggaatttcgattattttttcgattgtacgtttcgtagggttgtaaaatagtagttttttcgttttacgttcgttttttttagattatttcgtcgagagtgggttgtcggttgttcgttaagtaattgcgggggtattggttttggggagaaaaagtatggcgatcgattgcgttagtgtagtagcgtgtggggagaatttcggggtttgagttttgtattgttcgttgcgggattatagtcgatttcgagatcggattttttttagtcggtaggttttggaatttggattgggtgcgcggcgttttagtttaagtgcgttgcggcgcgggtagggttaatcgtttcggtatttcggtcgggggtgggtgggggcggggtcggaggaggggattttcgtagtttgtcgatagagtcggtcgggtttttcgggttttttttggcgggggcggagggtttttttcgttatcgttagtttatatttgcgttttttttagaatatgaggggatggcgttttcggtcgtcgggttttgggttttggcgtttaggttttttggtagttcgaattcggaggtttt

SEQ ID NO: 28026 - DNA, 650 bp, Artificial Sequence
  chemically treated genomic DNA (Homo sapiens) CpG-island No: 28026
aaaacctccgaattcgaactaccaaaaaacctaaacgccaaaacccaaaacccgacgaccgaaaacgccatcccctcatattctaaaaaaaacgcaaatataaactaacgataacgaaaaaaaccctccgcccccgccaaaaaaaacccgaaaaacccgaccgactctatcgacaaactacgaaaatcccctcctccgaccccgcccccacccacccccgaccgaaataccgaaacgattaaccctacccgcgccgcaacgcacttaaactaaaacgccgcgcacccaatccaaattccaaaacctaccgactaaaaaaaatccgatctcgaaatcgactataatcccgcaacgaacaatacaaaactcaaaccccgaaattctccccacacgctactacactaacgcaatcgatcgccatactttttctccccaaaaccaatacccccgcaattacttaacgaacaaccgacaacccactctcgacgaaataatctaaaaaaaacgaacgtaaaacgaaaaaactactattttacaaccctacgaaacgtacaatcgaaaaaataatcgaaattccacaccgtccctaaacctacccccgaccaaaataacccgacgtactacaataactaacgcaaataatccgaaca

SEQ ID NO: 28027 - DNA, 650 bp, Artificial Sequence
  chemically treated genomic DNA (Homo sapiens) CpG-island No: 28027
gggattttcggattcgggttgttagagggtttgagcgttagagtttaggattcggcggtcgggggcgttatttttttatgttttggagaaggcgtaaatgtgagttggcggtagcggggaaagtttttcgttttcgttaggggggattcgggaagttcggtcggttttgtcggtagattgcggggattttttttttcggtttcgtttttatttattttcggtcggggtgtcgaggcggttaattttattcgcgtcgtagcgtatttgggttagagcgtcgcgtatttaatttagattttagagtttgtcggttgggaaagattcggtttcggggtcggttatgatttcgtagcgggtaatgtagggtttaggtttcgggattttttttatacgttgttgtattggcgtagtcggtcgttatattttttttttttaaagttagtgttttcgtagttatttggcgggtagtcggtagtttattttcggcgggatgatttgggagaagcgggcgtgggacgagggggttgttgttttgtagttttgcgaggcgtgtagtcggagaagtggtcggggttttatatcgtttttgagtttgttttcggttaaggtggttcgacgtgttgtagtggttggcgtaggtgattcgggta

SEQ ID NO: 28028 - DNA, 650 bp, Artificial Sequence
  chemically treated genomic DNA (Homo sapiens) CpG-island No: 28028
tacccgaatcacctacgccaaccactacaacacgtcgaaccaccttaaccgaaaacaaactcaaaaacgatataaaaccccgaccacttctccgactacacgcctcgcaaaactacaaaacaacaaccccctcgtcccacgcccgcttctcccaaatcatcccgccgaaaataaactaccgactacccgccaaataactacgaaaacactaactttaaaaaaaaaaaatataacgaccgactacgccaatacaacaacgtataaaaaaaatcccgaaacctaaaccctacattacccgctacgaaatcataaccgaccccgaaaccgaatctttcccaaccgacaaactctaaaatctaaattaaatacgcgacgctctaacccaaatacgctacgacgcgaataaaattaaccgcctcgacaccccgaccgaaaataaataaaaacgaaaccgaaaaaaaaaatccccgcaatctaccgacaaaaccgaccgaacttcccgaatcccccctaacgaaaacgaaaaactttccccgctaccgccaactcacatttacgccttctccaaaacataaaaaaataacgcccccgaccgccgaatcctaaactctaacgctcaaaccctctaacaacccgaatccgaaaatccc

SEQ ID NO: 28029 - DNA, 1389 bp, Artificial Sequence
  chemically treated genomic DNA (Homo sapiens) CpG-island No: 28029
gtttcgtagcggcgaacgtttcgcgcggttttcgtcgttcgtcggggaatgcgtagggtcgcggtttcgcgcggcgtcgattttttttttttttttaatttttttttttttttttttttcgaggcgatagaaataatagcgcgggaggaggggaaagtaattttcggtattttcgtcggaattagtttcggtgtagtgatgatattttttcgtggcgtaattaagtttcgtttttttcgtagcggcgttttcgtcgtcgtcgttttttttatttgaaagtggttatttttcgtcgcggtagtttttttcgtttcgtcgtcgttagttgtattaattcgttcggttttagttgtaaattaaacgttttttcgcgtttagaagttatttgcgtcgttggaaacggtcgcgtcgttttttttttcgagttttttcggggcggtattttcgggttggggcgggcgcgtcggcgagaaacggttttaagatgggagcggtagcggcggcgaggagtttcgagcgggttcggttttcgttttcgttttcgtttttagatagttttggaaattgtgtattatttttgttataggaagttattcggcgaggaaggcggcgcggaattaataaataaacgtttgcggtcgttcgtcggaatcggcgcggggatcgcgtcgggtttcgggtcgttttcggggcgggggcgtagcggttattttcgcgtcgcgggttttgtgcggggcgggcgcggcgggtcgggcgttttcgttttcgtaattttttatttcggttcgggcggcgtagttgggatcgttaggtgacgtttcggtcgtagcggagaagtagcgtttcggtcgtcgttcgtttttatttttatattgggtcgtttttttttaaatattagaggcgggttataaaagttggtttcggggttatttagtatttgtttacgtgtcgcggaggttcgttttcgagtttttttcggttttttttttcgtcgttttcggtcgttaggttatttattatcggtgggaggggagagaggttgttatttaaacgttcgcggaagttgaggtatttttattggcgggtgtcgtgtatttgtttttcgtcgtcgcgtttcgttattttgagtagtagtcgcgtttttagtttcgttttttgttcgaaggcgggcgggggggagcgggaaggaggtggaagggatcgaatttttttagtaaatgggatcgtttcgataggattcggtttttcggttaatattttatattttatttttttttcgtatttgtaagttaatgtcgagtaattcggaaagtttgttggttatcgaataatagtttttaattcgtaaatatagatttataggtataagatacgtgtattgaagggttt

SEQ ID NO: 28030 - DNA, 1389 bp, Artificial Sequence
  chemically treated genomic DNA (Homo sapiens) CpG-island No: 28030
aaacccttcaatacacgtatcttatacctataaatctatatttacgaattaaaaactattattcgataaccaacaaactttccgaattactcgacattaacttacaaatacgaaaaaaaaataaaatataaaatattaaccgaaaaaccgaatcctatcgaaacgatcccatttactaaaaaaattcgatcccttccacctccttcccgctcccccccgcccgccttcgaacaaaaaacgaaactaaaaacgcgactactactcaaaataacgaaacgcgacgacgaaaaacaaatacacgacacccgccaataaaaatacctcaacttccgcgaacgtttaaataacaacctctctcccctcccaccgataataaataacctaacgaccgaaaacgacgaaaaaaaaaaccgaaaaaaactcgaaaacgaacctccgcgacacgtaaacaaatactaaataaccccgaaaccaacttttataacccgcctctaatatttaaaaaaaaacgacccaatataaaaataaaaacgaacgacgaccgaaacgctacttctccgctacgaccgaaacgtcacctaacgatcccaactacgccgcccgaaccgaaataaaaaattacgaaaacgaaaacgcccgacccgccgcgcccgccccgcacaaaacccgcgacgcgaaaataaccgctacgcccccgccccgaaaacgacccgaaacccgacgcgatccccgcgccgattccgacgaacgaccgcaaacgtttatttattaattccgcgccgccttcctcgccgaataacttcctataacaaaaataatacacaatttccaaaactatctaaaaacgaaaacgaaaacgaaaaccgaacccgctcgaaactcctcgccgccgctaccgctcccatcttaaaaccgtttctcgccgacgcgcccgccccaacccgaaaataccgccccgaaaaaactcgaaaaaaaaaacgacgcgaccgtttccaacgacgcaaataacttctaaacgcgaaaaaacgtttaatttacaactaaaaccgaacgaattaatacaactaacgacgacgaaacgaaaaaaactaccgcgacgaaaaataaccactttcaaataaaaaaaacgacgacgacgaaaacgccgctacgaaaaaaacgaaacttaattacgccacgaaaaaatatcatcactacaccgaaactaattccgacgaaaataccgaaaattactttcccctcctcccgcgctattatttctatcgcctcgaaaaaaaaaaaaaaaaaaaaattaaaaaaaaaaaaaaaatcgacgccgcgcgaaaccgcgaccctacgcattccccgacgaacgacgaaaaccgcgcgaaacgttcgccgctacgaaac

SEQ ID NO: 28031 - DNA, 1389 bp, Artificial Sequence
  chemically treated genomic DNA (Homo sapiens) CpG-island No: 28031
gagttttttagtgtacgtgttttgtgtttgtgagtttgtgtttgcgagttgggggttgttgttcggtagttagtaggtttttcgggttgttcggtattggtttgtaaatgcgggagagggatggaatgtggaatgttgatcggggaatcgaattttgtcggaacggttttatttgttggagaaattcgattttttttatttttttttcgttttttttcgttcgttttcgggtaggaggcggggttgaggacgcggttgttgtttaaagtggcggagcgcggcggcgggaggtaggtgtacggtattcgttagtgggggtgttttaattttcgcgggcgtttaaatagtagtttttttttttttttatcggtaataggtgatttggcggtcgagggcggcgggggagggaatcgggggagattcgggagcgagttttcgcggtacgtgggtaggtgttgggtggtttcggggttaatttttgtagttcgtttttggtgtttgaggagaggcggtttagtgtggaaatgggggcgggcggcggtcgaggcgttgttttttcgttgcggtcggagcgttatttaacggttttagttgcgtcgttcgggtcggggtggggggttgcgggggcggggacgttcggttcgtcgcgttcgtttcgtataaagttcgcggcgcgggggtggtcgttgcgttttcgtttcgggaacggttcgaagttcgacgcggttttcgcgtcggtttcggcgggcggtcgtaggcgtttgtttgttggtttcgcgtcgtttttttcgtcggatggttttttgtgatagaggtgatatatagtttttagaattgtttgggggcgggagcgggagcgggagtcgagttcgttcggagtttttcgtcgtcgttgtcgtttttattttaaaatcgtttttcgtcggcgcgttcgttttagttcgaaggtgtcgtttcggagggattcggggagggggacggcgcggtcgtttttagcggcgtaagtggtttttggacgcgagggagcgtttgatttgtaattggggtcgagcggattggtgtagttggcggcggcggggcgggaggagttgtcgcggcggggggtggttatttttaaatggagagggcggcggcggcggggacgtcgttgcggagggagcggggtttggttgcgttacgagaaggtgttattattgtatcggggttaatttcggcggaggtgtcgggagttattttttttttttttcgcgttgttgtttttgtcgtttcgggaggaggaggaggaggaggattgggagagagggaggggtcggcgtcgcgcggaatcgcggttttgcgtatttttcggcgggcggcgggagtcgcgcggagcgttcgtcgttgcggggt

SEQ ID NO: 28032 - DNA, 1389 bp, Artificial Sequence
  chemically treated genomic DNA (Homo sapiens) CpG-island No: 28032
accccgcaacgacgaacgctccgcgcgactcccgccgcccgccgaaaaatacgcaaaaccgcgattccgcgcgacgccgacccctccctctctcccaatcctcctcctcctcctcctcccgaaacgacaaaaacaacaacgcgaaaaaaaaaaaaaataactcccgacacctccgccgaaattaaccccgatacaataataacaccttctcgtaacgcaaccaaaccccgctccctccgcaacgacgtccccgccgccgccgccctctccatttaaaaataaccaccccccgccgcgacaactcctcccgccccgccgccgccaactacaccaatccgctcgaccccaattacaaatcaaacgctccctcgcgtccaaaaaccacttacgccgctaaaaacgaccgcgccgtccccctccccgaatccctccgaaacgacaccttcgaactaaaacgaacgcgccgacgaaaaacgattttaaaataaaaacgacaacgacgacgaaaaactccgaacgaactcgactcccgctcccgctcccgcccccaaacaattctaaaaactatatatcacctctatcacaaaaaaccatccgacgaaaaaaacgacgcgaaaccaacaaacaaacgcctacgaccgcccgccgaaaccgacgcgaaaaccgcgtcgaacttcgaaccgttcccgaaacgaaaacgcaacgaccacccccgcgccgcgaactttatacgaaacgaacgcgacgaaccgaacgtccccgcccccgcaaccccccaccccgacccgaacgacgcaactaaaaccgttaaataacgctccgaccgcaacgaaaaaacaacgcctcgaccgccgcccgcccccatttccacactaaaccgcctctcctcaaacaccaaaaacgaactacaaaaattaaccccgaaaccacccaacacctacccacgtaccgcgaaaactcgctcccgaatctcccccgattccctcccccgccgccctcgaccgccaaatcacctattaccgataaaaaaaaaaaaaaactactatttaaacgcccgcgaaaattaaaacacccccactaacgaataccgtacacctacctcccgccgccgcgctccgccactttaaacaacaaccgcgtcctcaaccccgcctcctacccgaaaacgaacgaaaaaaaacgaaaaaaaaataaaaaaaatcgaatttctccaacaaataaaaccgttccgacaaaattcgattccccgatcaacattccacattccatccctctcccgcatttacaaaccaataccgaacaacccgaaaaacctactaactaccgaacaacaacccccaactcgcaaacacaaactcacaaacacaaaacacgtacactaaaaaactc

SEQ ID NO: 28033 - DNA, 589 bp, Artificial Sequence
  chemically treated genomic DNA (Homo sapiens) CpG-island No: 28033
gtagcgttcgtttttagttttgcgttcgcgcgagtaattcgacgttttttcgtttcgtcggtcgcgttttcgttttcgtcgtttcgttttttgtttaggcgtgcgcgcgtattttacgggggcgcgttcggtcggcggggtcgcgtacgtagtcgtcgttattatttttttttttttttttttttttgcgggtttttttttttttttttttttttcgttttttttttcgtaggtagttcgttcgttagttcgttcgtatcgttttttttttagtttttagcgtttcggttgggtttttttttcgttttttaggttttttcggtcgttttttttcggcggtcgttcgcgttcggtggatgtggttggtagttgtcgttttttttttcgttcgtcgtttgttttttttcggtttttcgttttttttttttttttttttcgtttttagtcgtttttttcgtcgtcgtttttatagtttgggtttcgtcgcgatgtcggagaagaggtttttcgagcggttgtttgtcgatgttttttttattaattatagtttttgttttaagttcgatttgttggattttattttcgaggg

SEQ ID NO: 28034 - DNA, 589 bp, Artificial Sequence
  chemically treated genomic DNA (Homo sapiens) CpG-island No: 28034
ccctcgaaaataaaatccaacaaatcgaacttaaaacaaaaactataattaataaaaaaaacatcgacaaacaaccgctcgaaaaacctcttctccgacatcgcgacgaaacccaaactataaaaacgacgacgaaaaaaacgactaaaaacgaaaaaaaaaaaaaaaaaaaacgaaaaaccgaaaaaaaacaaacgacgaacgaaaaaaaaaacgacaactaccaaccacatccaccgaacgcgaacgaccgccgaaaaaaaacgaccgaaaaaacctaaaaaacgaaaaaaaaacccaaccgaaacgctaaaaactaaaaaaaaaacgatacgaacgaactaacgaacgaactacctacgaaaaaaaaaacgaaaaaaaaaaaaaaaaaaaaaaacccgcaaaaaaaaaaaaaaaaaaaaaaataataacgacgactacgtacgcgaccccgccgaccgaacgcgcccccgtaaaatacgcgcgcacgcctaaacaaaaaacgaaacgacgaaaacgaaaacgcgaccgacgaaacgaaaaaacgtcgaattactcgcgcgaacgcaaaactaaaaacgaacgctac

SEQ ID NO: 28035 - DNA, 589 bp, Artificial Sequence
  chemically treated genomic DNA (Homo sapiens) CpG-island No: 28035
ttttcgaaggtgaagtttagtaagtcgggtttgaggtaaaggttgtagttgatgggggagatatcggtaggtagtcgttcgaagggtttttttttcggtatcgcggcgaggtttaggttgtggaggcggcggcgagaggagcggttgaagacgagaaggaggaggggaggaggcggagggtcgaggaagagtaggcggcgagcgagggagggggcggtagttgttagttatatttatcgagcgcgggcgatcgtcggaggagagcgatcgggggagtttggggggcgggggagagatttagtcggagcgttaggggttgggaaggaggcggtgcgggcggattggcgggcgggttgtttacggggaagggggcggaggggagggaaggggaggagggttcgtaaggagggagggagagggggaagtggtggcggcggttgcgtgcgcggtttcgtcggtcgggcgcgttttcgtggagtgcgcgcgtacgtttgggtagagggcggagcggcgaggacgagggcgcggtcggcggggcgggagggcgtcgggttgttcgcgcgagcgtagggttggaggcgggcgttgt

SEQ ID NO: 28036 - DNA, 589 bp, Artificial Sequence
  chemically treated genomic DNA (Homo sapiens) CpG-island No: 28036
acaacgcccgcctccaaccctacgctcgcgcgaacaacccgacgccctcccgccccgccgaccgcgccctcgtcctcgccgctccgccctctacccaaacgtacgcgcgcactccacgaaaacgcgcccgaccgacgaaaccgcgcacgcaaccgccgccaccacttccccctctccctccctccttacgaaccctcctccccttccctcccctccgcccccttccccgtaaacaacccgcccgccaatccgcccgcaccgcctccttcccaacccctaacgctccgactaaatctctcccccgccccccaaactcccccgatcgctctcctccgacgatcgcccgcgctcgataaatataactaacaactaccgccccctccctcgctcgccgcctactcttcctcgaccctccgcctcctcccctcctccttctcgtcttcaaccgctcctctcgccgccgcctccacaacctaaacctcgccgcgataccgaaaaaaaaacccttcgaacgactacctaccgatatctcccccatcaactacaacctttacctcaaacccgacttactaaacttcaccttcgaaaa

SEQ ID NO: 28037 - DNA, 513 bp, Artificial Sequence
  chemically treated genomic DNA (Homo sapiens) CpG-island No: 28037
tgataaatcgttatttgggttttggacggttacggttacggttagggttgcggttatatatcgtgggtttcgttttcgtttttatttacgtgtacgtaaagcgtcgcgcgtcggttcgtaggtttaggattcggggatttttttgcgttttttacgcggcggcgtttttgggtcgttttggttgttgtcgtttagtcgcgagttcgggtttcggggagcgttatggcgtttagcgtagcgcggcgtattgattcgagtaggagacgcgcgtagggattattgtgagtgcgtagtcggcggaaggaagaggggttgcgtgatcgcgcgataagagggttcgggttcggggttgcggcgttatttgtcgggcgttcgggcgtttattgcggttttttgtcggttttttttttaggtcgcgaggcgggttgtttgttttttggtattttgtgttcgggcgagttttcggatttatttaggagtttttagtttgtttagttaattttttgatatttg

SEQ ID NO: 28038 - DNA, 513 bp, Artificial Sequence
  chemically treated genomic DNA (Homo sapiens) CpG-island No: 28038
caaatatcaaaaaattaactaaacaaactaaaaactcctaaataaatccgaaaactcgcccgaacacaaaataccaaaaaacaaacaacccgcctcgcgacctaaaaaaaaaaccgacaaaaaaccgcaataaacgcccgaacgcccgacaaataacgccgcaaccccgaacccgaaccctcttatcgcgcgatcacgcaacccctcttccttccgccgactacgcactcacaataatccctacgcgcgtctcctactcgaatcaatacgccgcgctacgctaaacgccataacgctccccgaaacccgaactcgcgactaaacgacaacaaccaaaacgacccaaaaacgccgccgcgtaaaaaacgcaaaaaaatccccgaatcctaaacctacgaaccgacgcgcgacgctttacgtacacgtaaataaaaacgaaaacgaaacccacgatatataaccgcaaccctaaccgtaaccgtaaccgtccaaaacccaaataacgatttatca

SEQ ID NO: 28039 - DNA, 513 bp, Artificial Sequence
  chemically treated genomic DNA (Homo sapiens) CpG-island No: 28039
taaatgttaaggaattgattgaataaattaagagtttttggatgggttcgggaattcgttcgggtataaggtgttaaaaggtaagtagttcgtttcgcggtttggggaaagaatcgataggaggtcgtagtgagcgttcgggcgttcggtaggtggcgtcgtagtttcgggttcgggtttttttgtcgcgcggttacgtagtttttttttttttcgtcggttgcgtatttatagtgatttttgcgcgcgttttttgttcgggttagtgcgtcgcgttgcgttgggcgttatggcgtttttcggagttcgggttcgcggttgggcggtagtagttagagcggtttagaggcgtcgtcgcgtggagaacgtaggagggttttcgagttttgagtttgcgggtcggcgcgcggcgttttacgtatacgtgagtaggggcgggggcggagtttacggtgtgtggtcgtagttttggtcgtgatcgtggtcgtttaaaatttaggtggcggtttgtta

SEQ ID NO: 28040 - DNA, 513 bp, Artificial Sequence
  chemically treated genomic DNA (Homo sapiens) CpG-island No: 28040
taacaaaccgccacctaaattttaaacgaccacgatcacgaccaaaactacgaccacacaccgtaaactccgcccccgcccctactcacgtatacgtaaaacgccgcgcgccgacccgcaaactcaaaactcgaaaaccctcctacgttctccacgcgacgacgcctctaaaccgctctaactactaccgcccaaccgcgaacccgaactccgaaaaacgccataacgcccaacgcaacgcgacgcactaacccgaacaaaaaacgcgcgcaaaaatcactataaatacgcaaccgacgaaaaaaaaaaaaactacgtaaccgcgcgacaaaaaaacccgaacccgaaactacgacgccacctaccgaacgcccgaacgctcactacgacctcctatcgattctttccccaaaccgcgaaacgaactacttaccttttaacaccttatacccgaacgaattcccgaacccatccaaaaactcttaatttattcaatcaattccttaacattta

SEQ ID NO: 28041 - DNA, 534 bp, Artificial Sequence
  chemically treated genomic DNA (Homo sapiens) CpG-island No: 28041
cgcggtagggggtttcgggatttcgcgttgtttcgtagagttcggtattttcgtaggtcgcgtttatcgcgcgtcggtttttttggtttttaggttttttcgggacgcggtttcgtaggtaattagggaaacgcgtcgttatggtaacgtgcgcgttacgtcgggagttttttttaattcgcggttttttttgtcggagtttttggtagtttcggtcgttattattcgcgttattttcgcgtttcgtttttgtcgaaatggagtgggatttcgaattttagtttcgggcgagggttcgtagtgatttagttttttacgtcgcgtcgcgttgcgggttttgtgcgtcgcgggttttcgggcggtgttgtaggcgttggacgcgggttcggcgggcgtgttagtcgcgcggagttaaaacggttagatttgtaaagggatcgttttattttttcgtttgtcggaatttttaattttttacgtgtatgtatggtacggttggtgagtttcgagtaatagatatagaatttgaacgtt

SEQ ID NO: 28042 - DNA, 534 bp, Artificial Sequence
  chemically treated genomic DNA (Homo sapiens) CpG-island No: 28042
aacgttcaaattctatatctattactcgaaactcaccaaccgtaccatacatacacgtaaaaaattaaaaattccgacaaacgaaaaaataaaacgatccctttacaaatctaaccgttttaactccgcgcgactaacacgcccgccgaacccgcgtccaacgcctacaacaccgcccgaaaacccgcgacgcacaaaacccgcaacgcgacgcgacgtaaaaaactaaatcactacgaaccctcgcccgaaactaaaattcgaaatcccactccatttcgacaaaaacgaaacgcgaaaataacgcgaataataacgaccgaaactaccaaaaactccgacaaaaaaaaccgcgaattaaaaaaaactcccgacgtaacgcgcacgttaccataacgacgcgtttccctaattacctacgaaaccgcgtcccgaaaaaacctaaaaaccaaaaaaaccgacgcgcgataaacgcgacctacgaaaataccgaactctacgaaacaacgcgaaatcccgaaaccccctaccgcg

SEQ ID NO: 28043 - DNA, 534 bp, Artificial Sequence
  chemically treated genomic DNA (Homo sapiens) CpG-island No: 28043
aacgtttagattttatatttattattcgaagtttattagtcgtgttatgtatgtacgtaggaaattagagatttcgatagacgggagggtgggacggtttttttgtaaatttggtcgttttggtttcgcgcggttggtacgttcgtcgggttcgcgtttagcgtttgtagtatcgttcgggagttcgcggcgtatagagttcgtagcgcggcgcggcgtggggggttaagttattgcgaattttcgttcggagttggggttcggggttttattttatttcggtaggagcggggcgcgagggtggcgcgggtagtggcgatcgggattgttaggggtttcggtaaaggaggtcgcgggttgggaggggttttcgacgtggcgcgtacgttattatggcgacgcgtttttttggttatttgcggggtcgcgtttcggaggagtttgagggttaagagggtcggcgcgcggtgggcgcggtttgcggggatgtcgggttttacggagtagcgcggggtttcgaagttttttatcgcg

SEQ ID NO: 28044 - DNA, 534 bp, Artificial Sequence
  chemically treated genomic DNA (Homo sapiens) CpG-island No: 28044
cgcgataaaaaacttcgaaaccccgcgctactccgtaaaacccgacatccccgcaaaccgcgcccaccgcgcgccgaccctcttaaccctcaaactcctccgaaacgcgaccccgcaaataaccaaaaaaacgcgtcgccataataacgtacgcgccacgtcgaaaacccctcccaacccgcgacctcctttaccgaaacccctaacaatcccgatcgccactacccgcgccaccctcgcgccccgctcctaccgaaataaaataaaaccccgaaccccaactccgaacgaaaattcgcaataacttaaccccccacgccgcgccgcgctacgaactctatacgccgcgaactcccgaacgatactacaaacgctaaacgcgaacccgacgaacgtaccaaccgcgcgaaaccaaaacgaccaaatttacaaaaaaaccgtcccaccctcccgtctatcgaaatctctaatttcctacgtacatacataacacgactaataaacttcgaataataaatataaaatctaaacgtt

SEQ ID NO: 28045 - DNA, 1332 bp, Artificial Sequence
  chemically treated genomic DNA (Homo sapiens) CpG-island No: 28045
gtagaatagcgtcgcgggtattacgtgaaattttcggggtcggttgggggcgggggacgaggggcgtttattcgggggtcggtagtttgtaggtgcgatgggcggtttttttatttacgtttattcggattggagttcgtcgttttcggtcgggttttcgggtggttcgcgttttttttgaattggtagcgaggtcgcggtaggttcgaggtaaatcggacgaagaggggaaaaagttttaggggtttgggggttttcgcgttttaggggaggtaagggtcgggttagaggcgcgagggtgggtgagggattttcgtcgcggggtcgggatcggggttcgggtagtgggttttgtttcgcgcgtttacgcgggtcgttttatcgtggttttgtaggatttcgtgtttgagatcgtcggtgtagtcgatgagtttttttaggtcgcgttcgtatagttgttcgtagttcgagaatttgtgtagtattttttttagttcgcgttttatcgttacgtattgatttatgtcggaggcggcggcgttcggtttttcggcgtttaggtgttcgtagtcgttcggttcgggtttcgtcgaggtcgcgttttgtttttcgttttttaagcgggcggcgcgggaggttgaggcggtcgaggcggcgggcgtattagtcgcggcgtcgggggagtttcgcgtagtcggagttcgtttgttttatggcgttttagttttttggcgagtcgtcgttgttttcgttcgttcgttgtattcggtttcgcgtttttaggtttcgttcgcgacgttcgggtgtttgcgacggcgcggtcgattgtttttgtttttacgggaatcgatcgatgatttggttttttcgggcggtattaagtgtcgtcgattggggggagggggatggttattcgggcgaggaaaggaggcggagcgggtcgtattaagtatattttcggggtggggggtgcgattcggcgagaacgggcggaggaacgcgacgggcgtttatacgcgtcgttattttaatggtgtgcgtcgtattatacggaaggcgtgcgagggagagggcgagggtggagcgaggttttaattggtttgaggagttaaatagggaattttggagatagttttagcgttcggagagcgtaataattacgcgttttataaataaggaggcggaaatcggtttttattatttcgtttagaagcggggaattttaattaatgggcgcggggagtggtaagaagttaatttttggtcgaggcgtaagtttttagttaattcgggttgaggggttaaattaacgggttcgttgttggagggggt

SEQ ID NO: 28046 - DNA, 1332 bp, Artificial Sequence
  chemically treated genomic DNA (Homo sapiens) CpG-island No: 28046
accccctccaacaacgaacccgttaatttaacccctcaacccgaattaactaaaaacttacgcctcgaccaaaaattaacttcttaccactccccgcgcccattaattaaaattccccgcttctaaacgaaataataaaaaccgatttccgcctccttatttataaaacgcgtaattattacgctctccgaacgctaaaactatctccaaaattccctatttaactcctcaaaccaattaaaacctcgctccaccctcgccctctccctcgcacgccttccgtataatacgacgcacaccattaaaataacgacgcgtataaacgcccgtcgcgttcctccgcccgttctcgccgaatcgcaccccccaccccgaaaatatacttaatacgacccgctccgcctcctttcctcgcccgaataaccatccccctccccccaatcgacgacacttaataccgcccgaaaaaaccaaatcatcgatcgattcccgtaaaaacaaaaacaatcgaccgcgccgtcgcaaacacccgaacgtcgcgaacgaaacctaaaaacgcgaaaccgaatacaacgaacgaacgaaaacaacgacgactcgccaaaaaactaaaacgccataaaacaaacgaactccgactacgcgaaactcccccgacgccgcgactaatacgcccgccgcctcgaccgcctcaacctcccgcgccgcccgcttaaaaaacgaaaaacaaaacgcgacctcgacgaaacccgaaccgaacgactacgaacacctaaacgccgaaaaaccgaacgccgccgcctccgacataaatcaatacgtaacgataaaacgcgaactaaaaaaaatactacacaaattctcgaactacgaacaactatacgaacgcgacctaaaaaaactcatcgactacaccgacgatctcaaacacgaaatcctacaaaaccacgataaaacgacccgcgtaaacgcgcgaaacaaaacccactacccgaaccccgatcccgaccccgcgacgaaaatccctcacccaccctcgcgcctctaacccgacccttacctcccctaaaacgcgaaaacccccaaacccctaaaactttttcccctcttcgtccgatttacctcgaacctaccgcgacctcgctaccaattcaaaaaaaacgcgaaccacccgaaaacccgaccgaaaacgacgaactccaatccgaataaacgtaaataaaaaaaccgcccatcgcacctacaaactaccgacccccgaataaacgcccctcgtcccccgcccccaaccgaccccgaaaatttcacgtaatacccgcgacgctattctac

SEQ ID NO: 28047 - DNA, 1332 bp, Artificial Sequence
  chemically treated genomic DNA (Homo sapiens) CpG-island No: 28047
attttttttaatagcgagttcgttggtttggttttttagttcggattggttgaaggtttacgtttcggttagggattggttttttattatttttcgcgtttattggttgggatttttcgtttttgggcggagtggtgagggtcggttttcgtttttttgtttatggagcgcgtagttgttgcgtttttcgagcgttggggttgtttttaaagttttttatttagttttttaggttaattggggtttcgttttattttcgttttttttttcgtacgtttttcgtgtggtacggcgtatattattagagtggcggcgcgtgtgggcgttcgtcgcgttttttcgttcgttttcgtcgggtcgtattttttatttcgagggtgtatttggtacggttcgtttcgtttttttttttcgttcgggtggttatttttttttttttagtcggcggtatttggtgtcgttcgggagaattaggttatcggtcggttttcgtgaaaataaaaataatcggtcgcgtcgtcgtaggtattcgaacgtcgcgagcggggtttggggacgcggggtcgagtgtagcgagcgaacgggagtagcggcgattcgttagggggttagggcgttatggggtaggcgggtttcggttgcgcggggttttttcggcgtcgcggttagtgcgttcgtcgtttcggtcgttttagtttttcgcgtcgttcgtttggggaacgaggagtaggacgcggtttcggcggggttcgggtcgaacggttgcggatatttgggcgtcgaggagtcgagcgtcgtcgttttcggtatggattagtgcgtgacggtggagcgcgagttggagaaggtgttgtataagttttcgggttacgggtagttgtgcgagcgcggtttggaggagtttatcgattatatcggcggttttaagtacgagattttgtagagttacggtagggcggttcgcgtgggcgcgcggggtagggtttattgttcgagtttcggtttcggtttcgcggcgggaattttttatttattttcgcgtttttggttcggtttttgttttttttgaggcgcggaggtttttagatttttgagattttttttttttttcgttcgatttatttcgaatttgtcgcgatttcgttgttaatttagaaggagcgcgaattattcggaaattcggtcgggagcggcgggttttagttcggataaacgtgggtgagggggtcgtttatcgtatttgtaaattgtcgattttcgagtgggcgtttttcgtttttcgtttttagtcggtttcgggagttttacgtggtgttcgcggcgttgttttgt

SEQ ID NO: 28048 - DNA, 1332 bp, Artificial Sequence
  chemically treated genomic DNA (Homo sapiens) CpG-island No: 28048
acaaaacaacgccgcgaacaccacgtaaaactcccgaaaccgactaaaaacgaaaaacgaaaaacgcccactcgaaaatcgacaatttacaaatacgataaacgaccccctcacccacgtttatccgaactaaaacccgccgctcccgaccgaatttccgaataattcgcgctccttctaaattaacaacgaaatcgcgacaaattcgaaataaatcgaacgaaaaaaaaaaaaaatctcaaaaatctaaaaacctccgcgcctcaaaaaaaacaaaaaccgaaccaaaaacgcgaaaataaataaaaaattcccgccgcgaaaccgaaaccgaaactcgaacaataaaccctaccccgcgcgcccacgcgaaccgccctaccgtaactctacaaaatctcgtacttaaaaccgccgatataatcgataaactcctccaaaccgcgctcgcacaactacccgtaacccgaaaacttatacaacaccttctccaactcgcgctccaccgtcacgcactaatccataccgaaaacgacgacgctcgactcctcgacgcccaaatatccgcaaccgttcgacccgaaccccgccgaaaccgcgtcctactcctcgttccccaaacgaacgacgcgaaaaactaaaacgaccgaaacgacgaacgcactaaccgcgacgccgaaaaaaccccgcgcaaccgaaacccgcctaccccataacgccctaaccccctaacgaatcgccgctactcccgttcgctcgctacactcgaccccgcgtccccaaaccccgctcgcgacgttcgaatacctacgacgacgcgaccgattatttttattttcacgaaaaccgaccgataacctaattctcccgaacgacaccaaataccgccgactaaaaaaaaaaaaataaccacccgaacgaaaaaaaaaaacgaaacgaaccgtaccaaatacaccctcgaaataaaaaatacgacccgacgaaaacgaacgaaaaaacgcgacgaacgcccacacgcgccgccactctaataatatacgccgtaccacacgaaaaacgtacgaaaaaaaaaacgaaaataaaacgaaaccccaattaacctaaaaaactaaataaaaaactttaaaaacaaccccaacgctcgaaaaacgcaacaactacgcgctccataaacaaaaaaacgaaaaccgaccctcaccactccgcccaaaaacgaaaaatcccaaccaataaacgcgaaaaataataaaaaaccaatccctaaccgaaacgtaaaccttcaaccaatccgaactaaaaaaccaaaccaacgaactcgctattaaaaaaaat

SEQ ID NO: 28049 - DNA, 984 bp, Artificial Sequence
  chemically treated genomic DNA (Homo sapiens) CpG-island No: 28049
ttttagacgtttgcgcggggtttgttttatcgcgtttattttaggagttacgtttggagagggatattttggagggacgtcgttcgacgttttgtttttttgcgtagtttttttgcgtttggcgaagaagtttgcgggcgataacgcgcgtcggttagggcggggtcggtttagagattcgcgaggagattcgcggagtgcgtacggcgcggggtcggggtgggggcgttattttcgttcgcgtcgaggttcgcggcgggttagttttgtttacgtcgtcgcgtaatgtgttgtgtaagtatttttttttgtttcgcggttaagtttttcggggttgtcgtcgtatttaattttttttatgtcgtatatacggcgtttttaaggggttttcgcggttcgagttaaagatcgcgattcgagtgggtcgcggttaggttcgtttttttattgtacgttcgggagttttagttgtatttttattagtaggaaaggggtgcgggcgtaatcgcgttttaagcgtcgcgggttttttaatgttacgggaggaggcggggatcgggcgaggttttcgagggcgagggagagttcggtcggtcggataaagcgaggtcgggtcggggcggggtcgtgcggggtttatcggagatgagaggtttcgatagttttttgatcgtatcgttcgtattggtcgtagtagtttcgggtgtaggacgttttggaattttcgagagaggttggttttttagtttttggtcgcgttgtttttgattttcgttttgtttttcgatcggttttttattttgtttttcgatcggtttcgtattttgtttttcgatcggtttcgcgttttgtttttttttcggtttttcgttttttttttcgatcggttttgcgttttgtttttcgttttgtttagagatcggtttagtttttagtttattattcggtttagtattcgatttttcgttttgtttagagatttgt

SEQ ID NO: 28050 - DNA, 984 bp, Artificial Sequence
  chemically treated genomic DNA (Homo sapiens) CpG-island No: 28050
acaaatctctaaacaaaacgaaaaatcgaatactaaaccgaataataaactaaaaactaaaccgatctctaaacaaaacgaaaaacaaaacgcaaaaccgatcgaaaaaaaaaacgaaaaaccgaaaaaaaaacaaaacgcgaaaccgatcgaaaaacaaaatacgaaaccgatcgaaaaacaaaataaaaaaccgatcgaaaaacaaaacgaaaatcaaaaacaacgcgaccaaaaactaaaaaaccaacctctctcgaaaattccaaaacgtcctacacccgaaactactacgaccaatacgaacgatacgatcaaaaaactatcgaaacctctcatctccgataaaccccgcacgaccccgccccgacccgacctcgctttatccgaccgaccgaactctccctcgccctcgaaaacctcgcccgatccccgcctcctcccgtaacattaaaaaacccgcgacgcttaaaacgcgattacgcccgcacccctttcctactaataaaaatacaactaaaactcccgaacgtacaataaaaaaacgaacctaaccgcgacccactcgaatcgcgatctttaactcgaaccgcgaaaaccccttaaaaacgccgtatatacgacataaaaaaaattaaatacgacgacaaccccgaaaaacttaaccgcgaaacaaaaaaaaatacttacacaacacattacgcgacgacgtaaacaaaactaacccgccgcgaacctcgacgcgaacgaaaataacgcccccaccccgaccccgcgccgtacgcactccgcgaatctcctcgcgaatctctaaaccgaccccgccctaaccgacgcgcgttatcgcccgcaaacttcttcgccaaacgcaaaaaaactacgcaaaaaaacaaaacgtcgaacgacgtccctccaaaatatccctctccaaacgtaactcctaaaataaacgcgataaaacaaaccccgcgcaaacgtctaaaa

SEQ ID NO: 28051 - DNA, 984 bp, Artificial Sequence
  chemically treated genomic DNA (Homo sapiens) CpG-island No: 28051
gtaggtttttgagtagggcgaggagtcgggtgttgagtcgggtgatgagttgggaattgagtcggtttttgagtagggcgaggagtagggcgtagagtcggtcgaggagaaggacgaggagtcggaggaggagtagggcgcggagtcggtcgaggagtagggtgcggagtcggtcgaggagtagaatggggagtcggtcgaggagtaggacgagaattaagagtagcgcggttaggagttgaaggattagtttttttcggggattttaggacgttttgtattcgggattgttgcggttaatgcgaacggtgcgattaagaagttgtcggggttttttattttcggtgagtttcgtacggtttcgtttcggttcggtttcgttttgttcggtcggtcgggttttttttcgttttcgggggtttcgttcggttttcgttttttttcgtggtattaaagggttcgcggcgtttagggcgcggttgcgttcgtattttttttttattggtaggggtgtagttaaggttttcgagcgtgtagtgggagggcgagtttggtcgcgatttattcggatcgcggtttttggttcgggtcgcgggagttttttagggacgtcgtgtgtgcggtatggagggggttaagtgcggcggtagtttcggggggtttggtcgcgggataaggggaaatgtttatatagtatattgcgcggcgacgtaaataaagttgattcgtcgcggatttcggcgcgggcggggatggcgtttttatttcggtttcgcgtcgtgcgtatttcgcgggttttttcgcgggtttttgggtcggtttcgttttgatcgacgcgcgttgtcgttcgtagattttttcgttaagcgtaagagaattgcgtaggagaataaggcgtcgaacgacgtttttttagggtgtttttttttaaacgtggtttttggggtgggcgcggtggagtagatttcgcgtaaacgtttgaga

SEQ ID NO: 28052 - DNA, 984 bp, Artificial Sequence
  chemically treated genomic DNA (Homo sapiens) CpG-island No: 28052
tctcaaacgtttacgcgaaatctactccaccgcgcccaccccaaaaaccacgtttaaaaaaaaacaccctaaaaaaacgtcgttcgacgccttattctcctacgcaattctcttacgcttaacgaaaaaatctacgaacgacaacgcgcgtcgatcaaaacgaaaccgacccaaaaacccgcgaaaaaacccgcgaaatacgcacgacgcgaaaccgaaataaaaacgccatccccgcccgcgccgaaatccgcgacgaatcaactttatttacgtcgccgcgcaatatactatataaacatttccccttatcccgcgaccaaaccccccgaaactaccgccgcacttaaccccctccataccgcacacacgacgtccctaaaaaactcccgcgacccgaaccaaaaaccgcgatccgaataaatcgcgaccaaactcgccctcccactacacgctcgaaaaccttaactacacccctaccaataaaaaaaaaatacgaacgcaaccgcgccctaaacgccgcgaaccctttaataccacgaaaaaaaacgaaaaccgaacgaaacccccgaaaacgaaaaaaaacccgaccgaccgaacaaaacgaaaccgaaccgaaacgaaaccgtacgaaactcaccgaaaataaaaaaccccgacaacttcttaatcgcaccgttcgcattaaccgcaacaatcccgaatacaaaacgtcctaaaatccccgaaaaaaactaatccttcaactcctaaccgcgctactcttaattctcgtcctactcctcgaccgactccccattctactcctcgaccgactccgcaccctactcctcgaccgactccgcgccctactcctcctccgactcctcgtccttctcctcgaccgactctacgccctactcctcgccctactcaaaaaccgactcaattcccaactcatcacccgactcaacacccgactcctcgccctactcaaaaacctac

SEQ ID NO: 28053 - DNA, 1002 bp, Artificial Sequence
  chemically treated genomic DNA (Homo sapiens) CpG-island No: 28053
cggcgtttagttcggttaggcgtattcgtagttcgcggtttagtttttcgtggtttataggttcgaagaggttgcggtaggcgttgttacgcgttattattgggaaggtatcgttggaggttaagcgttttatcgttgttttgttgcggaggtatacgtcggatatgtttatggtcgaaggttgtgtaaacgcgggtagcgagaaagaagggaacgggaggagaaggaagaggggagaggaggagggcggaggttgggcgtgggtgagattttttgtatagttcgcgttcgtttttgtttaaggacgtagcggttatttggttgattggtgatggacggtttttgcgtttggatcgtttgttttgtttagtttgggtcgcgttttttcggagtttgtttgtttgttcgtttgtttttagtcgggtatagtcggtatttttcgagtatagcgtattcggtttgtggaacgtttagttcgttgcgtttttttatacgcgttggttttattttcgcgcgcgcgggtttttttacgattagtataatgtagtatttttagttttaataatatcgcggcgattggagggtgtagttcgtttcgtttatagaggttttgttttcgcgttacgtttattggttgcgcgtatatattttcggggtcgggcggggcgggtgacgggcgggcgttgattggcggtcgtacggcgagcgggttgcgcgggataaggggcggggttcgagttaaagagttttgcgggcggtaacgtgatatcgcgacgtttttttttttcgttttattttttttttcgtttttcgcgggtttttttgtttgtaggcgggggttcgcgtagtcgcgacgcgcgcgttttttttgattatggagttgggtatagtttttttgcgatgtcgacgtcggtgaaagtgtttttgttttcgtagttcgcgttatttttatgattgtattaattgattagggttttaatttattattattagttgggtttt

SEQ ID NO: 28054 - DNA, 1002 bp, Artificial Sequence
  chemically treated genomic DNA (Homo sapiens) CpG-island No: 28054
aaaacccaactaataataataaattaaaaccctaatcaattaatacaatcataaaaataacgcgaactacgaaaacaaaaacactttcaccgacgtcgacatcgcaaaaaaactatacccaactccataatcaaaaaaaacgcgcgcgtcgcgactacgcgaacccccgcctacaaacaaaaaaacccgcgaaaaacgaaaaaaaaaataaaacgaaaaaaaaaaacgtcgcgatatcacgttaccgcccgcaaaactctttaactcgaaccccgccccttatcccgcgcaacccgctcgccgtacgaccgccaatcaacgcccgcccgtcacccgccccgcccgaccccgaaaatatatacgcgcaaccaataaacgtaacgcgaaaacaaaacctctataaacgaaacgaactacaccctccaatcgccgcgatattattaaaactaaaaatactacattatactaatcgtaaaaaaacccgcgcgcgcgaaaataaaaccaacgcgtataaaaaaacgcaacgaactaaacgttccacaaaccgaatacgctatactcgaaaaataccgactatacccgactaaaaacaaacgaacaaacaaacaaactccgaaaaaacgcgacccaaactaaacaaaacaaacgatccaaacgcaaaaaccgtccatcaccaatcaaccaaataaccgctacgtccttaaacaaaaacgaacgcgaactatacaaaaaatctcacccacgcccaacctccgccctcctcctctcccctcttccttctcctcccgttcccttctttctcgctacccgcgtttacacaaccttcgaccataaacatatccgacgtatacctccgcaacaaaacaacgataaaacgcttaacctccaacgataccttcccaataataacgcgtaacaacgcctaccgcaacctcttcgaacctataaaccacgaaaaactaaaccgcgaactacgaatacgcctaaccgaactaaacgccg

SEQ ID NO: 28055 - DNA, 1002 bp, Artificial Sequence
  chemically treated genomic DNA (Homo sapiens) CpG-island No: 28055
aggatttagttggtagtagtaggttaaagttttaattagttggtgtagttatagggatagcgcgggttgcggggatagaggtatttttatcgacgtcggtatcgtagaggggttgtgtttagttttatggttagagggggcgcgcgcgtcgcggttgcgcgagttttcgtttgtagataaaggagttcgcggggggcggggggggggatggggcgagggggaggggcgtcgcggtgttacgttatcgttcgtagagttttttaattcgagtttcgttttttgtttcgcgtagttcgttcgtcgtgcggtcgttaattagcgttcgttcgttattcgtttcgttcggtttcgggggtgtgtgcgcgtagttaatgagcgtggcgcgggggtagggtttttgtgggcggggcgggttgtattttttaatcgtcgcggtgttgttgaaattgaaaatattatattatgttaatcgtgaggaggttcgcgcgcgcgggggtggggttagcgcgtataaaggggcgtagcgggttgggcgttttataggtcgagtgcgttgtgttcgaggggtgtcggttatgttcgattgagagtaagcgaataggtaggtaagtttcgagggggcgcggtttaagttggataggataagcgatttagacgtaggagtcgtttattattaattagttaggtagtcgttgcgtttttaggtagaggcggacgcgggttgtgtaaggggttttatttacgtttagttttcgtttttttttttttttttttttttttttttttcgtttttttttttttcgttgttcgcgtttgtatagttttcgattatgggtatgttcgacgtgtattttcgtagtagaatagcgatggaacgtttggtttttagcgatatttttttagtgatagcgcgtagtagcgtttgtcgtagttttttcgggtttgtagattacgaggagttgggtcgcgagttgcggatgcgtttggtcgagttgaacgtcg

SEQ ID NO: 28056 - DNA, 1002 bp, Artificial Sequence
  chemically treated genomic DNA (Homo sapiens) CpG-island No: 28056
cgacgttcaactcgaccaaacgcatccgcaactcgcgacccaactcctcgtaatctacaaacccgaaaaaactacgacaaacgctactacgcgctatcactaaaaaaatatcgctaaaaaccaaacgttccatcgctattctactacgaaaatacacgtcgaacatacccataatcgaaaactatacaaacgcgaacaacgaaaaaaaaaaaaacgaaaaaaaaaaaaaaaaaaaaaaaaaaaaaaacgaaaactaaacgtaaataaaaccccttacacaacccgcgtccgcctctacctaaaaacgcaacgactacctaactaattaataataaacgactcctacgtctaaatcgcttatcctatccaacttaaaccgcgccccctcgaaacttacctacctattcgcttactctcaatcgaacataaccgacacccctcgaacacaacgcactcgacctataaaacgcccaacccgctacgcccctttatacgcgctaaccccacccccgcgcgcgcgaacctcctcacgattaacataatataatattttcaatttcaacaacaccgcgacgattaaaaaatacaacccgccccgcccacaaaaaccctacccccgcgccacgctcattaactacgcgcacacacccccgaaaccgaacgaaacgaataacgaacgaacgctaattaacgaccgcacgacgaacgaactacgcgaaacaaaaaacgaaactcgaattaaaaaactctacgaacgataacgtaacaccgcgacgcccctccccctcgccccatccccccccccgccccccgcgaactcctttatctacaaacgaaaactcgcgcaaccgcgacgcgcgcgccccctctaaccataaaactaaacacaacccctctacgataccgacgtcgataaaaatacctctatccccgcaacccgcgctatccctataactacaccaactaattaaaactttaacctactactaccaactaaatcct

SEQ ID NO: 28057 - DNA, 528 bp, Artificial Sequence
  chemically treated genomic DNA (Homo sapiens) CpG-island No: 28057
gtggagttcggcgatacggttaatggtaggtggttttgttggcgattacggcggtgtagtttcggagcgagtttaggataggcgttattgtcgtaggaggcgcgaggtgcggtgttggcgggtaacggcgcggcgggcggttggcgagggattggggcggaggaggcggagacggggaggagtgggcggcgcgggtaggtcgacgcgttatggcggcgagtagaggcgggcggcgatcgggttagaggttcgggtggcgggtggcggcggatggcgggtcggtttttttttcgtgtagtttcgttttcggttgaaggttagcgcgttttgttttcgtcgttcgagaatttacgcgaagcggcgtaggcggttttttgagaggataaggtttttttagcgaggtgggtttgggtacgtttcgttttagatcgcgtttgggaaggaaggggtttattgggtcgtcgtttcgttttttcgggttttgtatgtttttcgtatagtgtttcggtttttgagttagattttatt

SEQ ID NO: 28058 - DNA, 528 bp, Artificial Sequence
  chemically treated genomic DNA (Homo sapiens) CpG-island No: 28058
aataaaatctaactcaaaaaccgaaacactatacgaaaaacatacaaaacccgaaaaaacgaaacgacgacccaataaaccccttccttcccaaacgcgatctaaaacgaaacgtacccaaacccacctcgctaaaaaaaccttatcctctcaaaaaaccgcctacgccgcttcgcgtaaattctcgaacgacgaaaacaaaacgcgctaaccttcaaccgaaaacgaaactacacgaaaaaaaaaccgacccgccatccgccgccacccgccacccgaacctctaacccgatcgccgcccgcctctactcgccgccataacgcgtcgacctacccgcgccgcccactcctccccgtctccgcctcctccgccccaatccctcgccaaccgcccgccgcgccgttacccgccaacaccgcacctcgcgcctcctacgacaataacgcctatcctaaactcgctccgaaactacaccgccgtaatcgccaacaaaaccacctaccattaaccgtatcgccgaactccac

SEQ ID NO: 28059 - DNA, 528 bp, Artificial Sequence
  chemically treated genomic DNA (Homo sapiens) CpG-island No: 28059
agtgaggtttggtttagagatcggggtattgtgcggagagtatgtaaagttcggaagggcgaggcggcggtttagtagatttttttttttttaggcgcggtttgagacgaggcgtatttaggtttatttcgttggggaggttttgtttttttaaggaatcgtttgcgtcgtttcgcgtgggttttcgggcggcgggaataaagcgcgttgatttttagtcgggggcggggttgtacggaggagggatcggttcgttattcgtcgttattcgttattcggatttttgattcggtcgtcgttcgtttttgttcgtcgttatggcgcgtcggtttgttcgcgtcgtttattttttttcgttttcgtttttttcgttttagtttttcgttagtcgttcgtcgcgtcgttattcgttagtatcgtatttcgcgttttttgcggtagtggcgtttgttttaagttcgtttcggggttgtatcgtcgtggtcgttaataaaattatttgttattggtcgtatcgtcgggttttat

SEQ ID NO: 28060 - DNA, 528 bp, Artificial Sequence
  chemically treated genomic DNA (Homo sapiens) CpG-island No: 28060
ataaaacccgacgatacgaccaataacaaataattttattaacgaccacgacgatacaaccccgaaacgaacttaaaacaaacgccactaccgcaaaaaacgcgaaatacgatactaacgaataacgacgcgacgaacgactaacgaaaaactaaaacgaaaaaaacgaaaacgaaaaaaaataaacgacgcgaacaaaccgacgcgccataacgacgaacaaaaacgaacgacgaccgaatcaaaaatccgaataacgaataacgacgaataacgaaccgatccctcctccgtacaaccccgcccccgactaaaaatcaacgcgctttattcccgccgcccgaaaacccacgcgaaacgacgcaaacgattccttaaaaaaacaaaacctccccaacgaaataaacctaaatacgcctcgtctcaaaccgcgcctaaaaaaaaaaaaatctactaaaccgccgcctcgcccttccgaactttacatactctccgcacaataccccgatctctaaaccaaacctcact

SEQ ID NO: 28061 - DNA, 640 bp, Artificial Sequence
  chemically treated genomic DNA (Homo sapiens) CpG-island No: 28061
aagaggatttttcgaagttttaggtcggatttcgtcgtagtttgttcggttttttttttttttcgggtagtaggaaggagcgtcgggtaggtaacgcgtataagggcggcgggtaagtttggtcgcgaggtttagatttcgtttatcgacgtttttttcggcggtggtttttttgtttcgtttgcggtatttattaggagaagtagtagggcgtacgcgcgtttcgggtttcgcgttatcgtattttcgttttcgtttttcgtcgtcgtatcgtttcgcgtcgtcgtttgtttcgagcgcgtattcggtttttttttggtttcggttttttttcggttcggttatttttttttttttcgtttcgagggttgttttttcgtggcggttggcgcggtttagtttagtttaatttaaaggcgcggttttaggtgtggtcgtcgcgagaaaatggagtcgggggtcggttcgggtcgtttttatagaggtggggagtttagtagaggagggaggcgcggggtggattttcgttcgttcgtattcgtatttgggatcgtgacgtttttgggttggggattgtgggtggtaggtttcgtttcgtcgttttttttttttcgattttttattttttggagaatggcgg

SEQ ID NO: 28062 - DNA, 640 bp, Artificial Sequence
  chemically treated genomic DNA (Homo sapiens) CpG-island No: 28062
ccgccattctccaaaaaataaaaaatcgaaaaaaaaaaaacgacgaaacgaaacctaccacccacaatccccaacccaaaaacgtcacgatcccaaatacgaatacgaacgaacgaaaatccaccccgcgcctccctcctctactaaactccccacctctataaaaacgacccgaaccgacccccgactccattttctcgcgacgaccacacctaaaaccgcgcctttaaattaaactaaactaaaccgcgccaaccgccacgaaaaaacaaccctcgaaacgaaaaaaaaaaaaataaccgaaccgaaaaaaaaccgaaaccaaaaaaaaaccgaatacgcgctcgaaacaaacgacgacgcgaaacgatacgacgacgaaaaacgaaaacgaaaatacgataacgcgaaacccgaaacgcgcgtacgccctactacttctcctaataaataccgcaaacgaaacaaaaaaaccaccgccgaaaaaaacgtcgataaacgaaatctaaacctcgcgaccaaacttacccgccgcccttatacgcgttacctacccgacgctccttcctactacccgaaaaaaaaaaaaaaccgaacaaactacgacgaaatccgacctaaaacttcgaaaaatcctctt

SEQ ID NO: 28063 - DNA, 640 bp, Artificial Sequence
  chemically treated genomic DNA (Homo sapiens) CpG-island No: 28063
tcgttattttttagagagtagggggtcgggaaggagagaacggcggggcggggtttgttatttatagtttttaatttaaggacgttacggttttaggtgcgagtgcgagcgggcgggagtttatttcgcgttttttttttttgttgaattttttatttttgtaaaagcggttcgggtcggttttcggttttattttttcgcggcggttatatttggagtcgcgtttttgggttgggttgggttgggtcgcgttaatcgttacgggaagatagttttcggggcggggagggagagggtggtcgggtcggggggaggtcggggttagggaggagtcgagtgcgcgttcggggtaggcggcggcgcggagcggtgcggcggcgggaggcggaggcgagggtgcgatggcgcggagttcgggacgcgcgtacgttttgttgttttttttggtaagtgtcgtaagcgggataggggagttatcgtcggggagggcgtcggtaggcgaggtttagatttcgcgattagatttgttcgtcgtttttgtgcgcgttatttgttcggcgtttttttttgttgttcgaggggggaaaagggtcgggtaggttgcggcgagattcgatttggggtttcggaaaattttttt

SEQ ID NO: 28064 - DNA, 640 bp, Artificial Sequence
  chemically treated genomic DNA (Homo sapiens) CpG-island No: 28064
aaaaaaattttccgaaaccccaaatcgaatctcgccgcaacctacccgacccttttcccccctcgaacaacaaaaaaaaacgccgaacaaataacgcgcacaaaaacgacgaacaaatctaatcgcgaaatctaaacctcgcctaccgacgccctccccgacgataactcccctatcccgcttacgacacttaccaaaaaaaacaacaaaacgtacgcgcgtcccgaactccgcgccatcgcaccctcgcctccgcctcccgccgccgcaccgctccgcgccgccgcctaccccgaacgcgcactcgactcctccctaaccccgacctccccccgacccgaccaccctctccctccccgccccgaaaactatcttcccgtaacgattaacgcgacccaacccaacccaacccaaaaacgcgactccaaatataaccgccgcgaaaaaataaaaccgaaaaccgacccgaaccgcttttacaaaaataaaaaattcaacaaaaaaaaaaaacgcgaaataaactcccgcccgctcgcactcgcacctaaaaccgtaacgtccttaaattaaaaactataaataacaaaccccgccccgccgttctctccttcccgaccccctactctctaaaaaataacga

SEQ ID NO: 28065 - DNA, 804 bp, Artificial Sequence
  chemically treated genomic DNA (Homo sapiens) CpG-island No: 28065
gcgtgtgttcgtcggtcggtttaggcggagatattttatttagcgtttttttcgttttcgtttttttttttcggttttgtttgcgaaagttcgttttttttttcgtttaagtttcggcgtcgtttttgcgggagcgtttcgtatcgtttcgggggtttttacgcgaggattttcggggtcgttggtagcgtttggtatttttgagttcggcggacgagagtttgtaggttttttttagttagggacggcgaagggcggaaagcgtaggaggaggtagtgttaggttttaggtcgggtgggtcgggttaggagagacgcgtttatttttcgttattcggggtgcgcgaggttttttcgggattcggtcggcgattcgtagttcgggtacgcgtttgtcgtatttcgtaggaaggaggggttcggtttgaggttcggggcggcgttcgttatggagattttttcggtttagggtcggcgtttgggatttggcgggcggttttgatcgtttttttttttgcgcgggttgggtcgcggacgtgtttttcgcggtattcggttttttttgcgttttcgttttttttgggtcgtattgttgtttgggcgcggcggcggcgacggcgttttgttgaatgggttgtgagggtttaggtttaaagcgttggcgaacgcggttttcgggggcgtacggtagttgtagcggtggcgattaaacgggtgttggagttggcggcggttatggagggtttggttggttatgtatataaggcggttagcgagggtaaggtgttgattttggtcgttttg

SEQ ID NO: 28066 - DNA, 804 bp, Artificial Sequence
  chemically treated genomic DNA (Homo sapiens) CpG-island No: 28066
caaaacgaccaaaatcaacaccttaccctcgctaaccgccttatatacataaccaaccaaaccctccataaccgccgccaactccaacacccgtttaatcgccaccgctacaactaccgtacgcccccgaaaaccgcgttcgccaacgctttaaacctaaaccctcacaacccattcaacaaaacgccgtcgccgccgccgcgcccaaacaacaatacgacccaaaaaaaacgaaaacgcaaaaaaaaccgaataccgcgaaaaacacgtccgcgacccaacccgcgcaaaaaaaaaaacgatcaaaaccgcccgccaaatcccaaacgccgaccctaaaccgaaaaaatctccataacgaacgccgccccgaacctcaaaccgaacccctccttcctacgaaatacgacaaacgcgtacccgaactacgaatcgccgaccgaatcccgaaaaaacctcgcgcaccccgaataacgaaaaataaacgcgtctctcctaacccgacccacccgacctaaaacctaacactacctcctcctacgctttccgcccttcgccgtccctaactaaaaaaaacctacaaactctcgtccgccgaactcaaaaataccaaacgctaccaacgaccccgaaaatcctcgcgtaaaaacccccgaaacgatacgaaacgctcccgcaaaaacgacgccgaaacttaaacgaaaaaaaaaacgaactttcgcaaacaaaaccgaaaaaaaaaaacgaaaacgaaaaaaacgctaaataaaatatctccgcctaaaccgaccgacgaacacacgc

SEQ ID NO: 28067 - DNA, 804 bp, Artificial Sequence
  chemically treated genomic DNA (Homo sapiens) CpG-island No: 28067
taaggcggttagagttagtattttgttttcgttggtcgttttgtatatatagttagttaggttttttatggtcgtcgttaattttaatattcgtttggtcgttatcgttgtagttgtcgtgcgttttcggaggtcgcgttcgttagcgttttaaatttgggtttttatagtttatttaatagggcgtcgtcgtcgtcgtcgcgtttaggtagtagtgcggtttagggaaggcggagacgtagaggaggtcgagtgtcgcgaagggtacgttcgcgatttagttcgcgtagggaggaaggcggttagggtcgttcgttaggttttaggcgtcggttttggatcgaggggatttttatggcggacgtcgtttcgggttttaggtcggattttttttttttgcgggatgcgataggcgcgtgttcgagttacgggtcgtcggtcgggtttcgagaggatttcgcgtatttcggatggcgaaagatgggcgcgttttttttgattcggtttattcggtttaaggtttaatattgtttttttttgcgtttttcgtttttcgtcgtttttgattggaggaaatttgtaggttttcgttcgtcgagtttagaagtgttaggcgttgttaacggtttcggagattttcgcgtaggggttttcggggcgatgcggaacgttttcgtaagagcggcgtcggaatttgggcggggaggaagacgagttttcgtagatagggtcgggaggagagggcgggagcgggagggacgttaagtggggtgttttcgtttaagtcgatcggcgggtatacgt

SEQ ID NO: 28068 - DNA, 804 bp, Artificial Sequence
  chemically treated genomic DNA (Homo sapiens) CpG-island No: 28068
acgtatacccgccgatcgacttaaacgaaaacaccccacttaacgtccctcccgctcccgccctctcctcccgaccctatctacgaaaactcgtcttcctccccgcccaaattccgacgccgctcttacgaaaacgttccgcatcgccccgaaaacccctacgcgaaaatctccgaaaccgttaacaacgcctaacacttctaaactcgacgaacgaaaacctacaaatttcctccaatcaaaaacgacgaaaaacgaaaaacgcaaaaaaaaacaatattaaaccttaaaccgaataaaccgaatcaaaaaaaacgcgcccatctttcgccatccgaaatacgcgaaatcctctcgaaacccgaccgacgacccgtaactcgaacacgcgcctatcgcatcccgcaaaaaaaaaaaatccgacctaaaacccgaaacgacgtccgccataaaaatcccctcgatccaaaaccgacgcctaaaacctaacgaacgaccctaaccgccttcctccctacgcgaactaaatcgcgaacgtacccttcgcgacactcgacctcctctacgtctccgccttccctaaaccgcactactacctaaacgcgacgacgacgacgacgccctattaaataaactataaaaacccaaatttaaaacgctaacgaacgcgacctccgaaaacgcacgacaactacaacgataacgaccaaacgaatattaaaattaacgacgaccataaaaaacctaactaactatatatacaaaacgaccaacgaaaacaaaatactaactctaaccgcctta

SEQ ID NO: 28069 - DNA, 815 bp, Artificial Sequence
  chemically treated genomic DNA (Homo sapiens) CpG-island No: 28069
aaagaacgaacgcgtgagttgaaagaacgaacgcgtgaatgaatgaatgggatacgtcgtaggttaggtttttgttacgtcgtttatcggcgcgggcgtggttacggttaagagagacgcgcgcgtagtcgcgcgcgggtcgtgtcgtattatcgtcgcgggtaggttcggttacgagcgttagagtttcgcgttttttttcgcggtttgttttaagtttttgtttcgtaatagagcgttattttcgttattttcggtagcggttggggcggggcgtacgggggagggggttaggtcggagggaagttcgttcgtgttcgagttcgcgttcgagtagggattatatttttcgaggggtttcggcggcggttgcggcgacgggcgcggtaacgtttttcggaagtggagttcgggatttttattcgtgcgtgaggcgagaggagtcggagacgagattagaggtcgaattcgggttttgataagatggtcgggttgtttcgtaggattattaaggtaatcgtttaggtcggtttttagtttttcgttttgttttcgtcggtttagttgggtaggtagcgcggtttttcgtttttttcggttcgcggttcgttttgggaggttcgaggcggcgcggagaggggttggtcgcggcggcgagggaagtcgggtgttgaggagggggcgtcggggagattttcggtcgcggcggggtagtcggatagcggggattcggggtttttaggcggttgttcggcgggttagggagtgttgttttacgtttcggcggagggtggggcggtaaggttgggggtttt

SEQ ID NO: 28070 - DNA, 815 bp, Artificial Sequence
  chemically treated genomic DNA (Homo sapiens) CpG-island No: 28070
aaaacccccaaccttaccgccccaccctccgccgaaacgtaaaacaacactccctaacccgccgaacaaccgcctaaaaaccccgaatccccgctatccgactaccccgccgcgaccgaaaatctccccgacgccccctcctcaacacccgacttccctcgccgccgcgaccaacccctctccgcgccgcctcgaacctcccaaaacgaaccgcgaaccgaaaaaaacgaaaaaccgcgctacctacccaactaaaccgacgaaaacaaaacgaaaaactaaaaaccgacctaaacgattaccttaataatcctacgaaacaacccgaccatcttatcaaaacccgaattcgacctctaatctcgtctccgactcctctcgcctcacgcacgaataaaaatcccgaactccacttccgaaaaacgttaccgcgcccgtcgccgcaaccgccgccgaaacccctcgaaaaatataatccctactcgaacgcgaactcgaacacgaacgaacttccctccgacctaaccccctcccccgtacgccccgccccaaccgctaccgaaaataacgaaaataacgctctattacgaaacaaaaacttaaaacaaaccgcgaaaaaaaacgcgaaactctaacgctcgtaaccgaacctacccgcgacgataatacgacacgacccgcgcgcgactacgcgcgcgtctctcttaaccgtaaccacgcccgcgccgataaacgacgtaacaaaaacctaacctacgacgtatcccattcattcattcacgcgttcgttctttcaactcacgcgttcgttcttt

SEQ ID NO: 28071 - DNA, 815 bp, Artificial Sequence
  chemically treated genomic DNA (Homo sapiens) CpG-island No: 28071
gagatttttagttttgtcgttttatttttcgtcggggcgtgggatagtattttttggttcgtcgggtagtcgtttggaagtttcgggttttcgttgttcggttgtttcgtcgcggtcggaagttttttcggcgttttttttttagtattcgatttttttcgtcgtcgcggttaattttttttcgcgtcgtttcgggttttttagagcgggtcgcgggtcgaaggaggcgagaggtcgcgttgtttgtttagttgagtcgacgagagtagagcgaagagttggaggtcggtttgggcggttattttgatgattttgcggggtagttcggttattttgttagaattcgagttcggtttttggtttcgttttcggtttttttcgttttacgtacgagtggaagtttcgggttttattttcgggggacgttgtcgcgttcgtcgtcgtagtcgtcgtcgaggtttttcgggaaatgtagtttttgttcgggcgcgggttcgggtacgggcgggttttttttcgatttggttttttttttcgtgcgtttcgttttaatcgttgtcggggatggcggaagtgacgttttgttgcggggtagggatttgggataggtcgcgaggggaggcgcggggttttggcgttcgtggtcgagtttgttcgcgacggtggtacggtacgattcgcgcgcgattgcgcgcgcgttttttttaatcgtggttacgttcgcgtcggtggacgacgtaatagaggtttggtttacgacgtattttatttatttatttacgcgttcgtttttttagtttacgcgttcgtttttt

SEQ ID NO: 28072 - DNA, 815 bp, Artificial Sequence
  chemically treated genomic DNA (Homo sapiens) CpG-island No: 28072
aaaaaacgaacgcgtaaactaaaaaaacgaacgcgtaaataaataaataaaatacgtcgtaaaccaaacctctattacgtcgtccaccgacgcgaacgtaaccacgattaaaaaaaacgcgcgcgcaatcgcgcgcgaatcgtaccgtaccaccgtcgcgaacaaactcgaccacgaacgccaaaaccccgcgcctcccctcgcgacctatcccaaatccctaccccgcaacaaaacgtcacttccgccatccccgacaacgattaaaacgaaacgcacgaaaaaaaaaaccaaatcgaaaaaaaacccgcccgtacccgaacccgcgcccgaacaaaaactacatttcccgaaaaacctcgacgacgactacgacgacgaacgcgacaacgtcccccgaaaataaaacccgaaacttccactcgtacgtaaaacgaaaaaaaccgaaaacgaaaccaaaaaccgaactcgaattctaacaaaataaccgaactaccccgcaaaatcatcaaaataaccgcccaaaccgacctccaactcttcgctctactctcgtcgactcaactaaacaaacaacgcgacctctcgcctccttcgacccgcgacccgctctaaaaaacccgaaacgacgcgaaaaaaaattaaccgcgacgacgaaaaaaatcgaatactaaaaaaaaaacgccgaaaaaacttccgaccgcgacgaaacaaccgaacaacgaaaacccgaaacttccaaacgactacccgacgaaccaaaaaatactatcccacgccccgacgaaaaataaaacgacaaaactaaaaatctc

SEQ ID NO: 28073 - DNA, 533 bp, Artificial Sequence
  chemically treated genomic DNA (Homo sapiens) CpG-island No: 28073
tagtgttcgaacgcgtgggtagatcgtaaattgttgcgtttttcgtagttttcgcgcgtattaagtgggaattataattttcggcggtttcggcggattgcgggtcgtcgggttagatagtcgatttcggttataagcgtttgcgtagtcgcggggtcgtcggtcgtgttgttttcgttaatttttgtggtaatttttatcgtggcgagtttcgcgtttaatggagacgtttgattttatcgagttgttcgagttgtttaaattttattatcggaggttttttttttatttttagtattatcgttggtttaattacggtggaggtgatggaggcgaggaatgggttcgggagcggagtgtgaggaggttggaggcggggtgtttttagaatgataatatgaagcgttttttgtgtattaggttttgtgtcgcgcgtttttatttgttttttcgagttcgttttattattttataggtgtaaatgggtcgagagaggatataataagttagtttgcggttacgttgtaaaaaaa

SEQ ID NO: 28074 - DNA, 533 bp, Artificial Sequence
  chemically treated genomic DNA (Homo sapiens) CpG-island No: 28074
tttttttacaacgtaaccgcaaactaacttattatatcctctctcgacccatttacacctataaaataataaaacgaactcgaaaaaacaaataaaaacgcgcgacacaaaacctaatacacaaaaaacgcttcatattatcattctaaaaacaccccgcctccaacctcctcacactccgctcccgaacccattcctcgcctccatcacctccaccgtaattaaaccaacgataatactaaaaataaaaaaaaaacctccgataataaaatttaaacaactcgaacaactcgataaaatcaaacgtctccattaaacgcgaaactcgccacgataaaaattaccacaaaaattaacgaaaacaacacgaccgacgaccccgcgactacgcaaacgcttataaccgaaatcgactatctaacccgacgacccgcaatccgccgaaaccgccgaaaattataattcccacttaatacgcgcgaaaactacgaaaaacgcaacaatttacgatctacccacgcgttcgaacacta

SEQ ID NO: 28075 - DNA, 533 bp, Artificial Sequence
  chemically treated genomic DNA (Homo sapiens) CpG-island No: 28075
tttttttatagcgtggtcgtaggttggtttattatattttttttcggtttatttatatttatgaagtggtggggcgggttcgagagagtaaatgaaggcgcgcggtataaagtttggtgtatagaaggcgttttatattgttattttaaggatatttcgtttttaatttttttatatttcgttttcgaatttatttttcgtttttattatttttatcgtagttgagttagcgatagtattgagagtagggaaagagttttcggtaataaagtttaagtagttcgggtagttcggtggggttaaacgtttttattgagcgcggaattcgttacggtaaggattattataggaattggcgggaatagtacggtcggcggtttcgcgattgcgtaggcgtttatggtcgaggtcggttgtttgattcggcggttcgtagttcgtcggggtcgtcgggaattgtagtttttatttggtgcgcgcgggggttgcgggagacgtagtagtttgcgatttgtttacgcgttcgggtatta

SEQ ID NO: 28076 - DNA, 533 bp, Artificial Sequence
  chemically treated genomic DNA (Homo sapiens) CpG-island No: 28076
taatacccgaacgcgtaaacaaatcgcaaactactacgtctcccgcaacccccgcgcgcaccaaataaaaactacaattcccgacgaccccgacgaactacgaaccgccgaatcaaacaaccgacctcgaccataaacgcctacgcaatcgcgaaaccgccgaccgtactattcccgccaattcctataataatccttaccgtaacgaattccgcgctcaataaaaacgtttaaccccaccgaactacccgaactacttaaactttattaccgaaaactctttccctactctcaatactatcgctaactcaactacgataaaaataataaaaacgaaaaataaattcgaaaacgaaatataaaaaaattaaaaacgaaatatccttaaaataacaatataaaacgccttctatacaccaaactttataccgcgcgccttcatttactctctcgaacccgccccaccacttcataaatataaataaaccgaaaaaaaatataataaaccaacctacgaccacgctataaaaaaa

SEQ ID NO: 28077 - DNA, 819 bp, Artificial Sequence
  chemically treated genomic DNA (Homo sapiens) CpG-island No: 28077
ttatcgatgcgagaaaggttagggggtcgtttttagggagtttttaacgcggtttcggttttattcggcgattttttttcggcggggtgtcgtatttatattgtgaacggggtagggggacgggcgaattggtgggcgggtttttttggcggcggttgttgttagggagtcgattttttttcggtggcgatttcgtttttttttttcggtcgcggttttttttcgttttttttaggcgacggcggtagcggcgggttcgatttcgggttttagaatgtatcgcgcggaaagagcggttttttcggtcggggagaagaggaaagtgtaggaaaaggggcgcgaggacggagaatgaacgtgcgtgcgtgtaaacgaggggtggtgaggtcgggcggcggttggtgacgtagtaaaatgttcgggttttgtcgtcgcgcgtgcgtagtttttgtttttgggtttcggcgcggttttttagagatatttacggaaagggcggggttttttagttttttcgcgattttttttggcgtcggtttcgtttttcgttcgttattttatttttatttcgttttttgttagtttttacgcgttttcgttttttttttcgttttgttttttcgcgttagaaaatcgttagtggtttaattgttttgttatgcgttttcggcgatttttttgagaaacggttgcgttgatagtgggaggtaaggttgaggcggagggatacggagtcgggattttggagaattgaaatggcgcgttggttatttttgagggagtaaattagtttattgagttattattttattataaaaa

SEQ ID NO: 28078 - DNA, 819 bp, Artificial Sequence
  chemically treated genomic DNA (Homo sapiens) CpG-island No: 28078
tttttataataaaataataactcaataaactaatttactccctcaaaaataaccaacgcgccatttcaattctccaaaatcccgactccgtatccctccgcctcaaccttacctcccactatcaacgcaaccgtttctcaaaaaaatcgccgaaaacgcataacaaaacaattaaaccactaacgattttctaacgcgaaaaaacaaaacgaaaaaaaaaacgaaaacgcgtaaaaactaacaaaaaacgaaataaaaataaaataacgaacgaaaaacgaaaccgacgccaaaaaaaatcgcgaaaaaactaaaaaaccccgccctttccgtaaatatctctaaaaaaccgcgccgaaacccaaaaacaaaaactacgcacgcgcgacgacaaaacccgaacattttactacgtcaccaaccgccgcccgacctcaccacccctcgtttacacgcacgcacgttcattctccgtcctcgcgccccttttcctacactttcctcttctccccgaccgaaaaaaccgctctttccgcgcgatacattctaaaacccgaaatcgaacccgccgctaccgccgtcgcctaaaaaaaacgaaaaaaaaccgcgaccgaaaaaaaaaaacgaaatcgccaccgaaaaaaaatcgactccctaacaacaaccgccgccaaaaaaacccgcccaccaattcgcccgtccccctaccccgttcacaatataaatacgacaccccgccgaaaaaaaatcgccgaataaaaccgaaaccgcgttaaaaactccctaaaaacgaccccctaacctttctcgcatcgataa

SEQ ID NO: 28079 - DNA, 819 bp, Artificial Sequence
  chemically treated genomic DNA (Homo sapiens) CpG-island No: 28079
tttttgtggtggaatgatgatttagtgagttgatttatttttttaagagtaattaacgcgttattttagttttttaggatttcgatttcgtgttttttcgttttagttttgttttttattgttaacgtaatcgttttttagagaaatcgtcgaaggcgtatggtagggtagttgggttattaacggttttttaacgcgagaagatagagcgggaggagaggcgggaacgcgtagggattagtagggggcggagtgggggtggggtggcggacgaagggcggggtcggcgttaggaaggatcgcgaaggagttgggaggtttcgtttttttcgtagatatttttagaaagtcgcgtcggagtttaaaaataaggattgcgtacgcgcggcggtaaggttcgggtattttgttgcgttattagtcgtcgttcggttttattatttttcgtttgtacgtacgtacgtttatttttcgttttcgcgtttttttttttatatttttttttttttttcgatcggaggagtcgtttttttcgcgcggtgtattttggggttcgaggtcgagttcgtcgttgtcgtcgtcgtttgagggaagcgagaagaggtcgcgatcggagagaaaaagcggagtcgttatcggagagaagtcgattttttagtagtagtcgtcgttagagaggttcgtttattagttcgttcgtttttttgtttcgtttataatgtgagtgcgatatttcgtcgagggaaggtcgtcgagtgaggtcgaggtcgcgttgggggttttttggaagcggttttttagtttttttcgtatcggtgg

SEQ ID NO: 28080 - DNA, 819 bp, Artificial Sequence
  chemically treated genomic DNA (Homo sapiens) CpG-island No: 28080
ccaccgatacgaaaaaaactaaaaaaccgcttccaaaaaacccccaacgcgacctcgacctcactcgacgaccttccctcgacgaaatatcgcactcacattataaacgaaacaaaaaaacgaacgaactaataaacgaacctctctaacgacgactactactaaaaaatcgacttctctccgataacgactccgctttttctctccgatcgcgacctcttctcgcttccctcaaacgacgacgacaacgacgaactcgacctcgaaccccaaaatacaccgcgcgaaaaaaacgactcctccgatcgaaaaaaaaaaaaaaatataaaaaaaaaaacgcgaaaacgaaaaataaacgtacgtacgtacaaacgaaaaataataaaaccgaacgacgactaataacgcaacaaaatacccgaaccttaccgccgcgcgtacgcaatccttatttttaaactccgacgcgactttctaaaaatatctacgaaaaaaacgaaacctcccaactccttcgcgatccttcctaacgccgaccccgcccttcgtccgccaccccacccccactccgccccctactaatccctacgcgttcccgcctctcctcccgctctatcttctcgcgttaaaaaaccgttaataacccaactaccctaccatacgccttcgacgatttctctaaaaaacgattacgttaacaataaaaaacaaaactaaaacgaaaaaacacgaaatcgaaatcctaaaaaactaaaataacgcgttaattactcttaaaaaaataaatcaactcactaaatcatcattccaccacaaaaa

SEQ ID NO: 28081 - DNA, 522 bp, Artificial Sequence
  chemically treated genomic DNA (Homo sapiens) CpG-island No: 28081
cgcgttaacgcgttcggtatacgggtagttatatatcgggttttagtcgagtgttcggtgtttttagggaaggtatcgggcgtgtagagtcgtttttgggtaaatttttaagattgttttttacgtagggagcgcgcggaggttcgtagggtgttcgtttggtcgtagaggtcgcgacgtttttttcgttattttcgggtcgtcgaaagaacgggtagtcgggaaatttcgtgtttttattcgtggtagaggacgttgtggggcgggcgggttgcgggttttcggcgttttttcgtagaggcggcgatagcggtcgtttttttcgcggggtcgggtcggggaatttttttcgtttggagtcgggttaaaaagattcgtagtagagtcgagggggcggagggttgcgaacggtcggagggaaatacgagaggcgtgtagtttggggataggggagaaaggtagagcgcgttgggggaaggggtaggggagattagataagtttggggatgttttggggatcgg

SEQ ID NO: 28082 - DNA, 522 bp, Artificial Sequence
  chemically treated genomic DNA (Homo sapiens) CpG-island No: 28082
ccgatccccaaaacatccccaaacttatctaatctcccctaccccttcccccaacgcgctctacctttctcccctatccccaaactacacgcctctcgtatttccctccgaccgttcgcaaccctccgccccctcgactctactacgaatctttttaacccgactccaaacgaaaaaaattccccgacccgaccccgcgaaaaaaacgaccgctatcgccgcctctacgaaaaaacgccgaaaacccgcaacccgcccgccccacaacgtcctctaccacgaataaaaacacgaaatttcccgactacccgttctttcgacgacccgaaaataacgaaaaaaacgtcgcgacctctacgaccaaacgaacaccctacgaacctccgcgcgctccctacgtaaaaaacaatcttaaaaatttacccaaaaacgactctacacgcccgataccttccctaaaaacaccgaacactcgactaaaacccgatatataactacccgtataccgaacgcgttaacgcg

SEQ ID NO: 28083 - DNA, 522 bp, Artificial Sequence
  chemically treated genomic DNA (Homo sapiens) CpG-island No: 28083
tcggtttttaggatatttttagatttgtttgattttttttgtttttttttttaacgcgttttgttttttttttttgtttttaaattgtacgtttttcgtgttttttttcggtcgttcgtagtttttcgttttttcggttttgttgcgggtttttttggttcggttttaggcggggaaagtttttcggttcggtttcgcggggggggcggtcgttgtcgtcgtttttgcgggaaggcgtcgggagttcgtagttcgttcgttttatagcgttttttgttacgagtggggatacgggatttttcggttgttcgttttttcggcggttcgagggtggcggagggggcgtcgcggtttttgcggttaggcgggtattttgcgggttttcgcgcgttttttgcgtgaagagtagttttgggaatttgtttaggggcggttttgtacgttcggtgttttttttgaagatatcgagtattcggttggagttcgatgtgtggttgttcgtgtgtcgggcgcgttggcgcg

SEQ ID NO: 28084 - DNA, 522 bp, Artificial Sequence
  chemically treated genomic DNA (Homo sapiens) CpG-island No: 28084
cgcgccaacgcgcccgacacacgaacaaccacacatcgaactccaaccgaatactcgatatcttcaaaaaaaacaccgaacgtacaaaaccgcccctaaacaaattcccaaaactactcttcacgcaaaaaacgcgcgaaaacccgcaaaatacccgcctaaccgcaaaaaccgcgacgccccctccgccaccctcgaaccgccgaaaaaacgaacaaccgaaaaatcccgtatccccactcgtaacaaaaaacgctataaaacgaacgaactacgaactcccgacgccttcccgcaaaaacgacgacaacgaccgccccccccgcgaaaccgaaccgaaaaactttccccgcctaaaaccgaaccaaaaaaacccgcaacaaaaccgaaaaaacgaaaaactacgaacgaccgaaaaaaaacacgaaaaacgtacaatttaaaaacaaaaaaaaaaaacaaaacgcgttaaaaaaaaaaacaaaaaaaatcaaacaaatctaaaaatatcctaaaaaccga

SEQ ID NO: 28085 - DNA, 504 bp, Artificial Sequence
  chemically treated genomic DNA (Homo sapiens) CpG-island No: 28085
atagtagaagtcggagtcggagttcgggaggcgtcgtcgtcgtcgttgtcgtcgtatattgggattcgttcggtagtattatattcgttatgtcgggtatttgttttagattggcggcgttggttgttttcggagttcgagcggatagttaatgagatgttaatgatatgcgttggaggcggagttcgggtagattaattatagcgtcgcgagtttaattcggttttcggagggtttcgtttttttttttatttcgttttttggcgttggcgttcggcggcgcgttcgcgttatttaggggcggggttaaggggaggggcgtatgtaaatatgtttatgttaaaattcgggttttgtttttttcggattaaggaaaaagtgttttttcgggcgtttggcgtgtaaggattcgggttttagggggcgggtttagttttttgtatatttttattaggaatgtttatagtaatcgttgtattagatcgacgattggagaattttttt

SEQ ID NO: 28086 - DNA, 504 bp, Artificial Sequence
  chemically treated genomic DNA (Homo sapiens) CpG-island No: 28086
aaaaaaattctccaatcgtcgatctaatacaacgattactataaacattcctaataaaaatatacaaaaaactaaacccgccccctaaaacccgaatccttacacgccaaacgcccgaaaaaacactttttccttaatccgaaaaaaacaaaacccgaattttaacataaacatatttacatacgcccctccccttaaccccgcccctaaataacgcgaacgcgccgccgaacgccaacgccaaaaaacgaaataaaaaaaaaaacgaaaccctccgaaaaccgaattaaactcgcgacgctataattaatctacccgaactccgcctccaacgcatatcattaacatctcattaactatccgctcgaactccgaaaacaaccaacgccgccaatctaaaacaaatacccgacataacgaatataatactaccgaacgaatcccaatatacgacgacaacgacgacgacgacgcctcccgaactccgactccgacttctactat

SEQ ID NO: 28087 - DNA, 504 bp, Artificial Sequence
  chemically treated genomic DNA (Homo sapiens) CpG-island No: 28087
agggagattttttagtcgtcggtttgatatagcgattgttataaatatttttaataaaggtgtataagaagttagattcgttttttggagttcgagtttttgtacgttaggcgttcgggagaatattttttttttgattcggggaaagtaaaattcgaattttaatataaatatatttgtatacgtttttttttttggtttcgtttttaggtggcgcgggcgcgtcgtcgaacgttagcgttagggggcggggtgggggagggagcgaggtttttcgagagtcgggttgggttcgcggcgttgtgattggtttgttcggatttcgtttttagcgtatgttattagtattttattagttgttcgttcgggtttcggaggtagttaacgtcgttagtttgaggtaggtgttcgatatggcgagtgtagtgttgtcgagcggattttagtgtgcggcggtagcggcggcggcggcgtttttcgggtttcggtttcggtttttgttgt

SEQ ID NO: 28088 - DNA, 504 bp, Artificial Sequence
  chemically treated genomic DNA (Homo sapiens) CpG-island No: 28088
acaacaaaaaccgaaaccgaaacccgaaaaacgccgccgccgccgctaccgccgcacactaaaatccgctcgacaacactacactcgccatatcgaacacctacctcaaactaacgacgttaactacctccgaaacccgaacgaacaactaataaaatactaataacatacgctaaaaacgaaatccgaacaaaccaatcacaacgccgcgaacccaacccgactctcgaaaaacctcgctccctcccccaccccgccccctaacgctaacgttcgacgacgcgcccgcgccacctaaaaacgaaaccaaaaaaaaaaacgtatacaaatatatttatattaaaattcgaattttactttccccgaatcaaaaaaaaaatattctcccgaacgcctaacgtacaaaaactcgaactccaaaaaacgaatctaacttcttatacacctttattaaaaatatttataacaatcgctatatcaaaccgacgactaaaaaatctccct

SEQ ID NO: 28089 - DNA, 811 bp, Artificial Sequence
  chemically treated genomic DNA (Homo sapiens) CpG-island No: 28089
gtcgcgtcgttttcggttttttcgggtagcgtcggggttttgttaggcgcgcgttgttgtttgtttggattgcgtttattttgattttgaagttagcggttttattgatacgttttgaaaagtgggagttatacgcgggattcggagatcgcgttaaagttttacgtacgacggcgttcgtcggcgagtttacgttcgtacgtcggcgtatgcgcgcggttaagtcggtgttcgcgtttattagcgcgtatgcgcgtttcgtttttttttttttttcgtgttttgtttcgatggttcggttcgcgtcgggggcggggttagggcgttcgcgggaaatttggcgggaatcgcgttcgttttttttttttttttttttttttttgttttcgtcgcgtatttcgtcgttatggagtagcgtcgcgttatcgattttttcgcgcgtcgtcgtttcgggttttttcgtatcgcgtcgtttaagttggtttgtcgtatttttagtttcgttaggttcgtatttcgcgtttcggttttcgttattagtggtagtcgtaagcgcgttcgttcgttcgtcgttttcggacgcgattaggttaggttatcggttcgtaggagattgcggttgtcggtggacgaggtgaggggcgtggggagattgaggtcggggagttgggggcggggagattgaggttcggggggtagggttcggggaaattgaggcggagggacgggggcggggaaataggcgggggggacggggcgtagggaattttgggataggtcgggggattttgggggcgttttgttattattg

SEQ ID NO: 28090 - DNA, 811 bp, Artificial Sequence
  chemically treated genomic DNA (Homo sapiens) CpG-island No: 28090
caataataacaaaacgcccccaaaatcccccgacctatcccaaaattccctacgccccgtcccccccgcctatttccccgcccccgtccctccgcctcaatttccccgaaccctaccccccgaacctcaatctccccgcccccaactccccgacctcaatctccccacgcccctcacctcgtccaccgacaaccgcaatctcctacgaaccgataacctaacctaatcgcgtccgaaaacgacgaacgaacgaacgcgcttacgactaccactaataacgaaaaccgaaacgcgaaatacgaacctaacgaaactaaaaatacgacaaaccaacttaaacgacgcgatacgaaaaaacccgaaacgacgacgcgcgaaaaaatcgataacgcgacgctactccataacgacgaaatacgcgacgaaaacaaaaaaaaaaaaaaaaaaaaaaaaaacgaacgcgattcccgccaaatttcccgcgaacgccctaaccccgcccccgacgcgaaccgaaccatcgaaacaaaacacgaaaaaaaaaaaaaaacgaaacgcgcatacgcgctaataaacgcgaacaccgacttaaccgcgcgcatacgccgacgtacgaacgtaaactcgccgacgaacgccgtcgtacgtaaaactttaacgcgatctccgaatcccgcgtataactcccacttttcaaaacgtatcaataaaaccgctaacttcaaaatcaaaataaacgcaatccaaacaaacaacaacgcgcgcctaacaaaaccccgacgctacccgaaaaaaccgaaaacgacgcgac

SEQ ID NO: 28091 - DNA, 811 bp, Artificial Sequence
  chemically treated genomic DNA (Homo sapiens) CpG-island No: 28091
tagtggtggtagggcgtttttaggatttttcggtttgttttagagttttttgcgtttcgtttttttcgtttgttttttcgttttcgttttttcgttttagttttttcgagttttgtttttcgggttttagttttttcgtttttaatttttcggttttagtttttttacgttttttatttcgtttatcgatagtcgtagttttttgcgggtcggtggtttggtttggtcgcgttcgggggcggcgggcgggcgggcgcgtttgcggttgttattggtagcggaggtcggggcgcggagtgcgggtttggcggggttgggggtgcggtaggttagtttgggcggcgcgatgcgggggggttcggggcggcggcgcgcgaagaagtcggtgacgcggcgttgttttatggcggcggagtgcgcggcgaaagtaaggaaagaaggaagggaggaagaggcgggcgcggttttcgttaaatttttcgcgggcgttttggtttcgttttcggcgcggatcgaattatcggggtagagtacggggggagggaggggacggggcgcgtatgcgcgttggtgggcgcgggtatcggtttggtcgcgcgtatgcgtcgacgtgcgggcgtggattcgtcggcgggcgtcgtcgtgcgtgggattttagcgcggttttcggatttcgcgtgtggtttttattttttagggcgtgttagtggggtcgttggttttagggttagaatgagcgtaatttaggtaaatagtagcgcgcgtttgataaaatttcggcgttgttcgggggagtcgaggacggcgcggt

SEQ ID NO: 28092 - DNA, 811 bp, Artificial Sequence
  chemically treated genomic DNA (Homo sapiens) CpG-island No: 28092
accgcgccgtcctcgactcccccgaacaacgccgaaattttatcaaacgcgcgctactatttacctaaattacgctcattctaaccctaaaaccaacgaccccactaacacgccctaaaaaataaaaaccacacgcgaaatccgaaaaccgcgctaaaatcccacgcacgacgacgcccgccgacgaatccacgcccgcacgtcgacgcatacgcgcgaccaaaccgatacccgcgcccaccaacgcgcatacgcgccccgtcccctccctccccccgtactctaccccgataattcgatccgcgccgaaaacgaaaccaaaacgcccgcgaaaaatttaacgaaaaccgcgcccgcctcttcctcccttccttctttccttactttcgccgcgcactccgccgccataaaacaacgccgcgtcaccgacttcttcgcgcgccgccgccccgaacccccccgcatcgcgccgcccaaactaacctaccgcacccccaaccccgccaaacccgcactccgcgccccgacctccgctaccaataacaaccgcaaacgcgcccgcccgcccgccgcccccgaacgcgaccaaaccaaaccaccgacccgcaaaaaactacgactatcgataaacgaaataaaaaacgtaaaaaaactaaaaccgaaaaattaaaaacgaaaaaactaaaacccgaaaaacaaaactcgaaaaaactaaaacgaaaaaacgaaaacgaaaaaacaaacgaaaaaaacgaaacgcaaaaaactctaaaacaaaccgaaaaatcctaaaaacgccctaccaccacta

SEQ ID NO: 28093 - DNA, 852 bp, Artificial Sequence
  chemically treated genomic DNA (Homo sapiens) CpG-island No: 28093
tagcgcggcggtttcgggggtttaattttataatttttttcgggcgatttaagtacggcgttcgtttcggcgttttttgaagtattttaaaggtttttttttaagtagacgcgtagagtttacgtgttgttttcggcgcgcgtagaggcggaagcgttttagatgcggttattgggtattcgtttgcgatgtagtcgatgcggttttcgtgggtcgtttttaggtgtcgcgttaggaggtcgatggcggcgcggaaggaggcggggttttttaggacgggcgagatgtttttggatttaaggataggtttggtgacgtcggggtcgaaggagggtagggtttcgggggcgaaagacgagggttttcgtttcgttcgttcggaggtcgcgggttacgcgtttttattcgtaggttcgtaggtcggggcgttacgagggcggtttgtgcgtgtatttgaatattacgtttggggtggggaagtcggggaagttgcggattcgttgtttaattagttgtagttcggagtcggttatggtcgcgtgcgaagagtttgcggtagttcgagcgcgtttgcgcggggacgggcgggatcgttacgaggggtggggtattttcggagggcggagcgtgggtgaggggcggggtattcgtcgtcggaagtttgtatcgtattttatggatttttaggcgttatcgattttaagacgcgttcgtattttacgtattattgagtagaacgttcgaatcggataaaagtgcgagttaaggcgtttttttttgtttcgggttacgtttttgattgtagttaggtagttgtgggtcggggttttggcggttggaggaggggcgtga

SEQ ID NO: 28094 - DNA, 852 bp, Artificial Sequence
  chemically treated genomic DNA (Homo sapiens) CpG-island No: 28094
tcacgcccctcctccaaccgccaaaaccccgacccacaactacctaactacaatcaaaaacgtaacccgaaacaaaaaaaaacgccttaactcgcacttttatccgattcgaacgttctactcaataatacgtaaaatacgaacgcgtcttaaaatcgataacgcctaaaaatccataaaatacgatacaaacttccgacgacgaataccccgcccctcacccacgctccgccctccgaaaataccccacccctcgtaacgatcccgcccgtccccgcgcaaacgcgctcgaactaccgcaaactcttcgcacgcgaccataaccgactccgaactacaactaattaaacaacgaatccgcaacttccccgacttccccaccccaaacgtaatattcaaatacacgcacaaaccgccctcgtaacgccccgacctacgaacctacgaataaaaacgcgtaacccgcgacctccgaacgaacgaaacgaaaaccctcgtctttcgcccccgaaaccctaccctccttcgaccccgacgtcaccaaacctatccttaaatccaaaaacatctcgcccgtcctaaaaaaccccgcctccttccgcgccgccatcgacctcctaacgcgacacctaaaaacgacccacgaaaaccgcatcgactacatcgcaaacgaatacccaataaccgcatctaaaacgcttccgcctctacgcgcgccgaaaacaacacgtaaactctacgcgtctacttaaaaaaaaacctttaaaatacttcaaaaaacgccgaaacgaacgccgtacttaaatcgcccgaaaaaaattataaaattaaacccccgaaaccgccgcgcta

SEQ ID NO: 28095 - DNA, 852 bp, Artificial Sequence
  chemically treated genomic DNA (Homo sapiens) CpG-island No: 28095
ttacgttttttttttagtcgttaaggtttcggtttatagttgtttggttgtagttagaagcgtagttcgagataaggaagggcgttttgattcgtatttttgttcggttcgaacgttttgtttagtggtgcgtggaatgcgagcgcgttttaaaatcgatggcgtttaggagtttatgaaatacggtataggttttcggcgacggatgtttcgttttttatttacgtttcgtttttcggggatgttttatttttcgtggcggtttcgttcgttttcgcgtaggcgcgttcgggttgtcgtaggtttttcgtacgcggttatggtcgatttcgagttgtagttggttgagtagcggattcgtagttttttcgatttttttattttaggcgtggtatttaggtgtacgtataggtcgttttcgtggcgtttcgatttgcgggtttacggatgggagcgcgtggttcgcgattttcgggcgggcggggcgggaattttcgtttttcgttttcggggttttgttttttttcggtttcggcgttattaggtttgtttttgggtttagggatatttcgttcgttttgaaggatttcgttttttttcgcgtcgttatcggttttttggcgcgatatttgaaggcgatttacgggggtcgtatcgattatatcgtaggcgagtgtttagtggtcgtatttagggcgttttcgtttttgcgcgcgtcgagggtagtacgtgggttttgcgcgtttgtttgggggagggtttttggggtgttttagggggcgtcgggacgggcgtcgtgtttgggtcgttcgggaagggttgtgagattgagttttcgaggtcgtcgcgttg

SEQ ID NO: 28096 - DNA, 852 bp, Artificial Sequence
  chemically treated genomic DNA (Homo sapiens) CpG-island No: 28096
caacgcgacgacctcgaaaactcaatctcacaacccttcccgaacgacccaaacacgacgcccgtcccgacgccccctaaaacaccccaaaaaccctcccccaaacaaacgcgcaaaacccacgtactaccctcgacgcgcgcaaaaacgaaaacgccctaaatacgaccactaaacactcgcctacgatataatcgatacgacccccgtaaatcgccttcaaatatcgcgccaaaaaaccgataacgacgcgaaaaaaaacgaaatccttcaaaacgaacgaaatatccctaaacccaaaaacaaacctaataacgccgaaaccgaaaaaaaacaaaaccccgaaaacgaaaaacgaaaattcccgccccgcccgcccgaaaatcgcgaaccacgcgctcccatccgtaaacccgcaaatcgaaacgccacgaaaacgacctatacgtacacctaaataccacgcctaaaataaaaaaatcgaaaaaactacgaatccgctactcaaccaactacaactcgaaatcgaccataaccgcgtacgaaaaacctacgacaacccgaacgcgcctacgcgaaaacgaacgaaaccgccacgaaaaataaaacatccccgaaaaacgaaacgtaaataaaaaacgaaacatccgtcgccgaaaacctataccgtatttcataaactcctaaacgccatcgattttaaaacgcgctcgcattccacgcaccactaaacaaaacgttcgaaccgaacaaaaatacgaatcaaaacgcccttccttatctcgaactacgcttctaactacaaccaaacaactataaaccgaaaccttaacgactaaaaaaaaaacgtaa

SEQ ID NO: 28097 - DNA, 1017 bp, Artificial Sequence
  chemically treated genomic DNA (Homo sapiens) CpG-island No: 28097
tcgcggttttttttattcgggtaaatatcgtttcgttcggcggtttttttttcgtagcgtttcggcggagacgttagtcgcgttatgttcggcgttcgttcgatcgttttcgtgggtacgcggtgtcgttttttttagtcgtcgtcgtttttttagttcggttttgggataggagtttcgtcgtcgtttggcgcgtttatgttttaggaatgcgggcgttcgggtcgcgcgtttttgggaattttcgcgttcgttcgttcgtagttttcgtttcggtcggcgtcgttcggtgtttaggtcgtggggagtcgagacgtagttttttttcgtcgtttttaggcgttcgttttttatttattcgttagtagcgcgtagggtagtagtagttagtataggatcgcgtcgagtacgtgcggttttatggttggagggtttagggttcggtttagatcgagcggacgtcgcggcgttatggggcggtgcgggggtttcggggtcggcgcgttatggttgattcgcggggattcgcgcgtcgtttttttttttttttttttttttttcggtcgtttcgtcggtgtcgacgtttcgggttcgcgttcgtttaggcgatcgttttgtttttcggcggagcgtagcgttcgggtttattggggtcgagttgggtcggacgggggtttttttcgttttttttcgttcgcgggtttttataagttcggttttcgttcgtttttttcggcgtgttcgttttcgcgttttttcgacggttcggcgcgtttaggtatttttttcgttgtttcgcgcggttcgtttcgttttcggttcgttttggtgcgttggggtttggagattttcgattggcgttggttcggagcggattttttttttttcgtagttttggtttcgcggtttcgagcgtgcgcggcggtgggtaggggcgtttttcgttgggtgggttgcggttggggttcgggcgttatataaggggtttcggggtttttggtttttttaggtagcgtt

SEQ ID NO: 28098 - DNA, 1017 bp, Artificial Sequence
  chemically treated genomic DNA (Homo sapiens) CpG-island No: 28098
aacgctacctaaaaaaaccaaaaaccccgaaaccccttatataacgcccgaaccccaaccgcaacccacccaacgaaaaacgcccctacccaccgccgcgcacgctcgaaaccgcgaaaccaaaactacgaaaaaaaaaaaatccgctccgaaccaacgccaatcgaaaatctccaaaccccaacgcaccaaaacgaaccgaaaacgaaacgaaccgcgcgaaacaacgaaaaaaatacctaaacgcgccgaaccgtcgaaaaaacgcgaaaacgaacacgccgaaaaaaacgaacgaaaaccgaacttataaaaacccgcgaacgaaaaaaaacgaaaaaaacccccgtccgacccaactcgaccccaataaacccgaacgctacgctccgccgaaaaacaaaacgatcgcctaaacgaacgcgaacccgaaacgtcgacaccgacgaaacgaccgaaaaaaaaaaaaaaaaaaaaaaaaacgacgcgcgaatccccgcgaatcaaccataacgcgccgaccccgaaacccccgcaccgccccataacgccgcgacgtccgctcgatctaaaccgaaccctaaaccctccaaccataaaaccgcacgtactcgacgcgatcctatactaactactactaccctacgcgctactaacgaataaataaaaaacgaacgcctaaaaacgacgaaaaaaaactacgtctcgactccccacgacctaaacaccgaacgacgccgaccgaaacgaaaactacgaacgaacgaacgcgaaaattcccaaaaacgcgcgacccgaacgcccgcattcctaaaacataaacgcgccaaacgacgacgaaactcctatcccaaaaccgaactaaaaaaacgacgacgactaaaaaaaacgacaccgcgtacccacgaaaacgatcgaacgaacgccgaacataacgcgactaacgtctccgccgaaacgctacgaaaaaaaaaccgccgaacgaaacgatatttacccgaataaaaaaaaccgcga

SEQ ID NO: 28099 - DNA, 1017 bp, Artificial Sequence
  chemically treated genomic DNA (Homo sapiens) CpG-island No: 28099
ggcgttgtttgggggagttagaggtttcgggattttttatgtagcgttcgggttttagtcgtagtttatttagcgagaagcgtttttgtttatcgtcgcgtacgttcggagtcgcggggttaagattgcgggaggggaggggttcgtttcgggttagcgttagtcgggggtttttaggttttaacgtattagggcgggtcggaggcgggacgggtcgcgcgggatagcggagggggtgtttgggcgcgtcgggtcgtcggggaagcgcggaggcgggtacgtcggggagggcgggcgggggtcgagtttataaaggttcgcgggcggaggagggcggggaggattttcgttcggtttagttcggttttagtgagttcgagcgttgcgtttcgtcggggggtagggcggtcgtttgagcgagcgcgggttcgggacgtcggtatcggcggggcggtcgaaggagaaggaggaagaggagaaggcggcgcgcgggttttcgcgggttagttatggcgcgtcggtttcggggttttcgtatcgttttatagcgtcgcggcgttcgttcggtttgggtcgggttttgggttttttagttatggagtcgtacgtgttcggcgcggttttgtattggttgttgttgttttgcgcgttgttggcgggtgagtggggggcgggcgtttgggggcgacgggagggggttgcgtttcggttttttacggtttggatatcggacgacgtcggtcggggcgagggttgcgggcgagcgggcgcggaaatttttagggacgcgcgattcgggcgttcgtatttttgaagtatgagcgcgttaggcggcggcggggtttttgttttagggtcgggttggaagggcggcggcggttgggggagacggtatcgcgtgtttacgggggcggtcgagcgagcgtcgggtatagcgcggttggcgttttcgtcggggcgttgcggagaggaggtcgtcgggcgaggcggtgtttgttcgggtgggaagggtcgcgg

SEQ ID NO: 28100 - DNA, 1017 bp, Artificial Sequence
  chemically treated genomic DNA (Homo sapiens) CpG-island No: 28100
ccgcgacccttcccacccgaacaaacaccgcctcgcccgacgacctcctctccgcaacgccccgacgaaaacgccaaccgcgctatacccgacgctcgctcgaccgcccccgtaaacacgcgataccgtctcccccaaccgccgccgcccttccaacccgaccctaaaacaaaaaccccgccgccgcctaacgcgctcatacttcaaaaatacgaacgcccgaatcgcgcgtccctaaaaatttccgcgcccgctcgcccgcaaccctcgccccgaccgacgtcgtccgatatccaaaccgtaaaaaaccgaaacgcaaccccctcccgtcgcccccaaacgcccgccccccactcacccgccaacaacgcgcaaaacaacaacaaccaatacaaaaccgcgccgaacacgtacgactccataactaaaaaacccaaaacccgacccaaaccgaacgaacgccgcgacgctataaaacgatacgaaaaccccgaaaccgacgcgccataactaacccgcgaaaacccgcgcgccgccttctcctcttcctccttctccttcgaccgccccgccgataccgacgtcccgaacccgcgctcgctcaaacgaccgccctaccccccgacgaaacgcaacgctcgaactcactaaaaccgaactaaaccgaacgaaaatcctccccgccctcctccgcccgcgaacctttataaactcgacccccgcccgccctccccgacgtacccgcctccgcgcttccccgacgacccgacgcgcccaaacaccccctccgctatcccgcgcgacccgtcccgcctccgacccgccctaatacgttaaaacctaaaaacccccgactaacgctaacccgaaacgaacccctcccctcccgcaatcttaaccccgcgactccgaacgtacgcgacgataaacaaaaacgcttctcgctaaataaactacgactaaaacccgaacgctacataaaaaatcccgaaacctctaactcccccaaacaacgcc

SEQ ID NO: 28101 - DNA, 945 bp, Artificial Sequence
  chemically treated genomic DNA (Homo sapiens) CpG-island No: 28101
agcgaggtttcgttttttacgcggggtttttcggagtaagttcggtcgggatttttcggggtaggagtgcggcgggaaggcgaggggcggtttggcgggttcggtcgttagtttttatttgggtcgcggcgtcgggggcggttttttaggcgtcggtttttcgtagttttcgtttatttgatatatgggtacgtcgggtttcgtcgtagattgtggcggcgatagcgcgagggcgcgtttcgatgacgtcggagtggcgtcgtgacggtcgcgaagttcggttgggggcggcgttttacgatgacgttagcgcggcgtagtagcggttgtgattagcgggtcggttcgggttaggatagcgggcggcgggcggcgcgggtttggtttcgggatggttatgtttcgtagtttggtggtttcggtttagtagcggtagtcgtcggtcgggtcggcgggcggcgatagcggtttggaggcgtagtatatttgttttatttgtttggaggtttattatcggttcgtggttatcggtagttgcggttatacgtgagcgcgttcgtttaggggtcgcggggagggggtcgtgtttcgtcgcgggaggggtcgcgaggtcggcggtcgtttcggtgtagtttcggattgggcgcgcggggattcggggcgtcggggtttcggggcgcgtggggttcgggtttttttgtgtcgcgtcgtttttgttttttgggcgcgtttatttttcgtttagtttttttcgcgttagtcgtaggcgttcggttcgattgttgtttcggtttatcgggcgatttgcggttttgtttaagttcggggttttcggcggttgcggcgggcgtttcggtatttagagggtagtaggtgttatcgtttcgttagtggtggtggatttgggtttgtgcggttggaatgggtagttgtaaataaataatt

SEQ ID NO: 28102 - DNA, 945 bp, Artificial Sequence
  chemically treated genomic DNA (Homo sapiens) CpG-island No: 28102
aattatttatttacaactacccattccaaccgcacaaacccaaatccaccaccactaacgaaacgataacacctactaccctctaaataccgaaacgcccgccgcaaccgccgaaaaccccgaacttaaacaaaaccgcaaatcgcccgataaaccgaaacaacaatcgaaccgaacgcctacgactaacgcgaaaaaaactaaacgaaaaataaacgcgcccaaaaaacaaaaacgacgcgacacaaaaaaacccgaaccccacgcgccccgaaaccccgacgccccgaatccccgcgcgcccaatccgaaactacaccgaaacgaccgccgacctcgcgacccctcccgcgacgaaacacgaccccctccccgcgacccctaaacgaacgcgctcacgtataaccgcaactaccgataaccacgaaccgataataaacctccaaacaaataaaacaaatatactacgcctccaaaccgctatcgccgcccgccgacccgaccgacgactaccgctactaaaccgaaaccaccaaactacgaaacataaccatcccgaaaccaaacccgcgccgcccgccgcccgctatcctaacccgaaccgacccgctaatcacaaccgctactacgccgcgctaacgtcatcgtaaaacgccgcccccaaccgaacttcgcgaccgtcacgacgccactccgacgtcatcgaaacgcgccctcgcgctatcgccgccacaatctacgacgaaacccgacgtacccatatatcaaataaacgaaaactacgaaaaaccgacgcctaaaaaaccgcccccgacgccgcgacccaaataaaaactaacgaccgaacccgccaaaccgcccctcgccttcccgccgcactcctaccccgaaaaatcccgaccgaacttactccgaaaaaccccgcgtaaaaaacgaaacctcgct

SEQ ID NO: 28103 - DNA, 945 bp, Artificial Sequence
  chemically treated genomic DNA (Homo sapiens) CpG-island No: 28103
agttatttatttataattgtttattttagtcgtataagtttaaatttattattattggcggagcggtggtatttgttgttttttgagtatcggagcgttcgtcgtagtcgtcggggatttcgagtttgggtagggtcgtaggtcgttcggtgaatcgaagtagtagtcggatcgggcgtttgcggttggcgcgaaggaggttgggcgggggatgaacgcgtttagagggtagaggcggcgcggtatagggaaattcggattttacgcgtttcgaggtttcggcgtttcgagttttcgcgcgtttagttcggggttgtatcggggcggtcgtcggtttcgcgatttttttcgcggcggggtacggtttttttttcgcggtttttgggcgggcgcgtttacgtgtggtcgtagttgtcgatggttacgggtcggtgatagatttttaggtagatggggtaggtgtattgcgtttttaggtcgttgtcgtcgttcgtcggttcggtcggcggttgtcgttgttgagtcgaggttattaggttgcggaatatagttatttcggggttaggttcgcgtcgttcgtcgttcgttgttttggttcgggtcggttcgttagttatagtcgttattgcgtcgcgttgacgttatcgtagggcgtcgtttttagtcgggtttcgcggtcgttacggcgttatttcgacgttatcggggcgcgttttcgcgttgtcgtcgttatagtttgcgacgggattcggcgtgtttatgtgttaggtgggcgaggattacggggagtcggcgtttgaggagtcgttttcggcgtcgcggtttaggtaagagttggcggtcggattcgttaggtcgtttttcgttttttcgtcgtatttttgtttcgaagggtttcggtcgggtttgtttcgggaagtttcgcgtggagagcgggatttcgtt

SEQ ID NO: 28104 - DNA, 945 bp, Artificial Sequence
  chemically treated genomic DNA (Homo sapiens) CpG-island No: 28104
aacgaaatcccgctctccacgcgaaacttcccgaaacaaacccgaccgaaacccttcgaaacaaaaatacgacgaaaaaacgaaaaacgacctaacgaatccgaccgccaactcttacctaaaccgcgacgccgaaaacgactcctcaaacgccgactccccgtaatcctcgcccacctaacacataaacacgccgaatcccgtcgcaaactataacgacgacaacgcgaaaacgcgccccgataacgtcgaaataacgccgtaacgaccgcgaaacccgactaaaaacgacgccctacgataacgtcaacgcgacgcaataacgactataactaacgaaccgacccgaaccaaaacaacgaacgacgaacgacgcgaacctaaccccgaaataactatattccgcaacctaataacctcgactcaacaacgacaaccgccgaccgaaccgacgaacgacgacaacgacctaaaaacgcaatacacctaccccatctacctaaaaatctatcaccgacccgtaaccatcgacaactacgaccacacgtaaacgcgcccgcccaaaaaccgcgaaaaaaaaaccgtaccccgccgcgaaaaaaatcgcgaaaccgacgaccgccccgatacaaccccgaactaaacgcgcgaaaactcgaaacgccgaaacctcgaaacgcgtaaaatccgaatttccctataccgcgccgcctctaccctctaaacgcgttcatcccccgcccaacctccttcgcgccaaccgcaaacgcccgatccgactactacttcgattcaccgaacgacctacgaccctacccaaactcgaaatccccgacgactacgacgaacgctccgatactcaaaaaacaacaaataccaccgctccgccaataataataaatttaaacttatacgactaaaataaacaattataaataaataact

SEQ ID NO: 28105 - DNA, 651 bp, Artificial Sequence
  chemically treated genomic DNA (Homo sapiens) CpG-island No: 28105
cggggtgcgtggggaggagagcggtgaggtcgagtacggggtgcgtggggaggagagcggtgaggtcgagtacggggtgcgtggggaggagagcggtgaggtcgagtacggggagcgtggggaggagagcggtgaggtcgagtacggggtgcgtggggaggagagcggtgaggtcgagtacggggtgcgtggggaggagagcggtgaggtcgagtacggggtgcgtggggaggagagcggtgaggtcgagtacggggtgcgtggggaggagagcggtgaggtcgagtacggggtgcgtggggaggagagcggtgaggtcgagtacggggtgcgtggggaggagagcggtgaggtcgagtacggggtgcgtggggaggagagcggtgaggtcgagtacggggagcgtggggaggagagcggtgaggtcgagtacggggtgcgtggggaggagagcggtgaggtcgagtacggggtgcgtggggaggagagcggtgaggtcgagtacggggtgcgtggggaggagagcggtgaggtcgagtacggggagcgtggggaggagggtggtgaggttgagtatggggtgcgtggaggttgagtatagggtgcgtggggaggagagcggtgaggatgagtacggggtgtatgggggag

SEQ ID NO: 28106 - DNA, 651 bp, Artificial Sequence
  chemically treated genomic DNA (Homo sapiens) CpG-island No: 28106
ctcccccatacaccccgtactcatcctcaccgctctcctccccacgcaccctatactcaacctccacgcaccccatactcaacctcaccaccctcctccccacgctccccgtactcgacctcaccgctctcctccccacgcaccccgtactcgacctcaccgctctcctccccacgcaccccgtactcgacctcaccgctctcctccccacgcaccccgtactcgacctcaccgctctcctccccacgctccccgtactcgacctcaccgctctcctccccacgcaccccgtactcgacctcaccgctctcctccccacgcaccccgtactcgacctcaccgctctcctccccacgcaccccgtactcgacctcaccgctctcctccccacgcaccccgtactcgacctcaccgctctcctccccacgcaccccgtactcgacctcaccgctctcctccccacgcaccccgtactcgacctcaccgctctcctccccacgcaccccgtactcgacctcaccgctctcctccccacgctccccgtactcgacctcaccgctctcctccccacgcaccccgtactcgacctcaccgctctcctccccacgcaccccgtactcgacctcaccgctctcctccccacgcaccccg

SEQ ID NO: 28107 - DNA, 651 bp, Artificial Sequence
  chemically treated genomic DNA (Homo sapiens) CpG-island No: 28107
tttttttatgtatttcgtgtttatttttatcgtttttttttttacgtattttgtgtttagtttttacgtattttatgtttagttttattatttttttttttacgtttttcgtgttcggttttatcgtttttttttttacgtatttcgtgttcggttttatcgtttttttttttacgtatttcgtgttcggttttatcgtttttttttttacgtatttcgtgttcggttttatcgtttttttttttacgtttttcgtgttcggttttatcgtttttttttttacgtatttcgtgttcggttttatcgtttttttttttacgtatttcgtgttcggttttatcgtttttttttttacgtatttcgtgttcggttttatcgtttttttttttacgtatttcgtgttcggttttatcgtttttttttttacgtatttcgtgttcggttttatcgtttttttttttacgtatttcgtgttcggttttatcgtttttttttttacgtatttcgtgttcggttttatcgtttttttttttacgtttttcgtgttcggttttatcgtttttttttttacgtatttcgtgttcggttttatcgtttttttttttacgtatttcgtgttcggttttatcgtttttttttttacgtatttcg

SEQ ID NO: 28108 - DNA, 651 bp, Artificial Sequence
  chemically treated genomic DNA (Homo sapiens) CpG-island No: 28108
cgaaatacgtaaaaaaaaaaacgataaaaccgaacacgaaatacgtaaaaaaaaaaacgataaaaccgaacacgaaatacgtaaaaaaaaaaacgataaaaccgaacacgaaaaacgtaaaaaaaaaaacgataaaaccgaacacgaaatacgtaaaaaaaaaaacgataaaaccgaacacgaaatacgtaaaaaaaaaaacgataaaaccgaacacgaaatacgtaaaaaaaaaaacgataaaaccgaacacgaaatacgtaaaaaaaaaaacgataaaaccgaacacgaaatacgtaaaaaaaaaaacgataaaaccgaacacgaaatacgtaaaaaaaaaaacgataaaaccgaacacgaaatacgtaaaaaaaaaaacgataaaaccgaacacgaaaaacgtaaaaaaaaaaacgataaaaccgaacacgaaatacgtaaaaaaaaaaacgataaaaccgaacacgaaatacgtaaaaaaaaaaacgataaaaccgaacacgaaatacgtaaaaaaaaaaacgataaaaccgaacacgaaaaacgtaaaaaaaaaaataataaaactaaacataaaatacgtaaaaactaaacacaaaatacgtaaaaaaaaaaacgataaaaataaacacgaaatacataaaaaaa

SEQ ID NO: 28109 - DNA, 637 bp, Artificial Sequence
  chemically treated genomic DNA (Homo sapiens) CpG-island No: 28109
ttttatttcgtttttttttttattcgtttttttttttttcgttttatttcggttttgtttcgttttatcgttcgtatttacgtcgtttatgagtaggagtaggatgttggggggttgcggggcgttcgaggtttttattttcgcggcgttgagtattagtaatagttgttattatttcgtcgtcgcgataatcgtcgttatggtaattacgggagtcgcggagtttcggttagcgagtcgatttagcgagcgttcgtcggttttttcggttgggttgcggggcggggtttggacggttacgtgattcgcggggcggggttagagttcgcggagggacgggaggcggggtttggattgtttcgtgattagtggggcggggtttgagttagttgtgtgcggatggggcggggttttggaggtcgcgtgattagcggcgggttacgtgacgcggtgtttggcgtcgagttttttaagatggcggtgtgtatcgcggtgattgttaaggaggtgcgtacgcgcggcgtggggcgttcgggttcgtattattttcggtttttcgttttttttttattttttttttgggtttagaaggtattttaggaaatgggatttggaggaggttttcgtcgagttttag

SEQ ID NO: 28110 - DNA, 637 bp, Artificial Sequence
  chemically treated genomic DNA (Homo sapiens) CpG-island No: 28110
ctaaaactcgacgaaaacctcctccaaatcccatttcctaaaataccttctaaacccaaaaaaaaaataaaaaaaaaacgaaaaaccgaaaataatacgaacccgaacgccccacgccgcgcgtacgcacctccttaacaatcaccgcgatacacaccgccatcttaaaaaactcgacgccaaacaccgcgtcacgtaacccgccgctaatcacgcgacctccaaaaccccgccccatccgcacacaactaactcaaaccccgccccactaatcacgaaacaatccaaaccccgcctcccgtccctccgcgaactctaaccccgccccgcgaatcacgtaaccgtccaaaccccgccccgcaacccaaccgaaaaaaccgacgaacgctcgctaaatcgactcgctaaccgaaactccgcgactcccgtaattaccataacgacgattatcgcgacgacgaaataataacaactattactaatactcaacgccgcgaaaataaaaacctcgaacgccccgcaaccccccaacatcctactcctactcataaacgacgtaaatacgaacgataaaacgaaacaaaaccgaaataaaacgaaaaaaaaaaaaacgaataaaaaaaaaaacgaaataaaa

SEQ ID NO: 28111 - DNA, 637 bp, Artificial Sequence
  chemically treated genomic DNA (Homo sapiens) CpG-island No: 28111
ttggagttcggcgaaggttttttttaggttttattttttaaggtgttttttaagtttagggaagaagtagaaagaaagcggagagtcgaggatggtgcgagttcggacgttttacgtcgcgcgtacgtatttttttggtaattatcgcgatgtatatcgttattttgggaggttcggcgttaggtatcgcgttacgtgattcgtcgttggttacgcggtttttaaagtttcgttttattcgtatatagttggtttaggtttcgttttattggttacgaggtagtttaggtttcgtttttcgttttttcgcggattttggtttcgtttcgcgagttacgtggtcgtttaggtttcgtttcgtagtttagtcggaagggtcggcggacgttcgttaggtcggttcgttggtcggggtttcgcggttttcgtggttgttatggcggcggttgtcgcggcgacgaggtggtggtagttgttgttggtgtttagcgtcgcggggatgggggtttcgggcgtttcgtagttttttaatattttgtttttgtttatggacgacgtgagtgcgggcggtgggacggggtagggtcggggtggggcggggaggggaggggcggatggagggaggagcgaggtgggg

SEQ ID NO: 28112 - DNA, 637 bp, Artificial Sequence
  chemically treated genomic DNA (Homo sapiens) CpG-island No: 28112
ccccacctcgctcctccctccatccgcccctcccctccccgccccaccccgaccctaccccgtcccaccgcccgcactcacgtcgtccataaacaaaaacaaaatattaaaaaactacgaaacgcccgaaacccccatccccgcgacgctaaacaccaacaacaactaccaccacctcgtcgccgcgacaaccgccgccataacaaccacgaaaaccgcgaaaccccgaccaacgaaccgacctaacgaacgtccgccgacccttccgactaaactacgaaacgaaacctaaacgaccacgtaactcgcgaaacgaaaccaaaatccgcgaaaaaacgaaaaacgaaacctaaactacctcgtaaccaataaaacgaaacctaaaccaactatatacgaataaaacgaaactttaaaaaccgcgtaaccaacgacgaatcacgtaacgcgatacctaacgccgaacctcccaaaataacgatatacatcgcgataattaccaaaaaaatacgtacgcgcgacgtaaaacgtccgaactcgcaccatcctcgactctccgctttctttctacttcttccctaaacttaaaaaacaccttaaaaaataaaacctaaaaaaaaccttcgccgaactccaa

SEQ ID NO: 28113 - DNA, 851 bp, Artificial Sequence
  chemically treated genomic DNA (Homo sapiens) CpG-island No: 28113
gtgttgcggtcggcgtggttcggagattagttttttaatttcgaggtggggtggattcgggtgtttcgcggttatagttttttttcgtttttagaagcgtagtttcgcggttcgttcgtcgttcgcgagggtcgtattttgttttcggtttttagcggcgtttggttacgttttcggcgggtggagtcgggcggggcgtcgggtaggtttttttgcgtttcgcggcggcggtagcggcggcgacggcgatatggagagcggggtttacggcgcggttaaggcgggcggttttttcgatttgcggcgttttttgacgtagtcgtaggtggtggcgcgcgtcgtgtgtttggtgagttcggggagggcgggtcgagggtattttggggatttttttttcgtcgttaggttcggcggggtttttagtttacgagcgcgataggtggcggcggtcgcgttcggggtttggcggcgagcggggtcggcgtttagcgtttcgggtttcgttttttcgttttttatagtttgtttcgttgttttttttcggtttcgggtttcgttatttattttatttttagtttcgcgtttcgacgcggggtgttcggattttcgtagggagcgggtttttgtttcgttggtagtgggaggagtttgggggcggttttcggataggtggttcgtacgtcgcgatttttagattggggagtttatcgggacggggtttttcgaagttacgtggggtaagggagggggcggggggcgatttaacgttcggaaatagggtgttttttttattcggggtaggttacgggttcgtttttttattcgaagttgagggattttaagatgtattt

SEQ ID NO: 28114 - DNA, 851 bp, Artificial Sequence
  chemically treated genomic DNA (Homo sapiens) CpG-island No: 28114
aaatacatcttaaaatccctcaacttcgaataaaaaaacgaacccgtaacctaccccgaataaaaaaaacaccctatttccgaacgttaaatcgccccccgccccctcccttaccccacgtaacttcgaaaaaccccgtcccgataaactccccaatctaaaaatcgcgacgtacgaaccacctatccgaaaaccgcccccaaactcctcccactaccaacgaaacaaaaacccgctccctacgaaaatccgaacaccccgcgtcgaaacgcgaaactaaaaataaaataaataacgaaacccgaaaccgaaaaaaaacaacgaaacaaactataaaaaacgaaaaaacgaaacccgaaacgctaaacgccgaccccgctcgccgccaaaccccgaacgcgaccgccgccacctatcgcgctcgtaaactaaaaaccccgccgaacctaacgacgaaaaaaaaatccccaaaataccctcgacccgccctccccgaactcaccaaacacacgacgcgcgccaccacctacgactacgtcaaaaaacgccgcaaatcgaaaaaaccgcccgccttaaccgcgccgtaaaccccgctctccatatcgccgtcgccgccgctaccgccgccgcgaaacgcaaaaaaacctacccgacgccccgcccgactccacccgccgaaaacgtaaccaaacgccgctaaaaaccgaaaacaaaatacgaccctcgcgaacgacgaacgaaccgcgaaactacgcttctaaaaacgaaaaaaaactataaccgcgaaacacccgaatccaccccacctcgaaattaaaaaactaatctccgaaccacgccgaccgcaacac

SEQ ID NO: 28115 - DNA, 851 bp, Artificial Sequence
  chemically treated genomic DNA (Homo sapiens) CpG-island No: 28115
gggtatattttggggttttttaatttcgggtgggaaggcggattcgtggtttgtttcgagtgggaaggatattttgttttcgggcgttgggtcgtttttcgtttttttttttattttacgtggtttcggaaaatttcgtttcggtgaattttttaatttgggagtcgcggcgtgcgggttatttgttcgggagtcgtttttaaattttttttattgttagcgaggtaggggttcgttttttgcggagattcggatatttcgcgtcggggcgcgaggttgggggtggggtgggtggcgggattcgggatcgggaggggatagcgggatagattgtggagggcgggaaggcggggttcgggacgttggacgtcggtttcgttcgtcgttaggtttcggacgcggtcgtcgttatttgtcgcgttcgtgggttaggggtttcgtcgggtttggcgacggagagggggtttttagggtgttttcggttcgtttttttcgggtttattaagtatacggcgcgcgttattatttgcggttgcgttaggaagcgtcgtaggtcgaaggagtcgttcgttttggtcgcgtcgtaggtttcgttttttatgtcgtcgtcgtcgtcgttgtcgtcgtcgcggaacgtagaggaatttgttcggcgtttcgttcgattttattcgtcgggggcgtggttaggcgtcgttagggatcgagggtaaagtgcggttttcgcgagcggcgggcgagtcgcgggattgcgtttttagaggcggggaggggttgtggtcgcggagtattcgggtttattttatttcggggttgaggggttagttttcgggttacgtcggtcgtagtat

SEQ ID NO: 28116 - DNA, 851 bp, Artificial Sequence
  chemically treated genomic DNA (Homo sapiens) CpG-island No: 28116
atactacgaccgacgtaacccgaaaactaacccctcaaccccgaaataaaataaacccgaatactccgcgaccacaacccctccccgcctctaaaaacgcaatcccgcgactcgcccgccgctcgcgaaaaccgcactttaccctcgatccctaacgacgcctaaccacgcccccgacgaataaaatcgaacgaaacgccgaacaaattcctctacgttccgcgacgacgacaacgacgacgacgacgacataaaaaacgaaacctacgacgcgaccaaaacgaacgactccttcgacctacgacgcttcctaacgcaaccgcaaataataacgcgcgccgtatacttaataaacccgaaaaaaacgaaccgaaaacaccctaaaaaccccctctccgtcgccaaacccgacgaaacccctaacccacgaacgcgacaaataacgacgaccgcgtccgaaacctaacgacgaacgaaaccgacgtccaacgtcccgaaccccgccttcccgccctccacaatctatcccgctatcccctcccgatcccgaatcccgccacccaccccacccccaacctcgcgccccgacgcgaaatatccgaatctccgcaaaaaacgaacccctacctcgctaacaataaaaaaaatttaaaaacgactcccgaacaaataacccgcacgccgcgactcccaaattaaaaaattcaccgaaacgaaattttccgaaaccacgtaaaataaaaaaaaaaacgaaaaacgacccaacgcccgaaaacaaaatatccttcccactcgaaacaaaccacgaatccgccttcccacccgaaattaaaaaaccccaaaatataccc

SEQ ID NO: 28117 - DNA, 1452 bp, Artificial Sequence
  chemically treated genomic DNA (Homo sapiens) CpG-island No: 28117
tagtaagttatttgcggttgttgtttattagggttcgtttggggttattgagattacgcgtcggtgttcgttttttcgttgcggttcgattttttgaattaattaggcgttttcgggcgttttgttttagacgggtttatcgtttgcgcgggtcgagggcggcgtatttgtttttgcgttttcgtatcgaaggtgaggtcggaggaagagaagatcgtaatttttaagttttcgcggcgtggggttcggggggggatacgaggcggggttattaggacgtcgatagttttacgtttttgggttcgcggcgcgtaaggtatgtcgggattcgtagtttcgcgacgttgcgatttatagtgcgcgatgggagtggaggagagcggttcgcggtgtatgtcggaattcgtagtttcgggatgttgggttttagcgcgtgatggggtaatggtacgtaggtttgcgttgaacgttgggattcgtagtttcgttatgttttgttcgcggtgtacgtcgggatacgtagtttcgagcgcgttaagatcgttattgggattgggcgatagcggttcgcgttgtatgtcgttgttttacggtgtcggcgtttcgaggaaaagtaggtagggtttaggaacgtagttttttacggtcggtacgtagggttggttttaggacggagtcggtttcggtttcgcgcggcgttcgtatttatacgcgtacgtacgtacgtacgcggcgtttttgcgtgacgttacgcgttttttaggaagtcggcgcgggttaggcgacgggtggaagtcggtatcgagaggaattatagcgtcgtcgtttgggttgtgtcgtcgcggtagggcgttgcgttttgagcgtagcgtaggtttcgtatcgatcgttcgttcgttttttgttcgcgatggaggtgtcggtcgcgggtcgcgtttttgtcgagggcgtttcgacggcggttgtggtcgaggtgcgttgttcggggttcgcgttcgttgcgtttgttggagtggagggtggcggcgggcgcggtcgtgcgtatcggttcggtgttggtcgtgttcgaggtcgtcgttttcgcgtagtttttcggggttttttagtttcgtgtagttttcgggggttgcgtgcgtttcgcgcggtcggaacgtaggttgaggtcggagcgcgcgggcgtggtgcgggagttgtgcgcgtagtcgggttaggtggtcgttttagggtgagtgtgttgagtcgggcggggtcgagggcgggcggtttcggggagggattttggaggattttcgggttgttgcgttcgcggtgggtaggggcgtttttggtgagggagcgataaagcgggacgtaggtattgcgttttttttttaaaattggatagttattatttgtggttttattaacggggagtattttgagataaaaggaaagggttttgcgtagcgatat

SEQ ID NO: 28118 - DNA, 1452 bp, Artificial Sequence
  chemically treated genomic DNA (Homo sapiens) CpG-island No: 28118
atatcgctacgcaaaaccctttccttttatctcaaaatactccccgttaataaaaccacaaataataactatccaattttaaaaaaaaaacgcaatacctacgtcccgctttatcgctccctcaccaaaaacgcccctacccaccgcgaacgcaacaacccgaaaatcctccaaaatccctccccgaaaccgcccgccctcgaccccgcccgactcaacacactcaccctaaaacgaccacctaacccgactacgcgcacaactcccgcaccacgcccgcgcgctccgacctcaacctacgttccgaccgcgcgaaacgcacgcaacccccgaaaactacacgaaactaaaaaaccccgaaaaactacgcgaaaacgacgacctcgaacacgaccaacaccgaaccgatacgcacgaccgcgcccgccgccaccctccactccaacaaacgcaacgaacgcgaaccccgaacaacgcacctcgaccacaaccgccgtcgaaacgccctcgacaaaaacgcgacccgcgaccgacacctccatcgcgaacaaaaaacgaacgaacgatcgatacgaaacctacgctacgctcaaaacgcaacgccctaccgcgacgacacaacccaaacgacgacgctataattcctctcgataccgacttccacccgtcgcctaacccgcgccgacttcctaaaaaacgcgtaacgtcacgcaaaaacgccgcgtacgtacgtacgtacgcgtataaatacgaacgccgcgcgaaaccgaaaccgactccgtcctaaaaccaaccctacgtaccgaccgtaaaaaactacgttcctaaaccctacctacttttcctcgaaacgccgacaccgtaaaacaacgacatacaacgcgaaccgctatcgcccaatcccaataacgatcttaacgcgctcgaaactacgtatcccgacgtacaccgcgaacaaaacataacgaaactacgaatcccaacgttcaacgcaaacctacgtaccattaccccatcacgcgctaaaacccaacatcccgaaactacgaattccgacatacaccgcgaaccgctctcctccactcccatcgcgcactataaatcgcaacgtcgcgaaactacgaatcccgacataccttacgcgccgcgaacccaaaaacgtaaaactatcgacgtcctaataaccccgcctcgtatccccccccgaaccccacgccgcgaaaacttaaaaattacgatcttctcttcctccgacctcaccttcgatacgaaaacgcaaaaacaaatacgccgccctcgacccgcgcaaacgataaacccgtctaaaacaaaacgcccgaaaacgcctaattaattcaaaaaatcgaaccgcaacgaaaaaacgaacaccgacgcgtaatctcaataaccccaaacgaaccctaataaacaacaaccgcaaataacttacta

SEQ ID NO: 28119 - DNA, 1452 bp, Artificial Sequence
  chemically treated genomic DNA (Homo sapiens) CpG-island No: 28119
gtgtcgttacgtaggattttttttttttattttaaaatgtttttcgttggtaaaattataggtggtgattatttagttttaggggagaagcgtagtgtttgcgtttcgttttatcgtttttttattaggggcgtttttgtttatcgcggacgtagtagttcgggggttttttaggattttttttcggagtcgttcgttttcggtttcgttcggtttagtatatttattttggggcgattatttggttcggttgcgcgtatagttttcgtattacgttcgcgcgtttcgattttagtttgcgtttcggtcgcgcggggcgtacgtagttttcggaggttatacgggattgagaggtttcggaggattgcgcggaggcggcggtttcgaatacggttagtatcgagtcgatgcgtacggtcgcgttcgtcgttattttttattttagtaggcgtagcgggcgcgggtttcgggtagcgtatttcggttatagtcgtcgtcggggcgttttcggtaggaacgcgattcgcggtcggtatttttatcgcggatagagggcgggcgggcggtcggtacggggtttgcgttgcgtttagagcgtagcgttttatcgcggcgatataatttaggcggcgacgttgtagtttttttcggtatcggtttttattcgtcgtttagttcgcgtcgattttttggagggcgcgtgacgttacgtaagggcgtcgcgtacgtgcgtacgtgcgcgtgtaaatacgagcgtcgcgcggggtcggagtcggtttcgttttgggattaattttgcgtgtcggtcgtgaagaattgcgtttttgagttttatttattttttttcggagcgtcggtatcgtggagtagcggtatgtaacgcgggtcgttgtcgtttagttttagtgacggttttggcgcgttcggaattacgtatttcggcgtgtatcgcggatagagtatggcgggattacgagttttagcgtttaacgtaggtttgcgtgttattattttattacgcgttgagatttagtatttcgagattacgagtttcggtatgtatcgcgagtcgtttttttttatttttatcgcgtattgtgagtcgtaacgtcgcgggattacgggtttcggtatgttttgcgcgtcgcgggtttagagacgtgaggttgtcggcgttttggtggtttcgtttcgtgttttttttcggattttacgtcgcgggagtttgggggttgcggtttttttttttttcgattttattttcgatgcggaagcgtaggggtaggtgcgtcgttttcggttcgcgtaggcggtgggttcgtttggggtaaggcgttcggaagcgtttggttggtttagaaaatcggatcgtagcgggagggcgggtatcggcgcgtggttttagtggttttaggcgaattttgatgagtagtagtcgtaagtggtttatta

SEQ ID NO: 28120 - DNA, 1452 bp, Artificial Sequence
  chemically treated genomic DNA (Homo sapiens) CpG-island No: 28120
taataaaccacttacgactactactcatcaaaattcgcctaaaaccactaaaaccacgcgccgatacccgccctcccgctacgatccgattttctaaaccaaccaaacgcttccgaacgccttaccccaaacgaacccaccgcctacgcgaaccgaaaacgacgcacctacccctacgcttccgcatcgaaaataaaatcgaaaaaaaaaaaaaccgcaacccccaaactcccgcgacgtaaaatccgaaaaaaaacacgaaacgaaaccaccaaaacgccgacaacctcacgtctctaaacccgcgacgcgcaaaacataccgaaacccgtaatcccgcgacgttacgactcacaatacgcgataaaaataaaaaaaaacgactcgcgatacataccgaaactcgtaatctcgaaatactaaatctcaacgcgtaataaaataataacacgcaaacctacgttaaacgctaaaactcgtaatcccgccatactctatccgcgatacacgccgaaatacgtaattccgaacgcgccaaaaccgtcactaaaactaaacgacaacgacccgcgttacataccgctactccacgataccgacgctccgaaaaaaaataaataaaactcaaaaacgcaattcttcacgaccgacacgcaaaattaatcccaaaacgaaaccgactccgaccccgcgcgacgctcgtatttacacgcgcacgtacgcacgtacgcgacgcccttacgtaacgtcacgcgccctccaaaaaatcgacgcgaactaaacgacgaataaaaaccgataccgaaaaaaactacaacgtcgccgcctaaattatatcgccgcgataaaacgctacgctctaaacgcaacgcaaaccccgtaccgaccgcccgcccgccctctatccgcgataaaaataccgaccgcgaatcgcgttcctaccgaaaacgccccgacgacgactataaccgaaatacgctacccgaaacccgcgcccgctacgcctactaaaataaaaaataacgacgaacgcgaccgtacgcatcgactcgatactaaccgtattcgaaaccgccgcctccgcgcaatcctccgaaacctctcaatcccgtataacctccgaaaactacgtacgccccgcgcgaccgaaacgcaaactaaaatcgaaacgcgcgaacgtaatacgaaaactatacgcgcaaccgaaccaaataatcgccccaaaataaatatactaaaccgaacgaaaccgaaaacgaacgactccgaaaaaaaatcctaaaaaacccccgaactactacgtccgcgataaacaaaaacgcccctaataaaaaaacgataaaacgaaacgcaaacactacgcttctcccctaaaactaaataatcaccacctataattttaccaacgaaaaacattttaaaataaaaaaaaaaaatcctacgtaacgacac

SEQ ID NO: 28121 - DNA, 1259 bp, Artificial Sequence
  chemically treated genomic DNA (Homo sapiens) CpG-island No: 28121
tttgaagagatcgtagagttagaatacgtatgggagggacgtacggatagaacgcgtatgggagggacgtagggttagaacgcgtacgggagggacgcggggatagaacgcgtacgggagggacgtagggatagaacgcgtacgggagggacgcgggtatagaacgcgtacgggagggacgcggggttagaacgcgtacgggagggacgcggggatagaattcgtacgggagggacgcggggatagaacgcgtacgggagggacgcggggatagaacgcgtacgggagggacgcggggatagaacgcgtacgggagggacgcggggatagaacgcgtacgggagggacgcgggtatagaacgcgtacgggagggacgcgggtatagaacgcgtacgggagggacgcgggtatagaacgcgtacgggagggacgcgggtatagaacgcgtacgggagggacgcgggtatagaacgcgtacgggagggacgcgggtatagaacgcgtacgggagggacgcggggttagaacgcgtacgggagggacgcggggatagaattcgtacgggagggacgcggggatagaacgcgtacgggagggacgcggggatagaacgcgtacgggagggacgcggggatagaacgcgtattgtatggacgcggggatagaacgcgtacgggagggacgcgggtatagaacgcgtacgggagggacgcgggtatagaacgcgtacgggagggacgcgggtatagaacgcgtacgggagggacgcgggtatagaacgcgtacgggagggacgcgggtatagaacgtttacgggagggacgcgggtatagaacgcgtacgggagggacgcggggatagaacgcgtacggtagggacgcggggatagaattcgtacgggagggattcgggtatagaacgcgtacgggagggacgcggggatagaacgtttacgtgagggacgcgggtttagaacgcgtacggtagggacgcgggtatagaacgcgtacggtagggacgcgggtatagaacgtttattggagggacgcgggtatataacgtttacgggagggacgcgggtatagaacgcgtacgggagggacgtagggatagaacgcgtacgggagggacgtagggatagaacgcgtacgggagggacgtagggatagaacgcgtatgggagggacgtataatttagttaaatacgtatgtgtgttgattatttattttttttataaaaattatttatgttatagtt

SEQ ID NO: 28122 - DNA, 1259 bp, Artificial Sequence
  chemically treated genomic DNA (Homo sapiens) CpG-island No: 28122
aactataacataaataatttttataaaaaaaataaataatcaacacacatacgtatttaactaaattatacgtccctcccatacgcgttctatccctacgtccctcccgtacgcgttctatccctacgtccctcccgtacgcgttctatccctacgtccctcccgtacgcgttctatacccgcgtccctcccgtaaacgttatatacccgcgtccctccaataaacgttctatacccgcgtccctaccgtacgcgttctatacccgcgtccctaccgtacgcgttctaaacccgcgtccctcacgtaaacgttctatccccgcgtccctcccgtacgcgttctatacccgaatccctcccgtacgaattctatccccgcgtccctaccgtacgcgttctatccccgcgtccctcccgtacgcgttctatacccgcgtccctcccgtaaacgttctatacccgcgtccctcccgtacgcgttctatacccgcgtccctcccgtacgcgttctatacccgcgtccctcccgtacgcgttctatacccgcgtccctcccgtacgcgttctatacccgcgtccctcccgtacgcgttctatccccgcgtccatacaatacgcgttctatccccgcgtccctcccgtacgcgttctatccccgcgtccctcccgtacgcgttctatccccgcgtccctcccgtacgaattctatccccgcgtccctcccgtacgcgttctaaccccgcgtccctcccgtacgcgttctatacccgcgtccctcccgtacgcgttctatacccgcgtccctcccgtacgcgttctatacccgcgtccctcccgtacgcgttctatacccgcgtccctcccgtacgcgttctatacccgcgtccctcccgtacgcgttctatacccgcgtccctcccgtacgcgttctatccccgcgtccctcccgtacgcgttctatccccgcgtccctcccgtacgcgttctatccccgcgtccctcccgtacgcgttctatccccgcgtccctcccgtacgaattctatccccgcgtccctcccgtacgcgttctaaccccgcgtccctcccgtacgcgttctatacccgcgtccctcccgtacgcgttctatccctacgtccctcccgtacgcgttctatccccgcgtccctcccgtacgcgttctaaccctacgtccctcccatacgcgttctatccgtacgtccctcccatacgtattctaactctacgatctcttcaaa

SEQ ID NO: 28123 - DNA, 1259 bp, Artificial Sequence
  chemically treated genomic DNA (Homo sapiens) CpG-island No: 28123
gattgtggtatggataatttttgtggggaagatgagtggttagtatatatacgtgtttgattggattgtgcgttttttttatgcgcgttttgtttttgcgtttttttcgtgcgcgttttgtttttgcgtttttttcgtgcgcgttttgtttttgcgtttttttcgtgcgcgttttgtgttcgcgtttttttcgtgagcgttatgtgttcgcgtttttttagtgagcgttttgtgttcgcgtttttatcgtgcgcgttttgtgttcgcgtttttatcgtgcgcgttttgagttcgcgttttttacgtgagcgttttgttttcgcgtttttttcgtgcgcgttttgtgttcgagtttttttcgtgcgggttttgttttcgcgtttttatcgtgcgcgttttgttttcgcgtttttttcgtgcgcgttttgtgttcgcgtttttttcgtgagcgttttgtgttcgcgtttttttcgtgcgcgttttgtgttcgcgtttttttcgtgcgcgttttgtgttcgcgtttttttcgtgcgcgttttgtgttcgcgtttttttcgtgcgcgttttgtgttcgcgtttttttcgtgcgcgttttgttttcgcgtttatatagtgcgcgttttgttttcgcgtttttttcgtgcgcgttttgttttcgcgtttttttcgtgcgcgttttgttttcgcgtttttttcgtgcgggttttgttttcgcgtttttttcgtgcgcgttttgatttcgcgtttttttcgtgcgcgttttgtgttcgcgtttttttcgtgcgcgttttgtgttcgcgtttttttcgtgcgcgttttgtgttcgcgtttttttcgtgcgcgttttgtgttcgcgtttttttcgtgcgcgttttgtgttcgcgtttttttcgtgcgcgttttgtgttcgcgtttttttcgtgcgcgttttgttttcgcgtttttttcgtgcgcgttttgttttcgcgtttttttcgtgcgcgttttgttttcgcgtttttttcgtgcgcgttttgttttcgcgtttttttcgtgcgggttttgttttcgcgtttttttcgtgcgcgttttgatttcgcgtttttttcgtgcgcgttttgtgttcgcgtttttttcgtgcgcgttttgtttttgcgtttttttcgtgcgcgttttgttttcgcgtttttttcgtgcgcgttttgattttgcgttttttttatgcgcgttttgttcgtgcgttttttttatgcgtgttttgattttgcggtttttttagg

SEQ ID NO: 28124 - DNA, 1259 bp, Artificial Sequence
  chemically treated genomic DNA (Homo sapiens) CpG-island No: 28124
cctaaaaaaaccgcaaaatcaaaacacgcataaaaaaaacgcacgaacaaaacgcgcataaaaaaaacgcaaaatcaaaacgcgcacgaaaaaaacgcgaaaacaaaacgcgcacgaaaaaaacgcaaaaacaaaacgcgcacgaaaaaaacgcgaacacaaaacgcgcacgaaaaaaacgcgaaatcaaaacgcgcacgaaaaaaacgcgaaaacaaaacccgcacgaaaaaaacgcgaaaacaaaacgcgcacgaaaaaaacgcgaaaacaaaacgcgcacgaaaaaaacgcgaaaacaaaacgcgcacgaaaaaaacgcgaaaacaaaacgcgcacgaaaaaaacgcgaacacaaaacgcgcacgaaaaaaacgcgaacacaaaacgcgcacgaaaaaaacgcgaacacaaaacgcgcacgaaaaaaacgcgaacacaaaacgcgcacgaaaaaaacgcgaacacaaaacgcgcacgaaaaaaacgcgaacacaaaacgcgcacgaaaaaaacgcgaaatcaaaacgcgcacgaaaaaaacgcgaaaacaaaacccgcacgaaaaaaacgcgaaaacaaaacgcgcacgaaaaaaacgcgaaaacaaaacgcgcacgaaaaaaacgcgaaaacaaaacgcgcactatataaacgcgaaaacaaaacgcgcacgaaaaaaacgcgaacacaaaacgcgcacgaaaaaaacgcgaacacaaaacgcgcacgaaaaaaacgcgaacacaaaacgcgcacgaaaaaaacgcgaacacaaaacgcgcacgaaaaaaacgcgaacacaaaacgctcacgaaaaaaacgcgaacacaaaacgcgcacgaaaaaaacgcgaaaacaaaacgcgcacgataaaaacgcgaaaacaaaacccgcacgaaaaaaactcgaacacaaaacgcgcacgaaaaaaacgcgaaaacaaaacgctcacgtaaaaaacgcgaactcaaaacgcgcacgataaaaacgcgaacacaaaacgcgcacgataaaaacgcgaacacaaaacgctcactaaaaaaacgcgaacacataacgctcacgaaaaaaacgcgaacacaaaacgcgcacgaaaaaaacgcaaaaacaaaacgcgcacgaaaaaaacgcaaaaacaaaacgcgcacgaaaaaaacgcaaaaacaaaacgcgcataaaaaaaacgcacaatccaatcaaacacgtatatatactaaccactcatcttccccacaaaaattatccataccacaatc

SEQ ID NO: 28125 - DNA, 548 bp, Artificial Sequence
  chemically treated genomic DNA (Homo sapiens) CpG-island No: 28125
gcgattcgtaaacggtaggcgtggtgtaggtagggagtaagcgtcgagttttattcgtttcggtcgtgggtatgagagttttattcgtttcggtcgtgggtatgagagttttattcgtttcggtcgtgggtatgagagttttattcgtttcggtcgtgggtatgagagttttattcgtttcggtcgtgggtatgagagttttattcgtttcggtcgtgggtatgagagttttattcgtttcggtcgtgggtatgagagttttattcgtttcggtcgtgggtatgagagttttattcgtttcggtcgtgggtatgagagttttattcgtttcggtcgtgggtatgagagttttattcgtttcggtcgtgggtatgagagttttattcgtttcggtcgtgggtatgagagttttattcgtttcggtcgtgggtatgagagttttattcgtttcggtcgtgggtatgagagttttattcgttttggcggcgggtatgaaggttgcgtagtagaatttgaatagatttttaggatattttatttttttgatt

SEQ ID NO: 28126 - DNA, 548 bp, Artificial Sequence
  chemically treated genomic DNA (Homo sapiens) CpG-island No: 28126
aatcaaaaaaataaaatatcctaaaaatctattcaaattctactacgcaaccttcatacccgccgccaaaacgaataaaactctcatacccacgaccgaaacgaataaaactctcatacccacgaccgaaacgaataaaactctcatacccacgaccgaaacgaataaaactctcatacccacgaccgaaacgaataaaactctcatacccacgaccgaaacgaataaaactctcatacccacgaccgaaacgaataaaactctcatacccacgaccgaaacgaataaaactctcatacccacgaccgaaacgaataaaactctcatacccacgaccgaaacgaataaaactctcatacccacgaccgaaacgaataaaactctcatacccacgaccgaaacgaataaaactctcatacccacgaccgaaacgaataaaactctcatacccacgaccgaaacgaataaaactctcatacccacgaccgaaacgaataaaactcgacgcttactccctacctacaccacgcctaccgtttacgaatcgc

SEQ ID NO: 28127 - DNA, 548 bp, Artificial Sequence
  chemically treated genomic DNA (Homo sapiens) CpG-island No: 28127
gattaggagaataaagtgttttgggagtttgtttaggttttgttgcgtagtttttatattcgtcgttaggacgggtgggatttttatatttacggtcgggacgggtgggatttttatatttacggtcgggacgggtgggatttttatatttacggtcgggacgggtgggatttttatatttacggtcgggacgggtgggatttttatatttacggtcgggacgggtgggatttttatatttacggtcgggacgggtgggatttttatatttacggtcgggacgggtgggatttttatatttacggtcgggacgggtgggatttttatatttacggtcgggacgggtgggatttttatatttacggtcgggacgggtgggatttttatatttacggtcgggacgggtgggatttttatatttacggtcgggacgggtgggatttttatatttacggtcgggacgggtgggatttttatatttacggtcgggacgggtgggattcggcgtttgttttttgtttgtattacgtttgtcgtttgcggatcgt

SEQ ID NO: 28128 - DNA, 548 bp, Artificial Sequence
  chemically treated genomic DNA (Homo sapiens) CpG-island No: 28128
acgatccgcaaacgacaaacgtaatacaaacaaaaaacaaacgccgaatcccacccgtcccgaccgtaaatataaaaatcccacccgtcccgaccgtaaatataaaaatcccacccgtcccgaccgtaaatataaaaatcccacccgtcccgaccgtaaatataaaaatcccacccgtcccgaccgtaaatataaaaatcccacccgtcccgaccgtaaatataaaaatcccacccgtcccgaccgtaaatataaaaatcccacccgtcccgaccgtaaatataaaaatcccacccgtcccgaccgtaaatataaaaatcccacccgtcccgaccgtaaatataaaaatcccacccgtcccgaccgtaaatataaaaatcccacccgtcccgaccgtaaatataaaaatcccacccgtcccgaccgtaaatataaaaatcccacccgtcccgaccgtaaatataaaaatcccacccgtcctaacgacgaatataaaaactacgcaacaaaacctaaacaaactcccaaaacactttattctcctaatc

SEQ ID NO: 28129 - DNA, 722 bp, Artificial Sequence
  chemically treated genomic DNA (Homo sapiens) CpG-island No: 28129
gggaggagacgtcggggttcgcgtcgcggggcgggcgttttttcggattcgggggaggcgggacgtaggcgaaggtcgtttcgggagagcggggtttcgggagagcggggtttcggttgtgggggacgcgggtcgaggttgtcgcgaagtcgttgacggtcgaggcgttttcggttttcgcggcgtataagggttgttcgagcgtttagagtaggggtcgttacgcgggcgttcggtttaattcgcggtttttcgggttttttttagcggggtcgtagacgttcgcgagtcgcgttttcggagcgtagaagattttcgcgtatagcgtaggtttcgtcggttcggtggattcgtttgaggacgcggagggggcgcgttttttttgcggcgttcgtacggtttttgttcgtttgtttcgcgttttcgttcggtaggtttagttcggacgaggtttagttgtcgttttcgttgtttttgtgggtttttttgcggaagtttttttttttcgggtggatgggattttgcgcgtggaatttcgtatagttttcgtttcgtcgcgggtcgtaggatttattttttttttacggtggcgttggggaggggttgtttttatttaggagattcgcgagggagagaaaatatgcggtttatattcggacggtagtttcgtttcgtttagaaataatatggttagtttgttaatgaaaggtgaaattaattta

SEQ ID NO: 28130 - DNA, 722 bp, Artificial Sequence
  chemically treated genomic DNA (Homo sapiens) CpG-island No: 28130
taaattaatttcacctttcattaacaaactaaccatattatttctaaacgaaacgaaactaccgtccgaatataaaccgcatattttctctccctcgcgaatctcctaaataaaaacaacccctccccaacgccaccgtaaaaaaaaaataaatcctacgacccgcgacgaaacgaaaactatacgaaattccacgcgcaaaatcccatccacccgaaaaaaaaaaacttccgcaaaaaaacccacaaaaacaacgaaaacgacaactaaacctcgtccgaactaaacctaccgaacgaaaacgcgaaacaaacgaacaaaaaccgtacgaacgccgcaaaaaaaacgcgccccctccgcgtcctcaaacgaatccaccgaaccgacgaaacctacgctatacgcgaaaatcttctacgctccgaaaacgcgactcgcgaacgtctacgaccccgctaaaaaaaacccgaaaaaccgcgaattaaaccgaacgcccgcgtaacgacccctactctaaacgctcgaacaacccttatacgccgcgaaaaccgaaaacgcctcgaccgtcaacgacttcgcgacaacctcgacccgcgtcccccacaaccgaaaccccgctctcccgaaaccccgctctcccgaaacgaccttcgcctacgtcccgcctcccccgaatccgaaaaaacgcccgccccgcgacgcgaaccccgacgtctcctccc

SEQ ID NO: 28131 - DNA, 722 bp, Artificial Sequence
  chemically treated genomic DNA (Homo sapiens) CpG-island No: 28131
tggattaattttattttttattagtaaattggttatattgtttttaagcggggcggggttgtcgttcggatgtgagtcgtatgttttttttttttcgcgaattttttgggtggaagtagtttttttttagcgttatcgtggagaaggaatgggttttgcggttcgcggcggagcgggggttgtgcggggttttacgcgtagggttttatttattcgaggaaaaggggttttcgtagaaaaatttataaaggtaacgggggcggtagttgagtttcgttcgagttgggtttgtcgggcgggagcgcgggataggcgggtagaggtcgtgcgggcgtcgtagaggaaacgcgtttttttcgcgtttttaagcgggtttatcgggtcggcggggtttgcgttgtgcgcggggattttttgcgtttcggggacgcggttcgcgggcgtttgcggtttcgttaggagggattcgggaggtcgcgggttggatcgggcgttcgcgtggcggtttttgttttgagcgttcgggtaatttttgtgcgtcgcgaaaatcgggagcgtttcggtcgttagcggtttcgcgatagtttcggttcgcgttttttatagtcgggatttcgttttttcgggatttcgttttttcggggcggttttcgtttgcgtttcgtttttttcgggttcggggaagcgttcgtttcgcggcgcggatttcggcgttttttttt

SEQ ID NO: 28132 - DNA, 722 bp, Artificial Sequence
  chemically treated genomic DNA (Homo sapiens) CpG-island No: 28132
aaaaaaaaacgccgaaatccgcgccgcgaaacgaacgcttccccgaacccgaaaaaaacgaaacgcaaacgaaaaccgccccgaaaaaacgaaatcccgaaaaaacgaaatcccgactataaaaaacgcgaaccgaaactatcgcgaaaccgctaacgaccgaaacgctcccgattttcgcgacgcacaaaaattacccgaacgctcaaaacaaaaaccgccacgcgaacgcccgatccaacccgcgacctcccgaatccctcctaacgaaaccgcaaacgcccgcgaaccgcgtccccgaaacgcaaaaaatccccgcgcacaacgcaaaccccgccgacccgataaacccgcttaaaaacgcgaaaaaaacgcgtttcctctacgacgcccgcacgacctctacccgcctatcccgcgctcccgcccgacaaacccaactcgaacgaaactcaactaccgcccccgttacctttataaatttttctacgaaaaccccttttcctcgaataaataaaaccctacgcgtaaaaccccgcacaacccccgctccgccgcgaaccgcaaaacccattccttctccacgataacgctaaaaaaaaactacttccacccaaaaaattcgcgaaaaaaaaaaaacatacgactcacatccgaacgacaaccccgccccgcttaaaaacaatataaccaatttactaataaaaaataaaattaatcca

SEQ ID NO: 28133 - DNA, 729 bp, Artificial Sequence
  chemically treated genomic DNA (Homo sapiens) CpG-island No: 28133
gggagtcgaggggggtcgttgggtcgggagcgtttttcggtttggtcgcgtcgcgcgcgtggatggaggtttcgttcgcggatcgtttcgtttattcgcgttggttttgcgggagttcgggtgagcgaaaggcgaggaaggggcgcgggtttcgggaaaaatcgattttttcggcgttcgttttcggttcggttgggggcgtattcggttcgcgcggagagcgggcggggtgtgggcgaatgttcggcgcgttgcgtttttttcggtttttttttttttcggagatgaacgttttattttcgttcggatatacggtcgtatttttattttgtttttttcgattagtcggggcgcggttcgaattgggggagagaagatttagttttcgtagtcgcgaattttgtaaattcggagtttatgcgtttcgtttttcggttcggggagtttttagttttgttcgtcgagcgtagttcgggttcggattgtggttattggggacgagaagggttttttttgcggggttttcgggttcggatggacggagggggcgttcggtaggtgaattgggttcgtttcgcgtttcgaacgtttttttaaatttataagtttcggagattttggggtattttgcgatttcggagtgatcggtggagttttcgttcgcgcgtttggttttcggggtttttttatatagtaggggttgcggggattttttttgttatttttttt

SEQ ID NO: 28134 - DNA, 729 bp, Artificial Sequence
  chemically treated genomic DNA (Homo sapiens) CpG-island No: 28134
aaaaaaaataacaaaaaaaatccccgcaacccctactatataaaaaaaccccgaaaaccaaacgcgcgaacgaaaactccaccgatcactccgaaatcgcaaaataccccaaaatctccgaaacttataaatttaaaaaaacgttcgaaacgcgaaacgaacccaattcacctaccgaacgccccctccgtccatccgaacccgaaaaccccgcaaaaaaaacccttctcgtccccaataaccacaatccgaacccgaactacgctcgacgaacaaaactaaaaactccccgaaccgaaaaacgaaacgcataaactccgaatttacaaaattcgcgactacgaaaactaaatcttctctcccccaattcgaaccgcgccccgactaatcgaaaaaaacaaaataaaaatacgaccgtatatccgaacgaaaataaaacgttcatctccgaaaaaaaaaaaaaccgaaaaaaacgcaacgcgccgaacattcgcccacaccccgcccgctctccgcgcgaaccgaatacgcccccaaccgaaccgaaaacgaacgccgaaaaaatcgatttttcccgaaacccgcgccccttcctcgcctttcgctcacccgaactcccgcaaaaccaacgcgaataaacgaaacgatccgcgaacgaaacctccatccacgcgcgcgacgcgaccaaaccgaaaaacgctcccgacccaacgacccccctcgactccc

SEQ ID NO: 28135 - DNA, 729 bp, Artificial Sequence
  chemically treated genomic DNA (Homo sapiens) CpG-island No: 28135
ggaggaggtgatagagggggttttcgtagtttttgttgtgtggggagatttcgggagttaggcgcgcgggcgggggttttatcggttatttcgaaatcgtagaatgttttagggttttcgggatttgtgggtttaggggaacgttcgggacgcggagcgggtttagtttatttgtcggacgtttttttcgtttattcgaattcgggagtttcgtaggagggatttttttcgtttttagtgattatagttcggattcgggttgcgttcggcgggtaaggttgggagtttttcgggtcggaggacggggcgtatgggtttcgggtttgtagaattcgcggttgcgggagttgggtttttttttttttaattcgggtcgcgtttcggttggtcggaggaggtagagtaggggtgcggtcgtgtgttcgagcgggagtggggcgtttattttcggggagaagggggatcgggaaaggcgtagcgcgtcgagtattcgtttatatttcgttcgtttttcgcgcgagtcgggtgcgtttttaatcgaatcgggggcgggcgtcgggagagtcggtttttttcgagattcgcgtttttttttcgtttttcgtttattcgggttttcgtaggattagcgcgaatagacggggcgattcgcgggcgagatttttatttacgcgcgcggcgcggttagatcggggagcgttttcggtttaacggtttttttcgattttt

SEQ ID NO: 28136 - DNA, 729 bp, Artificial Sequence
  chemically treated genomic DNA (Homo sapiens) CpG-island No: 28136
aaaaatcgaaaaaaaccgttaaaccgaaaacgctccccgatctaaccgcgccgcgcgcgtaaataaaaatctcgcccgcgaatcgccccgtctattcgcgctaatcctacgaaaacccgaataaacgaaaaacgaaaaaaaaacgcgaatctcgaaaaaaaccgactctcccgacgcccgcccccgattcgattaaaaacgcacccgactcgcgcgaaaaacgaacgaaatataaacgaatactcgacgcgctacgcctttcccgatcccccttctccccgaaaataaacgccccactcccgctcgaacacacgaccgcacccctactctacctcctccgaccaaccgaaacgcgacccgaattaaaaaaaaaaaaacccaactcccgcaaccgcgaattctacaaacccgaaacccatacgccccgtcctccgacccgaaaaactcccaaccttacccgccgaacgcaacccgaatccgaactataatcactaaaaacgaaaaaaatccctcctacgaaactcccgaattcgaataaacgaaaaaaacgtccgacaaataaactaaacccgctccgcgtcccgaacgttcccctaaacccacaaatcccgaaaaccctaaaacattctacgatttcgaaataaccgataaaacccccgcccgcgcgcctaactcccgaaatctccccacacaacaaaaactacgaaaaccccctctatcacctcctcc

SEQ ID NO: 28137 - DNA, 846 bp, Artificial Sequence
  chemically treated genomic DNA (Homo sapiens) CpG-island No: 28137
ttagtttcgagagttagggcgcgcggcggaggcgaggtcggggcggttttcgttttttcggtcgttttttttcgcgtcgtttcggttttttttttcggttttcggcgggtatttggcggcggcgggtagggggcggcgttgcgcgcgttacgcggttgggtgggatagcgggtaggtgatattcggcggtttttttttttttttaatttagtcggcggtcgggatagtaggggtcgttgtgaggagtttcgcgttcgcgttgttagtcgtcgttttttttttcgcgcgcgttcggcgtttcggtttcgttttttgtgcggtgagtgcggggttttaggtcggcgggtaggggttaaattttttcggcgcgcggaggagaagagattggggagggaggtagagtcgaggggaacggcgtcgggagtggtcggatggaggaatttgggcgcggcgcgcgagaagtgggattcgggtgcgggggtttcgggagcggggttaggttttttttgggttcgggaggcgtttgggaagttttgttttcgttgtttgcgcgtggggaggatcgaggtttttttcgtcggagcgcggggtcgcggcgtttatttgcgttttttcgggagtttttattcggtagtatttcgaagggaaggtcgggttcggtgggcgcgttgcggagcggagtttggattggggtttcgcgcggcgttggttttgcggagcggagcgggaggggtagaggtgttcgtcggcgggattgggagggagaaggatttgttcgattttggacgcggaggttatttttttagtttcggggtttggtttcgttagttatttttttaaatttcg

SEQ ID NO: 28138 - DNA, 846 bp, Artificial Sequence
  chemically treated genomic DNA (Homo sapiens) CpG-island No: 28138
cgaaatttaaaaaaataactaacgaaaccaaaccccgaaactaaaaaaataacctccgcgtccaaaatcgaacaaatccttctccctcccaatcccgccgacgaacacctctacccctcccgctccgctccgcaaaaccaacgccgcgcgaaaccccaatccaaactccgctccgcaacgcgcccaccgaacccgaccttcccttcgaaatactaccgaataaaaactcccgaaaaaacgcaaataaacgccgcgaccccgcgctccgacgaaaaaaacctcgatcctccccacgcgcaaacaacgaaaacaaaacttcccaaacgcctcccgaacccaaaaaaaacctaaccccgctcccgaaacccccgcacccgaatcccacttctcgcgcgccgcgcccaaattcctccatccgaccactcccgacgccgttcccctcgactctacctccctccccaatctcttctcctccgcgcgccgaaaaaatttaacccctacccgccgacctaaaaccccgcactcaccgcacaaaaaacgaaaccgaaacgccgaacgcgcgcgaaaaaaaaaacgacgactaacaacgcgaacgcgaaactcctcacaacgacccctactatcccgaccgccgactaaattaaaaaaaaaaaaaaaccgccgaatatcacctacccgctatcccacccaaccgcgtaacgcgcgcaacgccgccccctacccgccgccgccaaatacccgccgaaaaccgaaaaaaaaaaccgaaacgacgcgaaaaaaaacgaccgaaaaaacgaaaaccgccccgacctcgcctccgccgcgcgccctaactctcgaaactaa

SEQ ID NO: 28139 - DNA, 846 bp, Artificial Sequence
  chemically treated genomic DNA (Homo sapiens) CpG-island No: 28139
cggaatttgggggggtggttagcgaggttagatttcggagttgggaaaatgattttcgcgtttaaggtcgagtaggttttttttttttttagtttcgtcggcgagtatttttgtttttttcgtttcgtttcgtagggttagcgtcgcgcgggattttagtttaggtttcgtttcgtagcgcgtttatcgggttcgatttttttttcgggatgttgtcgggtgggggttttcgagaaggcgtaggtgagcgtcgcggtttcgcgtttcggcgaaaagggtttcggttttttttacgcgtaggtagcggggatagaattttttaagcgtttttcgagtttagggagggtttggtttcgttttcggggttttcgtattcgggttttatttttcgcgcgtcgcgtttaagtttttttattcggttattttcgacgtcgtttttttcggttttgtttttttttttagttttttttttttcgcgcgtcgggaaagtttggtttttgttcgtcggtttggaatttcgtatttatcgtatagggagcggagtcgaagcgtcgggcgcgcgcgggagagagggcggcgattggtagcgcgagcgcggagttttttatagcggtttttgttgtttcggtcgtcgattgggttggaaaggggaggaggtcgtcgggtgttatttgttcgttattttatttagtcgcgtgacgcgcgtagcgtcgttttttgttcgtcgtcgttaggtgttcgtcgagggtcggagggaggagtcggggcggcgcgagggggagcggtcgggagggcggaggtcgtttcggtttcgttttcgtcgcgcgttttgattttcgggattgg

SEQ ID NO: 28140 - DNA, 846 bp, Artificial Sequence
  chemically treated genomic DNA (Homo sapiens) CpG-island No: 28140
ccaatcccgaaaatcaaaacgcgcgacgaaaacgaaaccgaaacgacctccgccctcccgaccgctccccctcgcgccgccccgactcctccctccgaccctcgacgaacacctaacgacgacgaacaaaaaacgacgctacgcgcgtcacgcgactaaataaaataacgaacaaataacacccgacgacctcctcccctttccaacccaatcgacgaccgaaacaacaaaaaccgctataaaaaactccgcgctcgcgctaccaatcgccgccctctctcccgcgcgcgcccgacgcttcgactccgctccctatacgataaatacgaaattccaaaccgacgaacaaaaaccaaactttcccgacgcgcgaaaaaaaaaaaactaaaaaaaaaaacaaaaccgaaaaaaacgacgtcgaaaataaccgaataaaaaaacttaaacgcgacgcgcgaaaaataaaacccgaatacgaaaaccccgaaaacgaaaccaaaccctccctaaactcgaaaaacgcttaaaaaattctatccccgctacctacgcgtaaaaaaaaccgaaacccttttcgccgaaacgcgaaaccgcgacgctcacctacgccttctcgaaaacccccacccgacaacatcccgaaaaaaaaatcgaacccgataaacgcgctacgaaacgaaacctaaactaaaatcccgcgcgacgctaaccctacgaaacgaaacgaaaaaaacaaaaatactcgccgacgaaactaaaaaaaaaaaaaacctactcgaccttaaacgcgaaaatcattttcccaactccgaaatctaacctcgctaaccacccccccaaattccg

SEQ ID NO: 28141 - DNA, 1248 bp, Artificial Sequence
  chemically treated genomic DNA (Homo sapiens) CpG-island No: 28141
cggcgggggtaaaaagttcgagtagtaaaaagtttcggtagcgggggtagaaaatcgcggcggcggggagtaaaaagtcgcggcggtgggcgcgaaaagtcgcgggggcgggggcgaaaagtcgcgggggcgggggcgaaaagtcgaaaaaagtagcggcggcggtggtaaaaagtagcggcggcggtggtaaaaagtttcggcggcgggggtagaaacgcgcggcggcgggggtaaaaagtagcggcggcggggagtaaaaagtcgcggcggcggtggttaaaagtcgttggggtaaaaagtagcgggagcgggggtaaaaaaaaaatataaaaagtcgcgacggcgggggttaaaagtcgcggcggtaaaaagttgtggtaacgggggtagaaagtcgcggcggcgggggaaaaagtaggggcgataaaaagtcgcgggggcggggcgtaaaaagtcgtagcggcggagataaaaagcggaggcggcgagaagtaaaaagtcgcgttggtaaaattcgcggcggcgggcgtaaaaagtatcggcggttaaaattcgcggcggggggagtaaaaatcgcggtggcgggggttaaaagtcgtaagaagtcgcggcggcgggggttaaaattcgcggcggaaaaagtcgcggggtgggggtggtaaaaagtcgcggcggcgggggtaaaaagttgtaaaaatttgcggcggtaacggtaaaaaatcgtggtttcgggggtaaaaagttatagcggtaaaaagcggcggaggcgggggtagaaagtcgcggcggcggggtaaaaagtaggggcggtaaaaagtttcggcggcggggattaaaagtcgcggcggtgggttaaaaagttatagcggtaaaaagttgtggcgacgggggtagatagttgcggcggtgggggtaaaaagttgtagtcgtaggggaaaaagtcgcggcggtaggggtaaaaagtaggggtagcgggggtaataagtcgcggcggtaaaaagttgcggcggtgggggtaaaaagtagcggcgatgggggtaaaagttagagcgacgggggtaataagttttggtagtaggggtaaatagcggcggcggtaaaaattcgtagcggtgggggtaaatagtcgcggcgggggtgataaaaagtcgcggtggcgggggtagaaagtagcggtggcgggggtaaaaagttataaaaatttgttgtggtcgggataaaatagtggaaatggggtgaaggtta

SEQ ID NO: 28142 - DNA, 1248 bp, Artificial Sequence
  chemically treated genomic DNA (Homo sapiens) CpG-island No: 28142
taaccttcaccccatttccactattttatcccgaccacaacaaatttttataactttttacccccgccaccgctactttctacccccgccaccgcgactttttatcacccccgccgcgactatttacccccaccgctacgaatttttaccgccgccgctatttacccctactaccaaaacttattacccccgtcgctctaacttttacccccatcgccgctactttttacccccaccgccgcaactttttaccgccgcgacttattacccccgctacccctactttttacccctaccgccgcgactttttcccctacgactacaactttttacccccaccgccgcaactatctacccccgtcgccacaactttttaccgctataactttttaacccaccgccgcgacttttaatccccgccgccgaaactttttaccgcccctactttttaccccgccgccgcgactttctacccccgcctccgccgctttttaccgctataactttttacccccgaaaccacgattttttaccgttaccgccgcaaatttttacaactttttacccccgccgccgcgactttttaccacccccaccccgcgactttttccgccgcgaattttaacccccgccgccgcgacttcttacgacttttaacccccgccaccgcgatttttactccccccgccgcgaattttaaccgccgatactttttacgcccgccgccgcgaattttaccaacgcgactttttacttctcgccgcctccgctttttatctccgccgctacgactttttacgccccgcccccgcgactttttatcgcccctactttttcccccgccgccgcgactttctacccccgttaccacaactttttaccgccgcgacttttaacccccgccgtcgcgactttttatattttttttttacccccgctcccgctactttttaccccaacgacttttaaccaccgccgccgcgactttttactccccgccgccgctactttttacccccgccgccgcgcgtttctacccccgccgccgaaactttttaccaccgccgccgctactttttaccaccgccgccgctacttttttcgacttttcgcccccgcccccgcgacttttcgcccccgcccccgcgacttttcgcgcccaccgccgcgactttttactccccgccgccgcgattttctacccccgctaccgaaactttttactactcgaactttttacccccgccg

SEQ ID NO: 28143 - DNA, 1248 bp, Artificial Sequence
  chemically treated genomic DNA (Homo sapiens) CpG-island No: 28143
tggtttttattttatttttattgttttgtttcggttatagtaggtttttgtggttttttgttttcgttatcgttgttttttgttttcgttatcgcggttttttgttattttcgtcgcggttgtttgtttttatcgttgcggatttttgtcgtcgtcgttgtttgtttttgttgttagggtttgttgttttcgtcgttttggtttttatttttatcgtcgttgttttttgtttttatcgtcgtagttttttgtcgtcgcggtttgttgttttcgttgtttttgttttttgtttttgtcgtcgcggtttttttttttgcggttgtagttttttgtttttatcgtcgtagttatttgttttcgtcgttatagttttttgtcgttgtggttttttgatttatcgtcgcggtttttggttttcgtcgtcgaggttttttgtcgtttttgttttttgtttcgtcgtcgcggttttttgttttcgttttcgtcgttttttgtcgttatggttttttattttcgaagttacggttttttgtcgttgtcgtcgtagatttttgtaattttttgttttcgtcgtcgcggttttttgttatttttatttcgcgatttttttcgtcgcggattttggttttcgtcgtcgcggttttttgcggtttttggttttcgttatcgcggtttttgtttttttcgtcgcgggttttggtcgtcggtgttttttgcgttcgtcgtcgcgggttttgttaacgcggttttttgtttttcgtcgttttcgttttttgttttcgtcgttgcgattttttgcgtttcgttttcgcggttttttgtcgtttttgttttttttttcgtcgtcgcggttttttgttttcgttgttatagttttttgtcgtcgcggtttttggttttcgtcgtcgcggttttttgtgttttttttttgttttcgttttcgttgttttttgttttagcgatttttggttatcgtcgtcgcggttttttgtttttcgtcgtcgttgttttttgttttcgtcgtcgcgcgtttttgttttcgtcgtcgaggttttttgttatcgtcgtcgttgttttttgttatcgtcgtcgttgtttttttcggtttttcgttttcgttttcgcggtttttcgttttcgttttcgcggtttttcgcgtttatcgtcgcggttttttgtttttcgtcgtcgcggttttttgttttcgttgtcgaggttttttgttgttcgggttttttgttttcgtcg

SEQ ID NO: 28144 - DNA, 1248 bp, Artificial Sequence
  chemically treated genomic DNA (Homo sapiens) CpG-island No: 28144
cgacgaaaacaaaaaacccgaacaacaaaaaacctcgacaacgaaaacaaaaaaccgcgacgacgaaaaacaaaaaaccgcgacgataaacgcgaaaaaccgcgaaaacgaaaacgaaaaaccgcgaaaacgaaaacgaaaaaccgaaaaaaacaacgacgacgataacaaaaaacaacgacgacgataacaaaaaacctcgacgacgaaaacaaaaacgcgcgacgacgaaaacaaaaaacaacgacgacgaaaaacaaaaaaccgcgacgacgataaccaaaaatcgctaaaacaaaaaacaacgaaaacgaaaacaaaaaaaaaacacaaaaaaccgcgacgacgaaaaccaaaaaccgcgacgacaaaaaactataacaacgaaaacaaaaaaccgcgacgacgaaaaaaaaaacaaaaacgacaaaaaaccgcgaaaacgaaacgcaaaaaatcgcaacgacgaaaacaaaaaacgaaaacgacgaaaaacaaaaaaccgcgttaacaaaacccgcgacgacgaacgcaaaaaacaccgacgaccaaaacccgcgacgaaaaaaacaaaaaccgcgataacgaaaaccaaaaaccgcaaaaaaccgcgacgacgaaaaccaaaatccgcgacgaaaaaaatcgcgaaataaaaataacaaaaaaccgcgacgacgaaaacaaaaaattacaaaaatctacgacgacaacgacaaaaaaccgtaacttcgaaaataaaaaaccataacgacaaaaaacgacgaaaacgaaaacaaaaaaccgcgacgacgaaacaaaaaacaaaaacgacaaaaaacctcgacgacgaaaaccaaaaaccgcgacgataaatcaaaaaaccacaacgacaaaaaactataacgacgaaaacaaataactacgacgataaaaacaaaaaactacaaccgcaaaaaaaaaaaccgcgacgacaaaaacaaaaaacaaaaacaacgaaaacaacaaaccgcgacgacaaaaaactacgacgataaaaacaaaaaacaacgacgataaaaataaaaaccaaaacgacgaaaacaacaaaccctaacaacaaaaacaaacaacgacgacgacaaaaatccgcaacgataaaaacaaacaaccgcgacgaaaataacaaaaaaccgcgataacgaaaacaaaaaacaacgataacgaaaacaaaaaaccacaaaaacctactataaccgaaacaaaacaataaaaataaaataaaaacca

SEQ ID NO: 28145 - DNA, 866 bp, Artificial Sequence
  chemically treated genomic DNA (Homo sapiens) CpG-island No: 28145
ttgtattttcggatttatgcggttttttaggtttatcgttgttcggtttggttcggtgttttagttgggtttttggtttatcgttttatcgttttatcgtttttttttttcgtcgggtttagtcgtttaggtttgtcggagtgtgtgtagaaaagcgtcgggcgcgggagagttggggaaattttttatttattttgttcgttttcggggtagcggcggggtttgggttagtttgggggtgtcgtcgttggaagcgttggtttcgggtttcgggaaggcggcggcggggtcgggtagtagtaggacgaggtcgggttcgggtttcgcgcgcgggcgtagtttagggttagtcgttttaggcgtcgtttgcgtatcgttgtttgggtcgtggcgtgtaggggtcgtagtagcgttgggggcgaagtttcggggtcgcgtagtaggaagtcgaagtttgcgcggtcgcgggggtcgtagaagagcggttcgtaggcggggtcggatttcggcggttaggcgaacgggaagggtagcgtgaagttttcggtgagtacgcggatggcgaagtcgttttgtttgtttagcgcgcggtaggcgcgttcgatgtcgcggaaatgcgttttttagagttgcgcgttttcgtcgtagatgttcgggaaggcgggtttcgggggcgtcgcgggatttgcgggcggaggggatagtgaacgttcggtagggcggggagggtcgggagcggttcgcgtaggcgggagattaggaggtcgggcgcgaagagaggtggttagtttggaaggagtcgtcgaatgagttcgaaaggtagagttggggatggttagggttatttggtgatgaggcgaggtcgg

SEQ ID NO: 28146 - DNA, 866 bp, Artificial Sequence
  chemically treated genomic DNA (Homo sapiens) CpG-island No: 28146
ccgacctcgcctcatcaccaaataaccctaaccatccccaactctacctttcgaactcattcgacgactccttccaaactaaccacctctcttcgcgcccgacctcctaatctcccgcctacgcgaaccgctcccgaccctccccgccctaccgaacgttcactatcccctccgcccgcaaatcccgcgacgcccccgaaacccgccttcccgaacatctacgacgaaaacgcgcaactctaaaaaacgcatttccgcgacatcgaacgcgcctaccgcgcgctaaacaaacaaaacgacttcgccatccgcgtactcaccgaaaacttcacgctacccttcccgttcgcctaaccgccgaaatccgaccccgcctacgaaccgctcttctacgacccccgcgaccgcgcaaacttcgacttcctactacgcgaccccgaaacttcgcccccaacgctactacgacccctacacgccacgacccaaacaacgatacgcaaacgacgcctaaaacgactaaccctaaactacgcccgcgcgcgaaacccgaacccgacctcgtcctactactacccgaccccgccgccgccttcccgaaacccgaaaccaacgcttccaacgacgacacccccaaactaacccaaaccccgccgctaccccgaaaacgaacaaaataaataaaaaatttccccaactctcccgcgcccgacgcttttctacacacactccgacaaacctaaacgactaaacccgacgaaaaaaaaaaacgataaaacgataaaacgataaaccaaaaacccaactaaaacaccgaaccaaaccgaacaacgataaacctaaaaaaccgcataaatccgaaaatacaa

SEQ ID NO: 28147 - DNA, 866 bp, Artificial Sequence
  chemically treated genomic DNA (Homo sapiens) CpG-island No: 28147
tcggtttcgttttattattaggtggttttggttatttttagttttgtttttcgagtttattcggcggttttttttagattggttattttttttcgcgttcggttttttggtttttcgtttgcgcgggtcgttttcggtttttttcgttttgtcgggcgtttattgtttttttcgttcgtaggtttcgcggcgttttcggagttcgttttttcggatatttacggcggggacgcgtagttttgggaggcgtattttcgcggtatcgggcgcgtttatcgcgcgttgggtaagtaggacgatttcgttattcgcgtgtttatcgagaattttacgttgtttttttcgttcgtttggtcgtcggggttcgatttcgtttgcgggtcgtttttttacgattttcgcgatcgcgtagatttcgattttttgttgcgcggtttcggagtttcgtttttagcgttgttgcggtttttgtacgttacggtttaggtagcgatgcgtaagcggcgtttggagcggttggttttgagttgcgttcgcgcgcggggttcgggttcggtttcgttttgttgttgttcggtttcgtcgtcgttttttcggagttcgaggttagcgtttttagcgacggtatttttaggttggtttaggtttcgtcgttgtttcgagagcgaatagaataaataaagagtttttttagttttttcgcgttcggcgtttttttgtatatatttcgataggtttgggcggttgggttcggcggggaaggggggcggtgggacggtgggacggtggattaggaatttaattgggatatcgggttaggtcgggtagcggtgggtttgggaagtcgtatgggttcgaaggtgtag

SEQ ID NO: 28148 - DNA, 866 bp, Artificial Sequence
  chemically treated genomic DNA (Homo sapiens) CpG-island No: 28148
ctacaccttcgaacccatacgacttcccaaacccaccgctacccgacctaacccgatatcccaattaaattcctaatccaccgtcccaccgtcccaccgccccccttccccgccgaacccaaccgcccaaacctatcgaaatatatacaaaaaaacgccgaacgcgaaaaaactaaaaaaactctttatttattctattcgctctcgaaacaacgacgaaacctaaaccaacctaaaaataccgtcgctaaaaacgctaacctcgaactccgaaaaaacgacgacgaaaccgaacaacaacaaaacgaaaccgaacccgaaccccgcgcgcgaacgcaactcaaaaccaaccgctccaaacgccgcttacgcatcgctacctaaaccgtaacgtacaaaaaccgcaacaacgctaaaaacgaaactccgaaaccgcgcaacaaaaaatcgaaatctacgcgatcgcgaaaatcgtaaaaaaacgacccgcaaacgaaatcgaaccccgacgaccaaacgaacgaaaaaaacaacgtaaaattctcgataaacacgcgaataacgaaatcgtcctacttacccaacgcgcgataaacgcgcccgataccgcgaaaatacgcctcccaaaactacgcgtccccgccgtaaatatccgaaaaaacgaactccgaaaacgccgcgaaacctacgaacgaaaaaaacaataaacgcccgacaaaacgaaaaaaaccgaaaacgacccgcgcaaacgaaaaaccaaaaaaccgaacgcgaaaaaaaataaccaatctaaaaaaaaccgccgaataaactcgaaaaacaaaactaaaaataaccaaaaccacctaataataaaacgaaaccga

SEQ ID NO: 28149 - DNA, 1221 bp, Artificial Sequence
  chemically treated genomic DNA (Homo sapiens) CpG-island No: 28149
cgagcgttcggtttttttagcgttatgtgcgcggttcgtttaggtttttggtcgtcgtcgtcgcgggggtaggtcgcgagttagtcgcgagttatagaggtttggtgcgcgtttcgtttttgagtttgtagtcggggcggttttagttagtgagtcgggagtcgtttttttcgttttttttcgtattcggagggtagttggggcggggtagattttcgggtcgggcggtattcgggcgggcgaattcgttagttttcgcgggaggttcggcgagagaaggattcggtgagtagttacgttacgttttttagggaggtttcgtttcgtgttttcgggtcgttttttttcgtcgtttttacgttttcgcgggtagttattagttttggttgttcgcgtttttttaattcgggtaaagtttttcggtttcggcgtgttgcgttttcgcggttgttttgcgttaggtgagggttcgcggttttcggttgcggttttcggcgcgtggtggcgggttcggggcgtgcgtcgcggagaggacggggtcggcgggcggttggcgtttcgttcggtgcggggaggggcgttacgtcgggcgttgcgcggtttcggcgggcggcggtagcggcggttacggtcgtcgggttttcgggttgtttgtttttagttggagtcggtcggtgtttcggcggagagacgggtagtcgggttttttggtttcggggttatttcggttggggcggttggggtagagggacgatgtttattcgcgtttcgatgttcgtcgtttattttcgggaggattcgttcgcggtgattgttgagagggagtcgttgttggtcgcggcgaatcggtcggtcgagtagtcgttttcgttcgaatgtgagggtaaagaggcggcgagggaggagagggtcgcggtcgttattagcgttggggcgcggggagagtcgtcgtcggcgttggtgttgggacgtagcgtgttttaggcggttgttttcgtgaggtttttggcgttgtatttggcgtataaggcgcgtgggttcgggggttttttcggcggggagtcgttatcgttatcgtcgtcgtcgtcgtcgttgtcgtcgttgttgcgggattcgtcggtcgaggacgttcgggaagaggtggtagttggttttgcggaaaagcggtagtcgtcgttgttgtcgtttaagggaaatttttggattaaaaagtttttttag

SEQ ID NO: 28150 - DNA, 1221 bp, Artificial Sequence
  chemically treated genomic DNA (Homo sapiens) CpG-island No: 28150
ctaaaaaaactttttaatccaaaaatttcccttaaacgacaacaacgacgactaccgcttttccgcaaaaccaactaccacctcttcccgaacgtcctcgaccgacgaatcccgcaacaacgacgacaacgacgacgacgacgacgataacgataacgactccccgccgaaaaaacccccgaacccacgcgccttatacgccaaatacaacgccaaaaacctcacgaaaacaaccgcctaaaacacgctacgtcccaacaccaacgccgacgacgactctccccgcgccccaacgctaataacgaccgcgaccctctcctccctcgccgcctctttaccctcacattcgaacgaaaacgactactcgaccgaccgattcgccgcgaccaacaacgactccctctcaacaatcaccgcgaacgaatcctcccgaaaataaacgacgaacatcgaaacgcgaataaacatcgtccctctaccccaaccgccccaaccgaaataaccccgaaaccaaaaaacccgactacccgtctctccgccgaaacaccgaccgactccaactaaaaacaaacaacccgaaaacccgacgaccgtaaccgccgctaccgccgcccgccgaaaccgcgcaacgcccgacgtaacgcccctccccgcaccgaacgaaacgccaaccgcccgccgaccccgtcctctccgcgacgcacgccccgaacccgccaccacgcgccgaaaaccgcaaccgaaaaccgcgaaccctcacctaacgcaaaacaaccgcgaaaacgcaacacgccgaaaccgaaaaactttacccgaattaaaaaaacgcgaacaaccaaaactaataactacccgcgaaaacgtaaaaacgacgaaaaaaaacgacccgaaaacacgaaacgaaacctccctaaaaaacgtaacgtaactactcaccgaatccttctctcgccgaacctcccgcgaaaactaacgaattcgcccgcccgaataccgcccgacccgaaaatctaccccgccccaactaccctccgaatacgaaaaaaaacgaaaaaaacgactcccgactcactaactaaaaccgccccgactacaaactcaaaaacgaaacgcgcaccaaacctctataactcgcgactaactcgcgacctacccccgcgacgacgacgaccaaaaacctaaacgaaccgcgcacataacgctaaaaaaaccgaacgctcg

SEQ ID NO: 28151 - DNA, 1221 bp, Artificial Sequence
  chemically treated genomic DNA (Homo sapiens) CpG-island No: 28151
ttggggaggttttttggtttagggattttttttaggcggtagtagcggcggttgtcgttttttcgtagggttagttgttattttttttcgggcgttttcggtcggcggatttcgtagtaacggcggtaacggcgacggcggcggcggtggcggtggcggtttttcgtcgaaagggttttcgggtttacgcgttttgtgcgttaggtgtagcgttaggggttttacggggatagtcgtttggggtacgttgcgttttagtattagcgtcggcgacggtttttttcgcgttttagcgttagtggcggtcgcggtttttttttttttcgtcgtttttttgtttttatattcgggcgggggcggttgttcggtcggtcggttcgtcgcggttaatagcgatttttttttagtagttatcgcgggcggattttttcgagaatgggcggcgggtatcggggcgcgagtagatatcgtttttttgttttagtcgttttagtcggggtggtttcgaggttagggaattcgattgttcgttttttcgtcgggatatcggtcggttttaattggggatagataattcgagagttcggcggtcgtggtcgtcgttgtcgtcgttcgtcgaggtcgcgtagcgttcggcgtgacgttttttttcgtatcgaacggagcgttaatcgttcgtcggtttcgtttttttcgcgacgtacgtttcgagttcgttattacgcgtcgggagtcgtagtcgggagtcgcgagtttttatttggcgtagggtagtcgcggaggcgtagtacgtcgaggtcgaggagttttattcgagttggggaggcgcgagtagttaaagttggtaattgttcgcggaggcgtggagacggcgaagaggggcggttcgagagtacggggcggggtttttttgaggagcgtgacgtggttatttatcgggtttttttttcgtcgggtttttcgcgggagttgacggattcgttcgttcgggtgtcgttcggttcgagggtttgtttcgttttagttgtttttcgagtgcgagggaggacgaaggggacgattttcggtttattggttgaggtcgtttcgattgtaggtttaggggcggggcgcgtattaggtttttgtggttcgcggttggttcgcggtttgttttcgcggcgacggcggttaagggtttgggcgggtcgcgtatatggcgttgggaggatcgagcgttcg

SEQ ID NO: 28152 - DNA, 1221 bp, Artificial Sequence
  chemically treated genomic DNA (Homo sapiens) CpG-island No: 28152
cgaacgctcgatcctcccaacgccatatacgcgacccgcccaaacccttaaccgccgtcgccgcgaaaacaaaccgcgaaccaaccgcgaaccacaaaaacctaatacgcgccccgcccctaaacctacaatcgaaacgacctcaaccaataaaccgaaaatcgtccccttcgtcctccctcgcactcgaaaaacaactaaaacgaaacaaaccctcgaaccgaacgacacccgaacgaacgaatccgtcaactcccgcgaaaaacccgacgaaaaaaaaacccgataaataaccacgtcacgctcctcaaaaaaaccccgccccgtactctcgaaccgcccctcttcgccgtctccacgcctccgcgaacaattaccaactttaactactcgcgcctccccaactcgaataaaactcctcgacctcgacgtactacgcctccgcgactaccctacgccaaataaaaactcgcgactcccgactacgactcccgacgcgtaataacgaactcgaaacgtacgtcgcgaaaaaaacgaaaccgacgaacgattaacgctccgttcgatacgaaaaaaaacgtcacgccgaacgctacgcgacctcgacgaacgacgacaacgacgaccacgaccgccgaactctcgaattatctatccccaattaaaaccgaccgatatcccgacgaaaaaacgaacaatcgaattccctaacctcgaaaccaccccgactaaaacgactaaaacaaaaaaacgatatctactcgcgccccgatacccgccgcccattctcgaaaaaatccgcccgcgataactactaaaaaaaaatcgctattaaccgcgacgaaccgaccgaccgaacaaccgcccccgcccgaatataaaaacaaaaaaacgacgaaaaaaaaaaaaaccgcgaccgccactaacgctaaaacgcgaaaaaaaccgtcgccgacgctaatactaaaacgcaacgtaccccaaacgactatccccgtaaaacccctaacgctacacctaacgcacaaaacgcgtaaacccgaaaaccctttcgacgaaaaaccgccaccgccaccgccgccgccgtcgccgttaccgccgttactacgaaatccgccgaccgaaaacgcccgaaaaaaaataacaactaaccctacgaaaaaacgacaaccgccgctactaccgcctaaaaaaaatccctaaaccaaaaaacctccccaa

SEQ ID NO: 28153 - DNA, 625 bp, Artificial Sequence
  chemically treated genomic DNA (Homo sapiens) CpG-island No: 28153
ttttcgttgattgagtgacgagagcggttatattgtattttttttttagggtcgtgttttttcgttgatcgagtgacgagagcggttatattgtattttttttttagggtcgtgttttttcgttgattgagtgacgagagcggttatattgcgttttttttttagggtcgtgttttttcgttgattgagtgacgagagcggttatattgtattttttttttagggtcgtgttttttcgttgatcgagtgacgagagcggttatattgcgttttttttttagggtcgtgttttttcgttgatcgagtgataagagcggttatattgtattttttttttagggtcgtgttttttcgttgaatgagtgacgagagcggttatattgcgttttttttttagggttgtgttttttcgttgatcgagtgacgagagcggttatattgtattttttttttagggtcgtgttttttcgttgaatgagtgatgagagcggttatattgcgttttttttttagggtcgtgttttttcgttgattgagtgacgagagcggttatattgtattttttttttagggtcgtgttttttcgttgattgagtgatgagagcggttattttgtgtttttttt

SEQ ID NO: 28154 - DNA, 625 bp, Artificial Sequence
  chemically treated genomic DNA (Homo sapiens) CpG-island No: 28154
aaaaaaaacacaaaataaccgctctcatcactcaatcaacgaaaaaacacgaccctaaaaaaaaaatacaatataaccgctctcgtcactcaatcaacgaaaaaacacgaccctaaaaaaaaaacgcaatataaccgctctcatcactcattcaacgaaaaaacacgaccctaaaaaaaaaatacaatataaccgctctcgtcactcgatcaacgaaaaaacacaaccctaaaaaaaaaacgcaatataaccgctctcgtcactcattcaacgaaaaaacacgaccctaaaaaaaaaatacaatataaccgctcttatcactcgatcaacgaaaaaacacgaccctaaaaaaaaaacgcaatataaccgctctcgtcactcgatcaacgaaaaaacacgaccctaaaaaaaaaatacaatataaccgctctcgtcactcaatcaacgaaaaaacacgaccctaaaaaaaaaacgcaatataaccgctctcgtcactcaatcaacgaaaaaacacgaccctaaaaaaaaaatacaatataaccgctctcgtcactcgatcaacgaaaaaacacgaccctaaaaaaaaaatacaatataaccgctctcgtcactcaatcaacgaaaa

SEQ ID NO: 28155 - DNA, 625 bp, Artificial Sequence
  chemically treated genomic DNA (Homo sapiens) CpG-island No: 28155
ggaaaggatatagggtggtcgtttttattatttagttaacgagagagtacgattttggggaaaggatgtagtgtggtcgttttcgttatttagttaacgagagagtacgattttggggaaaggacgtagtgtggtcgtttttattatttatttaacgagagagtacgattttggggaaaggatgtagtgtggtcgttttcgttattcggttaacgagagagtataattttggggaaaggacgtagtgtggtcgttttcgttatttatttaacgagagagtacgattttggggaaaggatgtagtgtggtcgtttttgttattcggttaacgagagagtacgattttggggaaaggacgtagtgtggtcgttttcgttattcggttaacgagagagtacgattttggggaaaggatgtagtgtggtcgttttcgttatttagttaacgagagagtacgattttggggaaaggacgtagtgtggtcgttttcgttatttagttaacgagagagtacgattttggggaaaggatgtagtgtggtcgttttcgttattcggttaacgagagagtacgattttggggaaaggatgtagtgtggtcgttttcgttatttagttaacgagag

SEQ ID NO: 28156 - DNA, 625 bp, Artificial Sequence
  chemically treated genomic DNA (Homo sapiens) CpG-island No: 28156
ctctcgttaactaaataacgaaaacgaccacactacatcctttccccaaaatcgtactctctcgttaaccgaataacgaaaacgaccacactacatcctttccccaaaatcgtactctctcgttaactaaataacgaaaacgaccacactacgtcctttccccaaaatcgtactctctcgttaactaaataacgaaaacgaccacactacatcctttccccaaaatcgtactctctcgttaaccgaataacgaaaacgaccacactacgtcctttccccaaaatcgtactctctcgttaaccgaataacaaaaacgaccacactacatcctttccccaaaatcgtactctctcgttaaataaataacgaaaacgaccacactacgtcctttccccaaaattatactctctcgttaaccgaataacgaaaacgaccacactacatcctttccccaaaatcgtactctctcgttaaataaataataaaaacgaccacactacgtcctttccccaaaatcgtactctctcgttaactaaataacgaaaacgaccacactacatcctttccccaaaatcgtactctctcgttaactaaataataaaaacgaccaccctatatcctttcc

SEQ ID NO: 28157 - DNA, 642 bp, Artificial Sequence
  chemically treated genomic DNA (Homo sapiens) CpG-island No: 28157
tcgttgatcgagtgacgagagcggttatattgcgttttttttttagggtcgtgttttttcgttgattgagtgacgagagcggttatattgcgttttttttttagggtcgtgttttttcgttgattgagtgacgagagcggttatattgtattttttttttagggtcgtgttttttcgttgatcgagtgacgagagcggttatattgcgttttttttttagggtcgtgttttttcgttgattgagtgacgagagcggttatattgtattttttttttagggtcgtgttttttcgttgatcgagtgacgagagcggttatattgcgttttttttttagggtcgtgttttttcgttgaatgagtgatgagagcggttatattgcgttttttttttagggttgtgttttttcgttgatcgagtgacgagggcggttattttgtgttttttttttagggtcgtgttgttttgttgatcgagtgacgagagcggttacgttgcgttttttttttagggttatgttgtttcgttgatcgagtgacgagagcggttatatcgtgttttttttttaggatcgtgtttttttattgatcgagcgattgtgtgggttgtggtttggtggattttgtttggggaggtcggagga

SEQ ID NO: 28158 - DNA, 642 bp, Artificial Sequence
  chemically treated genomic DNA (Homo sapiens) CpG-island No: 28158
tcctccgacctccccaaacaaaatccaccaaaccacaacccacacaatcgctcgatcaataaaaaaacacgatcctaaaaaaaaaacacgatataaccgctctcgtcactcgatcaacgaaacaacataaccctaaaaaaaaaacgcaacgtaaccgctctcgtcactcgatcaacaaaacaacacgaccctaaaaaaaaaacacaaaataaccgccctcgtcactcgatcaacgaaaaaacacaaccctaaaaaaaaaacgcaatataaccgctctcatcactcattcaacgaaaaaacacgaccctaaaaaaaaaacgcaatataaccgctctcgtcactcgatcaacgaaaaaacacgaccctaaaaaaaaaatacaatataaccgctctcgtcactcaatcaacgaaaaaacacgaccctaaaaaaaaaacgcaatataaccgctctcgtcactcgatcaacgaaaaaacacgaccctaaaaaaaaaatacaatataaccgctctcgtcactcaatcaacgaaaaaacacgaccctaaaaaaaaaacgcaatataaccgctctcgtcactcaatcaacgaaaaaacacgaccctaaaaaaaaaacgcaatataaccgctctcgtcactcgatcaacga

SEQ ID NO: 28159 - DNA, 642 bp, Artificial Sequence
  chemically treated genomic DNA (Homo sapiens) CpG-island No: 28159
tttttcgatttttttagataaaatttattagattatagtttatatagtcgttcggttaatgagagagtacgattttggggagaggatacggtgtggtcgttttcgttattcggttaacgagataatatgattttggggaaaggacgtagcgtggtcgttttcgttattcggttaataagataatacgattttggggaaaggatatagggtggtcgttttcgttattcggttaacgagagagtataattttggggaaaggacgtagtgtggtcgtttttattatttatttaacgagagagtacgattttggggaaaggacgtagtgtggtcgttttcgttattcggttaacgagagagtacgattttggggaaaggatgtagtgtggtcgttttcgttatttagttaacgagagagtacgattttggggaaaggacgtagtgtggtcgttttcgttattcggttaacgagagagtacgattttggggaaaggatgtagtgtggtcgttttcgttatttagttaacgagagagtacgattttggggaaaggacgtagtgtggtcgttttcgttatttagttaacgagagagtacgattttggggaaaggacgtagtgtggtcgttttcgttattcggttaacga

SEQ ID NO: 28160 - DNA, 642 bp, Artificial Sequence
  chemically treated genomic DNA (Homo sapiens) CpG-island No: 28160
tcgttaaccgaataacgaaaacgaccacactacgtcctttccccaaaatcgtactctctcgttaactaaataacgaaaacgaccacactacgtcctttccccaaaatcgtactctctcgttaactaaataacgaaaacgaccacactacatcctttccccaaaatcgtactctctcgttaaccgaataacgaaaacgaccacactacgtcctttccccaaaatcgtactctctcgttaactaaataacgaaaacgaccacactacatcctttccccaaaatcgtactctctcgttaaccgaataacgaaaacgaccacactacgtcctttccccaaaatcgtactctctcgttaaataaataataaaaacgaccacactacgtcctttccccaaaattatactctctcgttaaccgaataacgaaaacgaccaccctatatcctttccccaaaatcgtattatcttattaaccgaataacgaaaacgaccacgctacgtcctttccccaaaatcatattatctcgttaaccgaataacgaaaacgaccacaccgtatcctctccccaaaatcgtactctctcattaaccgaacgactatataaactataatctaataaattttatctaaaaaaatcgaaaaa

SEQ ID NO: 28161 - DNA, 596 bp, Artificial Sequence
  chemically treated genomic DNA (Homo sapiens) CpG-island No: 28161
gcgtggtgtttatcggagtgggggtgtttattgtatttcgcgtggtggttatcggagtgggggtgtttattttatttcgcgtggtgtttatcggagtggggtgtttattttattttacgcggtgtttatcggagtgggggtgtttattttatttcgcgtggtgtttatcggagtgggggtgtttattttatttcgcgtggtgtttatcggagtggggtgtttattttattttacgcggtgtttatcggagtggggtgtttattttattttacgcggtgtttatcggagtggggtgtttattttattttacgcggtgtttatcggagtggggatgtttattttatttcgcgtggtgtttatcggagtggggtgtttattttatttcgcgtggtgtttatcggagtggggtgtttattttattttacgcggtgtttatcggagtgggggtgtttattttatttcgcgtggtgtttatcggagtggggtgtttattttatttcgcgtggtgtttatcggagtggggtgtttattttattttacgcggtgtttatcggagtgggggtgtttattttatttcgcgtagtgttgattagttt

SEQ ID NO: 28162 - DNA, 596 bp, Artificial Sequence
  chemically treated genomic DNA (Homo sapiens) CpG-island No: 28162
aaactaatcaacactacgcgaaataaaataaacacccccactccgataaacaccgcgtaaaataaaataaacaccccactccgataaacaccacgcgaaataaaataaacaccccactccgataaacaccacgcgaaataaaataaacacccccactccgataaacaccgcgtaaaataaaataaacaccccactccgataaacaccacgcgaaataaaataaacaccccactccgataaacaccacgcgaaataaaataaacatccccactccgataaacaccgcgtaaaataaaataaacaccccactccgataaacaccgcgtaaaataaaataaacaccccactccgataaacaccgcgtaaaataaaataaacaccccactccgataaacaccacgcgaaataaaataaacacccccactccgataaacaccacgcgaaataaaataaacacccccactccgataaacaccgcgtaaaataaaataaacaccccactccgataaacaccacgcgaaataaaataaacacccccactccgataaccaccacgcgaaatacaataaacacccccactccgataaacaccacgc

SEQ ID NO: 28163 - DNA, 596 bp, Artificial Sequence
  chemically treated genomic DNA (Homo sapiens) CpG-island No: 28163
gaattgattaatattgcgcgggataaggtggatatttttatttcgataaatatcgcgtgggataaggtggatattttatttcgataaatattacgcgggataaggtggatattttatttcgataaatattacgcgggataaggtggatatttttatttcgataaatatcgcgtgggataaggtggatattttatttcgataaatattacgcgggataaggtggatattttatttcgataaatattacgcgggataaggtggatatttttatttcgataaatatcgcgtgggataaggtggatattttatttcgataaatatcgcgtgggataaggtggatattttatttcgataaatatcgcgtgggataaggtggatattttatttcgataaatattacgcgggataaggtggatatttttatttcgataaatattacgcgggataaggtggatatttttatttcgataaatatcgcgtgggataaggtggatattttatttcgataaatattacgcgggataaggtggatatttttatttcgataattattacgcgggatatagtggatatttttatttcgataaatattacgt

SEQ ID NO: 28164 - DNA, 596 bp, Artificial Sequence
  chemically treated genomic DNA (Homo sapiens) CpG-island No: 28164
acgtaatatttatcgaaataaaaatatccactatatcccgcgtaataattatcgaaataaaaatatccaccttatcccgcgtaatatttatcgaaataaaatatccaccttatcccacgcgatatttatcgaaataaaaatatccaccttatcccgcgtaatatttatcgaaataaaaatatccaccttatcccgcgtaatatttatcgaaataaaatatccaccttatcccacgcgatatttatcgaaataaaatatccaccttatcccacgcgatatttatcgaaataaaatatccaccttatcccacgcgatatttatcgaaataaaaatatccaccttatcccgcgtaatatttatcgaaataaaatatccaccttatcccgcgtaatatttatcgaaataaaatatccaccttatcccacgcgatatttatcgaaataaaaatatccaccttatcccgcgtaatatttatcgaaataaaatatccaccttatcccgcgtaatatttatcgaaataaaatatccaccttatcccacgcgatatttatcgaaataaaaatatccaccttatcccgcgcaatattaatcaattc

SEQ ID NO: 28165 - DNA, 1494 bp, Artificial Sequence
  chemically treated genomic DNA (Homo sapiens) CpG-island No: 28165
tagcggacgtcggataagggggagtttagttcgtacgatatttatttaggacgtggggaagttcggttcgtacgatatttatttgcgtcgcgggagttcgcgcggggtttcgtttttttttttggcggcgcgggtattgaatgggtagtttcggatttagttattttcgttatcgtcgttatttttttttcggttttgggtttttagcgtcgttgtcgttattgggcggggagttgcggggttgcgaagtaaataagtcgggagcgtcggtcgggtttttcgggtagaggggcgttgtttttttttattcgagaaaggggaaggaggcgtagttcgtttaggattcgtttcgttcggtttaggttcggttcgggtgttcgcgtcggggggtgggcgcggatttttttgttttttgggtcgcgcgggttagggcgcgagtttttcggggtttttgattcgattttatttttttttttacgttttatagtagtttttttttgattgcgttttttgcgttgtttatggtgtggtaggaggcggcgtcgagcggtttttagagttttcgcgttttcgtcgttttcgcgtttttcggtttagcgttttacgcgtaaggcggagttttcgttcgtcgcgttttcggttcgtcgtcgtcgtcgtcgtcgtagttattgttcggtgttcggtttcgtagttatttttcgagtttcgtatagacgttaggcggtaggttcggtttttttttatagtcggaggggggttgcgtatagcgacgggggatcggggcggggagaggtcgtgcgcgtttaggggcggtagattcgggcgcgcgttacgggggtcgttgttatggtaacgtattcgttttcgtatggagggcgcgaagtcgtattgtgagcgttggttttggagttcgcggtttcgcggttgagagcgagtttcggtttcgttgaagtttttttgatttttgtttgttttttttttcgacgggacggaaagggtcggggttcgggtatggggttttttgcggttcgagtttgtttacggcgaagtcggtgtagtttggtttcgtgatttttttgaattttcgttcggtcgtcgtcgtgtagttgttaagtttttgggaagattagtgggagcgtagtcgttcgagttcgacggtcggagggtcgcggttagttttttttgtcgggtcgttacgttttataaggtttttttcggtcgtttcgtgggaggcggggcgtaggttggagtaatagggacgggtttgagttggtacggaatcgggtaaggtgagagaagtgttttttacgcgatttttaagtttcgttagggaatcgagggagaagaaaggttgtttagagtgataaagaatatgtcgttgtaaacggaagagtaacgtgttcgaatttaggtgataggaagggtttaggttttttcggtacgaatggagttttttagttaatatgtttttacgtgatgtagttttatagcgta

SEQ ID NO: 28166 - DNA, 1494 bp, Artificial Sequence
  chemically treated genomic DNA (Homo sapiens) CpG-island No: 28166
tacgctataaaactacatcacgtaaaaacatattaactaaaaaactccattcgtaccgaaaaaacctaaacccttcctatcacctaaattcgaacacgttactcttccgtttacaacgacatattctttatcactctaaacaacctttcttctccctcgattccctaacgaaacttaaaaatcgcgtaaaaaacacttctctcaccttacccgattccgtaccaactcaaacccgtccctattactccaacctacgccccgcctcccacgaaacgaccgaaaaaaaccttataaaacgtaacgacccgacaaaaaaaactaaccgcgaccctccgaccgtcgaactcgaacgactacgctcccactaatcttcccaaaaacttaacaactacacgacgacgaccgaacgaaaattcaaaaaaatcacgaaaccaaactacaccgacttcgccgtaaacaaactcgaaccgcaaaaaaccccatacccgaaccccgaccctttccgtcccgtcgaaaaaaaaaacaaacaaaaatcaaaaaaacttcaacgaaaccgaaactcgctctcaaccgcgaaaccgcgaactccaaaaccaacgctcacaatacgacttcgcgccctccatacgaaaacgaatacgttaccataacaacgacccccgtaacgcgcgcccgaatctaccgcccctaaacgcgcacgacctctccccgccccgatcccccgtcgctatacgcaacccccctccgactataaaaaaaaaccgaacctaccgcctaacgtctatacgaaactcgaaaaataactacgaaaccgaacaccgaacaataactacgacgacgacgacgacgacgaaccgaaaacgcgacgaacgaaaactccgccttacgcgtaaaacgctaaaccgaaaaacgcgaaaacgacgaaaacgcgaaaactctaaaaaccgctcgacgccgcctcctaccacaccataaacaacgcaaaaaacgcaatcaaaaaaaaactactataaaacgtaaaaaaaaaaataaaatcgaatcaaaaaccccgaaaaactcgcgccctaacccgcgcgacccaaaaaacaaaaaaatccgcgcccaccccccgacgcgaacacccgaaccgaacctaaaccgaacgaaacgaatcctaaacgaactacgcctccttcccctttctcgaataaaaaaaaacaacgcccctctacccgaaaaacccgaccgacgctcccgacttatttacttcgcaaccccgcaactccccgcccaataacgacaacgacgctaaaaacccaaaaccgaaaaaaaaataacgacgataacgaaaataactaaatccgaaactacccattcaatacccgcgccgccaaaaaaaaaaacgaaaccccgcgcgaactcccgcgacgcaaataaatatcgtacgaaccgaacttccccacgtcctaaataaatatcgtacgaactaaactcccccttatccgacgtccgcta

SEQ ID NO: 28167 - DNA, 1494 bp, Artificial Sequence
  chemically treated genomic DNA (Homo sapiens) CpG-island No: 28167
tgcgttataaagttgtattacgtagaagtatgttgattggaaggttttattcgtgtcgaaaaggtttaagttttttttgttatttagattcgggtacgttgttttttcgtttgtaacggtatgttttttattattttgagtaattttttttttttttcgattttttagcgaggtttgggaatcgcgtggaagatattttttttattttgttcggtttcgtattagtttaagttcgtttttgttattttaatttgcgtttcgttttttacggagcggtcgggaaggattttgtgggacgtggcgattcggtaagggggattggtcgcgatttttcggtcgtcgggttcgggcggttgcgtttttattaatttttttagaaatttgataattgtacggcgacggtcggacggggatttagaggggttacggggttaggttgtatcggtttcgtcgtgggtaggttcggatcgtaggggattttatgttcgagtttcggtttttttcgtttcgtcgggagagggagtaggtagaagttaggggagttttagcgggatcgaggttcgtttttagtcgcggggtcgcgggttttagggttagcgtttataatgcggtttcgcgttttttatgcgggagcgggtgcgttgttatgatagcgattttcgtggcgcgcgttcgggtttgtcgtttttaggcgcgtacggttttttttcgtttcgatttttcgtcgttgtgcgtaattttttttcggttgtgggaaggggtcgggtttgtcgtttgacgtttgtgcggggttcggaagatggttgcggagtcgagtatcgggtagtggttgcggcggcggcggcggcggcgggtcgggagcgcggcgggcgggggtttcgttttgcgcgtggggcgttgagtcgagaggcgcggaggcggcgagggcgcgggggttttgaggatcgttcggcgtcgttttttgttatattatgggtagcgtagaggacgtagttaaagagaaattgttgtggaacgtgaagaaggaggtaaagtcgagttaagaatttcggggggttcgcgttttggttcgcgcggtttagggggtagaaaggttcgcgtttatttttcggcgcgggtattcgggtcgaatttgggtcgggcggggcgggttttggacgggttgcgttttttttttttttttcggatgggggagggtagcgtttttttgttcgggggattcggtcggcgttttcggtttgtttgtttcgtagtttcgtagtttttcgtttagtgacggtagcggcgttgggagtttaaggtcgggggaggggtggcggcgatggcggggatggttggattcggagttgtttatttagtgttcgcgtcgttaggggagggggcggggtttcgcgcgagttttcgcggcgtaggtgggtgtcgtgcgggtcgagtttttttacgttttaagtgggtgtcgtgcgggttgagtttttttttgttcgacgttcgttg

SEQ ID NO: 28168 - DNA, 1494 bp, Artificial Sequence
  chemically treated genomic DNA (Homo sapiens) CpG-island No: 28168
caacgaacgtcgaacaaaaaaaaactcaacccgcacgacacccacttaaaacgtaaaaaaactcgacccgcacgacacccacctacgccgcgaaaactcgcgcgaaaccccgccccctcccctaacgacgcgaacactaaataaacaactccgaatccaaccatccccgccatcgccgccacccctcccccgaccttaaactcccaacgccgctaccgtcactaaacgaaaaactacgaaactacgaaacaaacaaaccgaaaacgccgaccgaatcccccgaacaaaaaaacgctaccctcccccatccgaaaaaaaaaaaaaaaacgcaacccgtccaaaacccgccccgcccgacccaaattcgacccgaatacccgcgccgaaaaataaacgcgaacctttctaccccctaaaccgcgcgaaccaaaacgcgaaccccccgaaattcttaactcgactttacctccttcttcacgttccacaacaatttctctttaactacgtcctctacgctacccataatataacaaaaaacgacgccgaacgatcctcaaaacccccgcgccctcgccgcctccgcgcctctcgactcaacgccccacgcgcaaaacgaaacccccgcccgccgcgctcccgacccgccgccgccgccgccgccgcaaccactacccgatactcgactccgcaaccatcttccgaaccccgcacaaacgtcaaacgacaaacccgaccccttcccacaaccgaaaaaaaattacgcacaacgacgaaaaatcgaaacgaaaaaaaaccgtacgcgcctaaaaacgacaaacccgaacgcgcgccacgaaaatcgctatcataacaacgcacccgctcccgcataaaaaacgcgaaaccgcattataaacgctaaccctaaaacccgcgaccccgcgactaaaaacgaacctcgatcccgctaaaactcccctaacttctacctactccctctcccgacgaaacgaaaaaaaccgaaactcgaacataaaatcccctacgatccgaacctacccacgacgaaaccgatacaacctaaccccgtaacccctctaaatccccgtccgaccgtcgccgtacaattatcaaatttctaaaaaaattaataaaaacgcaaccgcccgaacccgacgaccgaaaaatcgcgaccaatcccccttaccgaatcgccacgtcccacaaaatccttcccgaccgctccgtaaaaaacgaaacgcaaattaaaataacaaaaacgaacttaaactaatacgaaaccgaacaaaataaaaaaaatatcttccacgcgattcccaaacctcgctaaaaaatcgaaaaaaaaaaaaaattactcaaaataataaaaaacataccgttacaaacgaaaaaacaacgtacccgaatctaaataacaaaaaaaacttaaaccttttcgacacgaataaaaccttccaatcaacatacttctacgtaatacaactttataacgca

SEQ ID NO: 28169 - DNA, 1711 bp, Artificial Sequence
  chemically treated genomic DNA (Homo sapiens) CpG-island No: 28169
ttcgtacggtgcggttgttgaattttttaggcggcggtttaggagggaattcggaggcgggagagtcggggagagcgggaacgcgggagcgggaaggttggcggttggtttatacggaaatttcggtttttgttaagaggtttttattttggcgatttagttttttatattataggtttgcgtgcgcgtgtgtgcgtgtgattttaaagttttggttttagaagtttcgggggtagtcggatttatttagtagtttcgtcgcggttcgttttattttttttgttttcgggcgtttagtttttgggggttcgttgttatgatcggtttcgttacggaatttaggttgtcgggggcgagggaaaataggggtttttatttcgatttttcgattcggggaatttattttatttttatttcgggatcgggagttcgggttttttagtatacgcgcggcggggcgacgttagggcggttcgcgatacgtcgcgattttttcgtttttttttgggtttttagttttacgtcggggtttcggcgttttcgatttcgtttttaagtaaatttttttaggttttcgaaggttcgaagaatcggcgttatcgacgtatttgaggtcgagtggtttacgggtttagttcggtcgtcgggtcggggtttgttttcgtggttttcgtttcgggggtcgagacgcgggtttttagtttcgttagttcgtttttttttttcggaagtcgggtcgggcgagcggcgttaggaattcggcgtcggcgaaaggagaagtggaagttgagcgcggcgttcggtcggttttcgcggtcgtcggggtcgtcgtttttcgttttttttttcgttcgtttttttttttcgttcgtttgttttcgttatttcgcgttcgtgatttatttcggcgtcggggtaggttggttcgggcgggcgaggcgtagggtttttttatatttcgcgtcgttaatggtaagttggagggagagatgtaaatattaggtgagacggcggcgtttttgataaaacggggcggggggcggggtggagcgcgcggggagcggggcggacgtcggggagggtcgggttaagatacggggcggtaggggcgttcggggagggggcgcgaatcggcgtagatttgtatcgaaacgagcgagcgaaaggggaaattgtattagagatatatacgttttcgtaggcggcggttggggcgggcgcgaaggaggtagggcgggagggagggaagagtcggagggagggatcgacgggagggattgcgggcgggcggggtgggggagggaacgagggagggacgaggtatttcggtggaaatagcgttttttcgtttcggttcgttcgtcgcggtcgttagtacggtatggggagtcgtgttaggggttcgcgcggttttttttttttttcgcggttcgttcgcgttcgggggattacgaggtagggcgttcgtagagttcgcgtcgtgcgtcgcggttcgggcgggcgttttttattttgtttttagttagcgagatttcgagttttttgttcgtttcgcgtttttttcggtgcgaagtttttatataacgtttcgtagagaaatttttttttcgcggattcgggaaggtttcgtttagttttttcggttcgtgtaagtggagatttgtttgacgtttttgggttaagttttgcgttttatattattgagtttttg

SEQ ID NO: 28170 - DNA, 1711 bp, Artificial Sequence
  chemically treated genomic DNA (Homo sapiens) CpG-island No: 28170
caaaaactcaataatataaaacgcaaaacttaacccaaaaacgtcaaacaaatctccacttacacgaaccgaaaaaactaaacgaaaccttcccgaatccgcgaaaaaaaaatttctctacgaaacgttatataaaaacttcgcaccgaaaaaaacgcgaaacgaacaaaaaactcgaaatctcgctaactaaaaacaaaataaaaaacgcccgcccgaaccgcgacgcacgacgcgaactctacgaacgccctacctcgtaatcccccgaacgcgaacgaaccgcgaaaaaaaaaaaaaaccgcgcgaacccctaacacgactccccataccgtactaacgaccgcgacgaacgaaccgaaacgaaaaaacgctatttccaccgaaatacctcgtccctccctcgttccctcccccaccccgcccgcccgcaatccctcccgtcgatccctccctccgactcttccctccctcccgccctacctccttcgcgcccgccccaaccgccgcctacgaaaacgtatatatctctaatacaatttcccctttcgctcgctcgtttcgatacaaatctacgccgattcgcgccccctccccgaacgcccctaccgccccgtatcttaacccgaccctccccgacgtccgccccgctccccgcgcgctccaccccgccccccgccccgttttatcaaaaacgccgccgtctcacctaatatttacatctctccctccaacttaccattaacgacgcgaaatataaaaaaaccctacgcctcgcccgcccgaaccaacctaccccgacgccgaaataaatcacgaacgcgaaataacgaaaacaaacgaacgaaaaaaaaaaacgaacgaaaaaaaaaacgaaaaacgacgaccccgacgaccgcgaaaaccgaccgaacgccgcgctcaacttccacttctcctttcgccgacgccgaattcctaacgccgctcgcccgacccgacttccgaaaaaaaaaaacgaactaacgaaactaaaaacccgcgtctcgacccccgaaacgaaaaccacgaaaacaaaccccgacccgacgaccgaactaaacccgtaaaccactcgacctcaaatacgtcgataacgccgattcttcgaaccttcgaaaacctaaaaaaatttacttaaaaacgaaatcgaaaacgccgaaaccccgacgtaaaactaaaaacccaaaaaaaaacgaaaaaatcgcgacgtatcgcgaaccgccctaacgtcgccccgccgcgcgtatactaaaaaacccgaactcccgatcccgaaataaaaataaaataaattccccgaatcgaaaaatcgaaataaaaacccctattttccctcgcccccgacaacctaaattccgtaacgaaaccgatcataacaacgaacccccaaaaactaaacgcccgaaaacaaaaaaaataaaacgaaccgcgacgaaactactaaataaatccgactacccccgaaacttctaaaaccaaaactttaaaatcacacgcacacacgcgcacgcaaacctataatataaaaaactaaatcgccaaaataaaaacctcttaacaaaaaccgaaatttccgtataaaccaaccgccaaccttcccgctcccgcgttcccgctctccccgactctcccgcctccgaattccctcctaaaccgccgcctaaaaaattcaacaaccgcaccgtacgaa

SEQ ID NO: 28171 - DNA, 1711 bp, Artificial Sequence
  chemically treated genomic DNA (Homo sapiens) CpG-island No: 28171
taggagtttaataatgtggagcgtagggtttggtttaaaggcgttaagtaagtttttatttgtacgggtcgagggggttggacgaaattttttcgagttcgcggggaagggatttttttgcggggcgttgtatgggggtttcgtatcgggaagggcgcggaacgagtagagagttcggagtttcgttggttagaagtagagtggggagcgttcgttcgggtcgcggcgtacgacgcgggttttgcgggcgttttgtttcgtggtttttcgggcgcgagcgagtcgcgaggggaaggagaggtcgcgcgggtttttggtacggttttttatgtcgtgttggcgatcgcggcgggcgggtcggggcggaggggcgttgtttttatcgagatgtttcgtttttttttcgtttttttttttatttcgttcgttcgtagtttttttcgtcggttttttttttcggtttttttttttttttcgttttgtttttttcgcgttcgttttagtcgtcgtttgcggggacgtgtgtgtttttagtgtaattttttttttcgttcgttcgtttcggtgtaggtttgcgtcggttcgcgtttttttttcgggcgtttttgtcgtttcgtgttttggttcggtttttttcggcgttcgtttcgtttttcgcgcgttttatttcgtttttcgtttcgttttattaggggcgtcgtcgttttatttggtatttgtatttttttttttaatttgttattggcggcgcgaagtgtgggagagttttgcgtttcgttcgttcggattagtttgtttcggcgtcgaggtgagttacgggcgcggggtggcgggggtaggcgggcggggaggaagggcgggcggggaggagggcgggggacggcggtttcggcggtcgcggggatcgatcgggcgtcgcgtttaatttttattttttttttcgtcggcgtcgagtttttggcgtcgttcgttcggttcggttttcgaggggagaggacgggttggcggggttggggattcgcgtttcggttttcggagcggggattacggagatagatttcggttcggcgatcgagttgggttcgtgagttattcggttttaggtacgtcgatggcgtcggtttttcgagttttcggggatttggaaaagtttgtttgagggcggaatcgagagcgtcggggtttcggcgtggggttgggggtttagggaagggcgggagagtcgcggcgtgtcgcgagtcgttttggcgtcgtttcgtcgcgcgtgtgttggagaattcgggttttcgatttcgggatggaagtggaatggatttttcgagtcggggagtcggggtaggggtttttgttttttttcgttttcggtagtttgggtttcgtgacggggtcgattatgatagcgggtttttagaagttgggcgttcgagggtagaggaggtggggcggatcgcggcggagttgttagatggattcgattgttttcggggtttttggggttagggttttagggttatacgtatatacgcgtacgtagatttatgatgtggagaattggatcgttaaaatagagattttttggtaggggtcggagttttcgtgtgagttagtcgttagttttttcgttttcgcgttttcgtttttttcgattttttcgttttcgggtttttttttgggtcgtcgtttaggggatttagtagtcgtatcgtgcggg

SEQ ID NO: 28172 - DNA, 1711 bp, Artificial Sequence
  chemically treated genomic DNA (Homo sapiens) CpG-island No: 28172
cccgcacgatacgactactaaatcccctaaacgacgacccaaaaaaaaacccgaaaacgaaaaaatcgaaaaaaacgaaaacgcgaaaacgaaaaaactaacgactaactcacacgaaaactccgacccctaccaaaaaatctctattttaacgatccaattctccacatcataaatctacgtacgcgtatatacgtataaccctaaaaccctaaccccaaaaaccccgaaaacaatcgaatccatctaacaactccgccgcgatccgccccacctcctctaccctcgaacgcccaacttctaaaaacccgctatcataatcgaccccgtcacgaaacccaaactaccgaaaacgaaaaaaaacaaaaacccctaccccgactccccgactcgaaaaatccattccacttccatcccgaaatcgaaaacccgaattctccaacacacgcgcgacgaaacgacgccaaaacgactcgcgacacgccgcgactctcccgcccttccctaaacccccaaccccacgccgaaaccccgacgctctcgattccgccctcaaacaaacttttccaaatccccgaaaactcgaaaaaccgacgccatcgacgtacctaaaaccgaataactcacgaacccaactcgatcgccgaaccgaaatctatctccgtaatccccgctccgaaaaccgaaacgcgaatccccaaccccgccaacccgtcctctcccctcgaaaaccgaaccgaacgaacgacgccaaaaactcgacgccgacgaaaaaaaaaataaaaattaaacgcgacgcccgatcgatccccgcgaccgccgaaaccgccgtcccccgccctcctccccgcccgcccttcctccccgcccgcctacccccgccaccccgcgcccgtaactcacctcgacgccgaaacaaactaatccgaacgaacgaaacgcaaaactctcccacacttcgcgccgccaataacaaattaaaaaaaaaaatacaaataccaaataaaacgacgacgcccctaataaaacgaaacgaaaaacgaaataaaacgcgcgaaaaacgaaacgaacgccgaaaaaaaccgaaccaaaacacgaaacgacaaaaacgcccgaaaaaaaaacgcgaaccgacgcaaacctacaccgaaacgaacgaacgaaaaaaaaaattacactaaaaacacacacgtccccgcaaacgacgactaaaacgaacgcgaaaaaaacaaaacgaaaaaaaaaaaaaaaccgaaaaaaaaaaccgacgaaaaaaactacgaacgaacgaaataaaaaaaaaaacgaaaaaaaaacgaaacatctcgataaaaacaacgcccctccgccccgacccgcccgccgcgatcgccaacacgacataaaaaaccgtaccaaaaacccgcgcgacctctccttcccctcgcgactcgctcgcgcccgaaaaaccacgaaacaaaacgcccgcaaaacccgcgtcgtacgccgcgacccgaacgaacgctccccactctacttctaaccaacgaaactccgaactctctactcgttccgcgcccttcccgatacgaaacccccatacaacgccccgcaaaaaaatcccttccccgcgaactcgaaaaaatttcgtccaaccccctcgacccgtacaaataaaaacttacttaacgcctttaaaccaaaccctacgctccacattattaaactccta

SEQ ID NO: 28173 - DNA, 518 bp, Artificial Sequence
  chemically treated genomic DNA (Homo sapiens) CpG-island No: 28173
gttttcgggtcggcgggtatttacgtgtttggaggtgagggttgtgatgtcgcggataaggttgtttagtttcgaggagaaggacgttttggcggtcgcgggtttattatcgggttggttttgtagaaagagtttcggtagcgtcgttagcgttttttttattatgtcgtttatcgtcgtcgtcgttcgcgatgtcgtcgtcgttcgcgatttcgtagtcgttcggttttatgttcggtcgtcgttgtcggttcggttttcgtaagtattttttgttttttgaataagaaatttttattggcgttttatttgaataagtttagcgtcgttttcgcgagaggttattagagggcgtaagagatcgcgggggtggaaaaggtcgttcgttcgagattacgcgcgtaagtagattttttttttcgcgacggggtagcggtttcggaattttttagaatcgtgagtttttttgaggaagtcgtcgggggtttggttttgttaggtattgttttttagagttt

SEQ ID NO: 28174 - DNA, 518 bp, Artificial Sequence
  chemically treated genomic DNA (Homo sapiens) CpG-island No: 28174
aaactctaaaaaacaatacctaacaaaaccaaacccccgacgacttcctcaaaaaaactcacgattctaaaaaattccgaaaccgctaccccgtcgcgaaaaaaaaaatctacttacgcgcgtaatctcgaacgaacgaccttttccacccccgcgatctcttacgccctctaataacctctcgcgaaaacgacgctaaacttattcaaataaaacgccaataaaaatttcttattcaaaaaacaaaaaatacttacgaaaaccgaaccgacaacgacgaccgaacataaaaccgaacgactacgaaatcgcgaacgacgacgacatcgcgaacgacgacgacgataaacgacataataaaaaaaacgctaacgacgctaccgaaactctttctacaaaaccaacccgataataaacccgcgaccgccaaaacgtccttctcctcgaaactaaacaaccttatccgcgacatcacaaccctcacctccaaacacgtaaatacccgccgacccgaaaac

SEQ ID NO: 28175 - DNA, 518 bp, Artificial Sequence
  chemically treated genomic DNA (Homo sapiens) CpG-island No: 28175
ggattttgggagatagtgtttaatagggttaggttttcgacggtttttttaggaggatttacggttttgggggatttcggaatcgttatttcgtcgcgagaaaggaggtttatttacgcgcgtaatttcgagcgagcggttttttttattttcgcggttttttgcgttttttggtggtttttcgcgagaacgacgttgaatttgtttaggtgggacgttaataaagattttttatttaaaaaataggaagtgtttacggaggtcgggtcggtagcggcggtcgggtatgaagtcgggcggttacgggatcgcgggcggcggcggtatcgcgggcggcggcggcgatgagcgatatagtggagaagacgttgacggcgttgtcgggattttttttgtagaattagttcggtggtgggttcgcggtcgttaaggcgttttttttttcgaggttgggtagttttgttcgcggtattatagtttttatttttaagtacgtaggtgttcgtcggttcgggagt

SEQ ID NO: 28176 - DNA, 518 bp, Artificial Sequence
  chemically treated genomic DNA (Homo sapiens) CpG-island No: 28176
actcccgaaccgacgaacacctacgtacttaaaaataaaaactataataccgcgaacaaaactacccaacctcgaaaaaaaaaacgccttaacgaccgcgaacccaccaccgaactaattctacaaaaaaaatcccgacaacgccgtcaacgtcttctccactatatcgctcatcgccgccgccgcccgcgataccgccgccgcccgcgatcccgtaaccgcccgacttcatacccgaccgccgctaccgacccgacctccgtaaacacttcctattttttaaataaaaaatctttattaacgtcccacctaaacaaattcaacgtcgttctcgcgaaaaaccaccaaaaaacgcaaaaaaccgcgaaaataaaaaaaaccgctcgctcgaaattacgcgcgtaaataaacctcctttctcgcgacgaaataacgattccgaaatcccccaaaaccgtaaatcctcctaaaaaaaccgtcgaaaacctaaccctattaaacactatctcccaaaatcc

SEQ ID NO: 28177 - DNA, 505 bp, Artificial Sequence
  chemically treated genomic DNA (Homo sapiens) CpG-island No: 28177
gacggcgtttcgattgcgtttttggcgacggtcggaattttgttcggttttttgtaatgtttttatgggaaggttcgtatattcgtgatcgtttttggtagcggtttagttcgggatttggcgttttattcgttattggttagttttcggcgtgacgcgtaggggggcggggttttattagttgtttgcgggatgtttcgagtaggcgtattttggaaataatatcgtatcgtgcggagtggttttttttcgtttcggtttgtgttcgtcgtcgtcgtcgtttttgtttgcgtttttcgttttttgtcgtagttcggtgagcgttcgggtggtcgtcgggggtcgggcggagttggatcgtagttttttggggaagtggggagcggagtcgcgttgcgtacgggggttcgggaagggtttgggttgcggacgtttggggtgattatgaagaattggggcgttggggtgagggaacggggtgtagaatttatagttgggtgcgttg

SEQ ID NO: 28178 - DNA, 505 bp, Artificial Sequence
  chemically treated genomic DNA (Homo sapiens) CpG-island No: 28178
caacgcacccaactataaattctacaccccgttccctcaccccaacgccccaattcttcataatcaccccaaacgtccgcaacccaaacccttcccgaacccccgtacgcaacgcgactccgctccccacttccccaaaaaactacgatccaactccgcccgacccccgacgaccacccgaacgctcaccgaactacgacaaaaaacgaaaaacgcaaacaaaaacgacgacgacgacgaacacaaaccgaaacgaaaaaaaaccactccgcacgatacgatattatttccaaaatacgcctactcgaaacatcccgcaaacaactaataaaaccccgcccccctacgcgtcacgccgaaaactaaccaataacgaataaaacgccaaatcccgaactaaaccgctaccaaaaacgatcacgaatatacgaaccttcccataaaaacattacaaaaaaccgaacaaaattccgaccgtcgccaaaaacgcaatcgaaacgccgtc

SEQ ID NO: 28179 - DNA, 505 bp, Artificial Sequence
  chemically treated genomic DNA (Homo sapiens) CpG-island No: 28179
tagcgtatttaattgtgggttttgtatttcgtttttttattttagcgttttagttttttatggttattttagacgttcgtagtttaaatttttttcgggttttcgtgcgtagcgcgatttcgttttttatttttttaaggagttgcgatttaatttcgttcggttttcggcggttattcgggcgtttatcgggttgcggtaggaggcgggaggcgtaggtaggggcggcggcggcggcgggtataggtcggggcgggaggaggttatttcgtacggtgcggtattgtttttaaaatacgtttgttcggggtatttcgtaaatagttgatgaggtttcgtttttttgcgcgttacgtcgaggattgattaatggcgagtgaagcgttaagtttcgggttgggtcgttgttagggacggttacgaatgtacgaatttttttatggaaatattgtaaggggtcgagtaaaatttcgatcgtcgttagaagcgtagtcggagcgtcgtt

SEQ ID NO: 28180 - DNA, 505 bp, Artificial Sequence
  chemically treated genomic DNA (Homo sapiens) CpG-island No: 28180
aacgacgctccgactacgcttctaacgacgatcgaaattttactcgaccccttacaatatttccataaaaaaattcgtacattcgtaaccgtccctaacaacgacccaacccgaaacttaacgcttcactcgccattaatcaatcctcgacgtaacgcgcaaaaaaacgaaacctcatcaactatttacgaaataccccgaacaaacgtattttaaaaacaataccgcaccgtacgaaataacctcctcccgccccgacctatacccgccgccgccgccgcccctacctacgcctcccgcctcctaccgcaacccgataaacgcccgaataaccgccgaaaaccgaacgaaattaaatcgcaactccttaaaaaaataaaaaacgaaatcgcgctacgcacgaaaacccgaaaaaaatttaaactacgaacgtctaaaataaccataaaaaactaaaacgctaaaataaaaaaacgaaatacaaaacccacaattaaatacgcta

SEQ ID NO: 28181 - DNA, 785 bp, Artificial Sequence
  chemically treated genomic DNA (Homo sapiens) CpG-island No: 28181
cgggtttttttttaaattcgtttttcgtacgttttcgttttggtttttttttttattttttttattttttttttatttttacgttcgtttatcgttttacgattcgattttttttttatttattttatcgttcgacgttcggatttttacgtgcgggtacgatttatttttttttattcgaacgggtcgcgtatcggattttaatcggtattttaatcgttatcgtaatcgtttttcgttttcgatttcgtattcgtaatcgatttcggtaacgtttttcgtatttcgtacggtatttcgtattcgtaatcgcggacgggaatcggtatcgagtttcgttatcgcgacgggtatcgtaatcgtcgttttatgttattcgttttttattttatcgtattcgattcggtcgagtttacgttcgaacgttcgcgtttcggtattttttcgattcgtattagatttatttcgcgacgaattttatttgattttatttcgatcgtatttaattcggttcgtattttttcgtttcgatttaattcggatcgtattcgtttcgtttcgttttcgtattacgcggtcgcgaatcgttcgtatttcgttcgttcgacgttttttcggtatcgtacgcgtatttcgtcgttttcgtcgtttagcgagatatcgcgttacgtttcgtattttttttcgttatttcgtttttaatttttttattttcgtcgcgtatttttcgatttttattttcgttacgtatcgcggaattgttttttcgttacgatatcgtcgtt

SEQ ID NO: 28182 - DNA, 785 bp, Artificial Sequence
  chemically treated genomic DNA (Homo sapiens) CpG-island No: 28182
aacgacgatatcgtaacgaaaaaacaattccgcgatacgtaacgaaaataaaaatcgaaaaatacgcgacgaaaataaaaaaattaaaaacgaaataacgaaaaaaaatacgaaacgtaacgcgatatctcgctaaacgacgaaaacgacgaaatacgcgtacgataccgaaaaaacgtcgaacgaacgaaatacgaacgattcgcgaccgcgtaatacgaaaacgaaacgaaacgaatacgatccgaattaaatcgaaacgaaaaaatacgaaccgaattaaatacgatcgaaataaaatcaaataaaattcgtcgcgaaataaatctaatacgaatcgaaaaaataccgaaacgcgaacgttcgaacgtaaactcgaccgaatcgaatacgataaaataaaaaacgaataacataaaacgacgattacgatacccgtcgcgataacgaaactcgataccgattcccgtccgcgattacgaatacgaaataccgtacgaaatacgaaaaacgttaccgaaatcgattacgaatacgaaatcgaaaacgaaaaacgattacgataacgattaaaataccgattaaaatccgatacgcgacccgttcgaataaaaaaaaataaatcgtacccgcacgtaaaaatccgaacgtcgaacgataaaataaataaaaaaaaaatcgaatcgtaaaacgataaacgaacgtaaaaataaaaaaaaaataaaaaaaataaaaaaaaaaaccaaaacgaaaacgtacgaaaaacgaatttaaaaaaaaacccg

SEQ ID NO: 28183 - DNA, 785 bp, Artificial Sequence
  chemically treated genomic DNA (Homo sapiens) CpG-island No: 28183
ggcggcggtgtcgtggcgagagggtagtttcgcggtgcgtgacggaggtgggagtcggggagtgcgcgacggaggtggaggagttggaggcggggtggcgagggggggtacggggcgtggcgcggtgtttcgttgggcggcgggagcggcggggtgcgcgtgcggtatcgggagggcgtcgagcgggcggggtgcgagcggttcgcggtcgcgtggtgcggggacggggcgagacgggtgcggttcgggttgggtcggggcgaagggatgcgggtcgggttgagtgcggtcggagtggggttaggtggggttcgtcgcggggtaagtttgatgcggatcgggggggtgtcggggcgcgggcgttcgggcgtgggttcggtcgggtcgggtacggtgggatggggggcgaatagtatggggcggcggttgcggtgttcgtcgcggtagcggggttcggtgtcgattttcgttcgcggttgcgggtgcggagtgtcgtgcgggatgcggggggcgttgtcgggatcggttgcggatgcgggatcgggggcggggggcggttgcggtggcgattgaggtgtcgattgaggttcgatgcgcggttcgttcgggtgggagggagtggatcgtgttcgtacgtagggattcgggcgtcggacggtggggtgggtggggggggggtcgggtcgtggggcggtgggcgggcgtgggggtgggggggaggtgggggaggtgggggggggggttagggcgggggcgtgcggggggcgggtttgggggggggttcg

SEQ ID NO: 28184 - DNA, 785 bp, Artificial Sequence
  chemically treated genomic DNA (Homo sapiens) CpG-island No: 28184
cgaacccccccccaaacccgccccccgcacgcccccgccctaacccccccccccacctcccccacctcccccccacccccacgcccgcccaccgccccacgacccgaccccccccccacccaccccaccgtccgacgcccgaatccctacgtacgaacacgatccactccctcccacccgaacgaaccgcgcatcgaacctcaatcgacacctcaatcgccaccgcaaccgccccccgcccccgatcccgcatccgcaaccgatcccgacaacgccccccgcatcccgcacgacactccgcacccgcaaccgcgaacgaaaatcgacaccgaaccccgctaccgcgacgaacaccgcaaccgccgccccatactattcgccccccatcccaccgtacccgacccgaccgaacccacgcccgaacgcccgcgccccgacacccccccgatccgcatcaaacttaccccgcgacgaaccccacctaaccccactccgaccgcactcaacccgacccgcatcccttcgccccgacccaacccgaaccgcacccgtctcgccccgtccccgcaccacgcgaccgcgaaccgctcgcaccccgcccgctcgacgccctcccgataccgcacgcgcaccccgccgctcccgccgcccaacgaaacaccgcgccacgccccgtaccccccctcgccaccccgcctccaactcctccacctccgtcgcgcactccccgactcccacctccgtcacgcaccgcgaaactaccctctcgccacgacaccgccgcc

SEQ ID NO: 28185 - DNA, 662 bp, Artificial Sequence
  chemically treated genomic DNA (Homo sapiens) CpG-island No: 28185
ttcgtcgttgtaagggaaaaggtcgtttttttcgagtttcggagaggttttttaggaatttagagtttttcggggatatcgtttagttttcggcgttcggtttcgtttttgcgcgaattcggtcgtatttattttttcgggcggtttttttttcgtggtttgtggcgttataaggtttttagtcgtttgtgtttcgcggtgcgcgtttcgtttcgggatttgtcgttatcgtcgtttcgttttcggcggtatttatatttaggcgcgttcgcgcgcgcgttcggtttcgtttttgtttggaagtatagttgaagatggcgagttcggcgttttcggagtacgtcgaggagggatgttcggtttttgtcgtcgaggagtaggcgtcgtcgtcgtcgttatcgttttaggtattttcgtagagcggtagtagtaggaggaggaagcgtaggaagttggggcggcggagggcgcggggttgtaggtggaggaggtcgcgggtcgggcggcggtcgcggtaatttggttgttcggggagtcggtgttgtggttgggttgtcgcgtcgacgagttgttgagttggaagaggtcgttgcggagtttgttcggtttcgtcgttgttaatttgttgttttggtgagagtttgggtaaggtgggggcgttg

SEQ ID NO: 28186 - DNA, 662 bp, Artificial Sequence
  chemically treated genomic DNA (Homo sapiens) CpG-island No: 28186
caacgcccccaccttacccaaactctcaccaaaacaacaaattaacaacgacgaaaccgaacaaactccgcaacgacctcttccaactcaacaactcgtcgacgcgacaacccaaccacaacaccgactccccgaacaaccaaattaccgcgaccgccgcccgacccgcgacctcctccacctacaaccccgcgccctccgccgccccaacttcctacgcttcctcctcctactactaccgctctacgaaaatacctaaaacgataacgacgacgacgacgcctactcctcgacgacaaaaaccgaacatccctcctcgacgtactccgaaaacgccgaactcgccatcttcaactatacttccaaacaaaaacgaaaccgaacgcgcgcgcgaacgcgcctaaatataaataccgccgaaaacgaaacgacgataacgacaaatcccgaaacgaaacgcgcaccgcgaaacacaaacgactaaaaaccttataacgccacaaaccacgaaaaaaaaaccgcccgaaaaaataaatacgaccgaattcgcgcaaaaacgaaaccgaacgccgaaaactaaacgatatccccgaaaaactctaaattcctaaaaaacctctccgaaactcgaaaaaaacgaccttttcccttacaacgacgaa

SEQ ID NO: 28187 - DNA, 662 bp, Artificial Sequence
  chemically treated genomic DNA (Homo sapiens) CpG-island No: 28187
tagcgtttttattttgtttaagtttttattagaatagtaggttggtagcgacgaagtcgagtaggtttcgtagcggttttttttagtttagtagttcgtcggcgcggtagtttagttatagtatcggtttttcgagtagttaggttatcgcggtcgtcgttcggttcgcggttttttttatttgtaatttcgcgtttttcgtcgttttagttttttgcgttttttttttttgttgttgtcgttttgcggggatgtttggggcggtggcggcgacggcggcgtttgtttttcggcggtaggagtcgggtattttttttcggcgtgtttcggaggcgtcgggttcgttatttttagttgtgtttttagatagggacggggtcgggcgcgcgcgcgggcgcgtttgggtgtgggtgtcgtcgagggcggggcggcggtggcggtaggtttcggagcggggcgcgtatcgcggggtataggcggttgggggttttgtgacgttataggttacggagggggagtcgttcgggaaagtgggtgcggtcgagttcgcgtaggggcggggtcgggcgtcgggagttgggcggtgttttcggggggttttgggtttttggagggttttttcgggattcgaggaaaacgatttttttttttgtagcggcggg

SEQ ID NO: 28188 - DNA, 662 bp, Artificial Sequence
  chemically treated genomic DNA (Homo sapiens) CpG-island No: 28188
cccgccgctacaaaaaaaaaaatcgttttcctcgaatcccgaaaaaaccctccaaaaacccaaaaccccccgaaaacaccgcccaactcccgacgcccgaccccgcccctacgcgaactcgaccgcacccactttcccgaacgactccccctccgtaacctataacgtcacaaaacccccaaccgcctataccccgcgatacgcgccccgctccgaaacctaccgccaccgccgccccgccctcgacgacacccacacccaaacgcgcccgcgcgcgcgcccgaccccgtccctatctaaaaacacaactaaaaataacgaacccgacgcctccgaaacacgccgaaaaaaaatacccgactcctaccgccgaaaaacaaacgccgccgtcgccgccaccgccccaaacatccccgcaaaacgacaacaacaaaaaaaaaaaacgcaaaaaactaaaacgacgaaaaacgcgaaattacaaataaaaaaaaccgcgaaccgaacgacgaccgcgataacctaactactcgaaaaaccgatactataactaaactaccgcgccgacgaactactaaactaaaaaaaaccgctacgaaacctactcgacttcgtcgctaccaacctactattctaataaaaacttaaacaaaataaaaacgcta

SEQ ID NO: 28189 - DNA, 852 bp, Artificial Sequence
  chemically treated genomic DNA (Homo sapiens) CpG-island No: 28189
gttcgtttgttcgatttgttgcgcggtttggtggtggagttgaatttcgcggtggtgattgttatttatgatttaggcgtcgttcgtttgttggcggatcgtttgttggtgatgaagtaggggtaagtggtggagagtgggttaatcgatcgcgtgttcgacgattcgtattattcgtatatatagttgttggtgttatcggttttgtagaattgagtcggtgtcggatgcggcgtaaacgttttattcggtttataaatgcgtttttcgtaggtcggataagacgcgttagcgtcgtattcgatattcgaattacgaggcgaaaaatgattaacgtataaaacgttagtaaaatttttattttgtattagtaaaacggcgtgcgtttgttcgtttttaatcgcgtttcgtttatcgttaacgcgggcgaatgcgtggtgttttacggttatttcggtagcggtaaattaattttgttacgttcgttgtacgttaattatttgttcgacgaaggttaaatttagattaaatacggtgacgagtgggtagatttggttatcgcgttagcgcgtaaagtggtggaaattcgtaaaattatcgtcggttgggttgattagttttgcgcgttattcgcgtatttagtttggaatggtatgcggcgttgtcgaatcgcgttcgagtgagtttcgtcgataagcggcgttttatcgttaaggtgcgaagcgtggacggatttgaatttcggggataagggtattgtcgggtatttgatttttgttgtgatacgttcggataaagcgggggagtttaaatacgggtattattttaaagtaatgacggcgggttataatg

SEQ ID NO: 28190 - DNA, 852 bp, Artificial Sequence
  chemically treated genomic DNA (Homo sapiens) CpG-island No: 28190
cattataacccgccgtcattactttaaaataatacccgtatttaaactcccccgctttatccgaacgtatcacaacaaaaatcaaatacccgacaatacccttatccccgaaattcaaatccgtccacgcttcgcaccttaacgataaaacgccgcttatcgacgaaactcactcgaacgcgattcgacaacgccgcataccattccaaactaaatacgcgaataacgcgcaaaactaatcaacccaaccgacgataattttacgaatttccaccactttacgcgctaacgcgataaccaaatctacccactcgtcaccgtatttaatctaaatttaaccttcgtcgaacaaataattaacgtacaacgaacgtaacaaaattaatttaccgctaccgaaataaccgtaaaacaccacgcattcgcccgcgttaacgataaacgaaacgcgattaaaaacgaacaaacgcacgccgttttactaatacaaaataaaaattttactaacgttttatacgttaatcatttttcgcctcgtaattcgaatatcgaatacgacgctaacgcgtcttatccgacctacgaaaaacgcatttataaaccgaataaaacgtttacgccgcatccgacaccgactcaattctacaaaaccgataacaccaacaactatatatacgaataatacgaatcgtcgaacacgcgatcgattaacccactctccaccacttacccctacttcatcaccaacaaacgatccgccaacaaacgaacgacgcctaaatcataaataacaatcaccaccgcgaaattcaactccaccaccaaaccgcgcaacaaatcgaacaaacgaac

SEQ ID NO: 28191 - DNA, 852 bp, Artificial Sequence
  chemically treated genomic DNA (Homo sapiens) CpG-island No: 28191
tattatagttcgtcgttattattttaagatagtgttcgtgtttaaattttttcgttttgttcgagcgtgttataataaggattaaatattcggtagtatttttgttttcggaatttaggttcgtttacgtttcgtattttagcggtagaacgtcgtttatcggcgaggtttattcggacgcggttcgataacgtcgtatattattttaggttgaatacgcggatgacgcgtagaattggttaatttagtcgacggtggttttgcggatttttattattttgcgcgttggcgcggtgattaggtttatttattcgttatcgtgtttgatttggatttgattttcgtcgggtagatagttggcgtatagcgagcgtagtagagttgatttgtcgttgtcggaatggtcgtggagtattacgtattcgttcgcgttgacggtgagcgaggcgcgattgaggacgggtaggcgtacgtcgttttgttggtgtaggatgaaggttttattgacgttttgtacgttaattatttttcgtttcgtggttcgggtgtcggatgcgacgttgacgcgttttattcgatttacggggagcgtatttgtaggtcggataaggcgtttacgtcgtattcggtatcggtttaattttgtaaaatcgatgatattagtagttgtgtatacggatgatgcgggtcgtcgagtacgcggtcggttaatttattttttattatttgtttttgttttattattagtaaacggttcgttagtaggcgggcgacgtttaaattatgggtgataattattatcgcgaggtttagttttattattaggtcgcgtagtaggtcgagtaggcgggt

SEQ ID NO: 28192 - DNA, 852 bp, Artificial Sequence
  chemically treated genomic DNA (Homo sapiens) CpG-island No: 28192
acccgcctactcgacctactacgcgacctaataataaaactaaacctcgcgataataattatcacccataatttaaacgtcgcccgcctactaacgaaccgtttactaataataaaacaaaaacaaataataaaaaataaattaaccgaccgcgtactcgacgacccgcatcatccgtatacacaactactaatatcatcgattttacaaaattaaaccgataccgaatacgacgtaaacgccttatccgacctacaaatacgctccccgtaaatcgaataaaacgcgtcaacgtcgcatccgacacccgaaccacgaaacgaaaaataattaacgtacaaaacgtcaataaaaccttcatcctacaccaacaaaacgacgtacgcctacccgtcctcaatcgcgcctcgctcaccgtcaacgcgaacgaatacgtaatactccacgaccattccgacaacgacaaatcaactctactacgctcgctatacgccaactatctacccgacgaaaatcaaatccaaatcaaacacgataacgaataaataaacctaatcaccgcgccaacgcgcaaaataataaaaatccgcaaaaccaccgtcgactaaattaaccaattctacgcgtcatccgcgtattcaacctaaaataatatacgacgttatcgaaccgcgtccgaataaacctcgccgataaacgacgttctaccgctaaaatacgaaacgtaaacgaacctaaattccgaaaacaaaaatactaccgaatatttaatccttattataacacgctcgaacaaaacgaaaaaatttaaacacgaacactatcttaaaataataacgacgaactataata

SEQ ID NO: 28193 - DNA, 506 bp, Artificial Sequence
  chemically treated genomic DNA (Homo sapiens) CpG-island No: 28193
cgggtcgaagtcgattttgtacggcgtaattttttcggttagcgttatggttatatacgtacgatcgtgaaagtcgtcgttaaacgtaattacgttagggcgttcggtatgggcgcgagtaatttttatcgcgttttttatcgttttcgtatcggtggtgaagaacgcggttttggtttgttcgtttatcggggtaagggcgttgatttttttcgttagggtgacgtagtttttatacggtataatttgatacgcggtgtgggtaaattgttgtagttgttgttttatcgtcgcgattagattagggtggcgatgttcggtatttagtatcgtaatgtttgcggcgaaatcgatgtattcgttgtttttaatattttttagcgtggcgtttttagtcgattgggcgaagaagtatatattacgttaatttcgcgcggagtggtagaaagacgacgttgatggaatttattgttgtttatgttttatattttttgattttttacggt

SEQ ID NO: 28194 - DNA, 506 bp, Artificial Sequence
  chemically treated genomic DNA (Homo sapiens) CpG-island No: 28194
accgtaaaaaatcaaaaaatataaaacataaacaacaataaattccatcaacgtcgtctttctaccactccgcgcgaaattaacgtaatatatacttcttcgcccaatcgactaaaaacgccacgctaaaaaatattaaaaacaacgaatacatcgatttcgccgcaaacattacgatactaaataccgaacatcgccaccctaatctaatcgcgacgataaaacaacaactacaacaatttacccacaccgcgtatcaaattataccgtataaaaactacgtcaccctaacgaaaaaaatcaacgcccttaccccgataaacgaacaaaccaaaaccgcgttcttcaccaccgatacgaaaacgataaaaaacgcgataaaaattactcgcgcccataccgaacgccctaacgtaattacgtttaacgacgactttcacgatcgtacgtatataaccataacgctaaccgaaaaaattacgccgtacaaaatcgacttcgacccg

SEQ ID NO: 28195 - DNA, 506 bp, Artificial Sequence
  chemically treated genomic DNA (Homo sapiens) CpG-island No: 28195
atcgtgaagagttaaaaggtgtgaaatatgagtaataatgaattttattagcgtcgtttttttgttatttcgcgcggggttggcgtgatgtgtattttttcgtttagtcggttgaaaacgttacgttgaaggatgttgagggtaacgagtatatcgatttcgtcgtaggtattgcggtgttgaatatcggatatcgttattttgatttggtcgcggcggtggagtagtaattgtaatagtttatttatatcgcgtattagattgtgtcgtatgaaagttacgttattttggcggagaaaattaacgtttttgtttcggtgagcgggtaggttaaaatcgcgttttttattatcggtgcggaagcggtggaaaacgcggtgaaaattgttcgcgtttatatcggacgttttggcgtgattgcgtttagcggcggtttttacggtcgtacgtatatgattatggcgttgatcggaaaagttgcgtcgtataaaatcggtttcggttcg

SEQ ID NO: 28196 - DNA, 506 bp, Artificial Sequence
  chemically treated genomic DNA (Homo sapiens) CpG-island No: 28196
cgaaccgaaaccgattttatacgacgcaacttttccgatcaacgccataatcatatacgtacgaccgtaaaaaccgccgctaaacgcaatcacgccaaaacgtccgatataaacgcgaacaattttcaccgcgttttccaccgcttccgcaccgataataaaaaacgcgattttaacctacccgctcaccgaaacaaaaacgttaattttctccgccaaaataacgtaactttcatacgacacaatctaatacgcgatataaataaactattacaattactactccaccgccgcgaccaaatcaaaataacgatatccgatattcaacaccgcaatacctacgacgaaatcgatatactcgttaccctcaacatccttcaacgtaacgttttcaaccgactaaacgaaaaaatacacatcacgccaaccccgcgcgaaataacaaaaaaacgacgctaataaaattcattattactcatatttcacaccttttaactcttcacgat

SEQ ID NO: 28197 - DNA, 690 bp, Artificial Sequence
  chemically treated genomic DNA (Homo sapiens) CpG-island No: 28197
  unsure (4..5, 13..14, 16, 19, 22..23, 26, 32)
cggnnnggagttnntngtnttnnttnttggangtaatagttcgtggacgttacgaagatgttcgagtttatgatggcgattacgatgacggttacgtttttgagtagcgtgatgtttttttgtagggttacgttttcgttttcgtttgtcggcgtcgcgtcgttcgcgcgtttggcggttattattttttttcgcgtttttttttttttttcggttatcggggtcgttagcgcgcgtcgtttcgggttcgtattcgttatgttttgtttatcggtcgggtttgggatattcgggagtcgtagtcgagcgaggattgtgcgcgtcgttcgtcgttcgtcgttcgtagttgcgttaggaatttcgttcgcgtcgttttttaggtttcggtttattggtttcgtttatcgttcgcggttttttttcgattcgtggttcggcggcggtttttagtttcgttttttcgatttagttcggagtacgtgcgtcgttcggtttagtttggtaggcgatttttaggttcgcgtggttttcgaaggttttcgtatttttgcgttatggagatttcggtttcgcgatttattttttcggcgttcgcgttattttagttcgttttttcgggtgcgtttgggcggggtttggtagttagggcgagtttttttatttattggttcgtagtttttcgttaagttt

SEQ ID NO: 28198 - DNA, 690 bp, Artificial Sequence
  chemically treated genomic DNA (Homo sapiens) CpG-island No: 28198
  unsure (659, 665, 668..669, 672, 675, 677..678, 685..)
aaacttaacgaaaaactacgaaccaataaataaaaaaactcgccctaactaccaaaccccgcccaaacgcacccgaaaaaacgaactaaaataacgcgaacgccgaaaaaataaatcgcgaaaccgaaatctccataacgcaaaaatacgaaaaccttcgaaaaccacgcgaacctaaaaatcgcctaccaaactaaaccgaacgacgcacgtactccgaactaaatcgaaaaaacgaaactaaaaaccgccgccgaaccacgaatcgaaaaaaaaccgcgaacgataaacgaaaccaataaaccgaaacctaaaaaacgacgcgaacgaaattcctaacgcaactacgaacgacgaacgacgaacgacgcgcacaatcctcgctcgactacgactcccgaatatcccaaacccgaccgataaacaaaacataacgaatacgaacccgaaacgacgcgcgctaacgaccccgataaccgaaaaaaaaaaaaaaacgcgaaaaaaaataataaccgccaaacgcgcgaacgacgcgacgccgacaaacgaaaacgaaaacgtaaccctacaaaaaaacatcacgctactcaaaaacgtaaccgtcatcgtaatcgccatcataaactcgaacatcttcgtaacgtccacgaactattacntccaanaannaanacnannaactccnnnccg

SEQ ID NO: 28199 - DNA, 690 bp, Artificial Sequence
  chemically treated genomic DNA (Homo sapiens) CpG-island No: 28199
  unsure (659, 665, 668..669, 672, 675, 677..678, 685..)
aggtttgacgagaggttgcgggttagtgggtgaaggggttcgttttgattgttaggtttcgtttaggcgtattcgggaggacgggttgggatgacgcgggcgtcgggggggtaggtcgcgaggtcggggtttttatggcgtaggagtacgggggttttcgaggattacgcgggtttgggaatcgtttgttaggttaggtcggacgacgtacgtgtttcgagttgggtcgagggggcggggttgagggtcgtcgtcgggttacgggtcggggaggagtcgcggacggtgggcggggttagtgggtcggggtttaaaaggcggcgcgggcggggtttttgacgtagttgcgggcggcgggcggcgagcggcgcgtataattttcgttcggttgcggttttcgggtgttttaggttcggtcggtaagtagagtatggcgggtgcgggttcgaagcggcgcgcgttagcggtttcggtggtcgaggagaaggaagaggcgcgggagaagataatggtcgttaagcgcgcggacggcgcggcgtcggtaggcgagggcgagggcgtgattttgtaggggaatattacgttatttaagggcgtggtcgttatcgtggtcgttattatgggttcgggtattttcgtgacgtttacgggttgttgtntttagnggnnagngtnannggttttnnntcg

SEQ ID NO: 28200 - DNA, 690 bp, Artificial Sequence
  chemically treated genomic DNA (Homo sapiens) CpG-island No: 28200
  unsure (4..5, 13..14, 16, 19, 22..23, 26, 32)
cgannnaaaaccnntnacnctnnccnctaaanacaacaacccgtaaacgtcacgaaaatacccgaacccataataacgaccacgataacgaccacgcccttaaataacgtaatattcccctacaaaatcacgccctcgccctcgcctaccgacgccgcgccgtccgcgcgcttaacgaccattatcttctcccgcgcctcttccttctcctcgaccaccgaaaccgctaacgcgcgccgcttcgaacccgcacccgccatactctacttaccgaccgaacctaaaacacccgaaaaccgcaaccgaacgaaaattatacgcgccgctcgccgcccgccgcccgcaactacgtcaaaaaccccgcccgcgccgccttttaaaccccgacccactaaccccgcccaccgtccgcgactcctccccgacccgtaacccgacgacgaccctcaaccccgccccctcgacccaactcgaaacacgtacgtcgtccgacctaacctaacaaacgattcccaaacccgcgtaatcctcgaaaacccccgtactcctacgccataaaaaccccgacctcgcgacctacccccccgacgcccgcgtcatcccaacccgtcctcccgaatacgcctaaacgaaacctaacaatcaaaacgaaccccttcacccactaacccgcaacctctcgtcaaacct

SEQ ID NO: 28201 - DNA, 852 bp, Artificial Sequence
  chemically treated genomic DNA (Homo sapiens) CpG-island No: 28201
  unsure (730)
aattaatgtttgatgcgacgttgtcgcgttttattaggtttataattattgtcgatttgtaggtttgataaggtatttgtgtcgtattcggtaattaatgtttgatgcgacgttgtcgcgttttattaggtttataattgttgtcgatttgtaggtcggataaggtatttgtgtcgtattcggtaattaatgtttgatgcgacgttgtcgcgttttattaggtttataattattgtcgatttgtaggtcggataaggtatttgtgtcgtattcggtaattaatgtttgatgcgacgttgtcgcgttttattaggtttataattgttgtcgattcgtaggtcggataaggcgttcgcgtcgtattcggtagtgtttattcgcggacgatttaaaatattttttttataagttcgtacgttttttagttattcgttatttgttggcgtatcgtgacgttggtaatatattttttagatcgtttgttacggaaacgattttatgttttattagatagtgttagacgcgtagatgtaatcgttcgatcgtattttagatattgcgtagttatagcggtaggttttagtaacgtacgtagtagggttataggatatattgcgtgtatttaatgattaagcggataagcggtgattagaggtatcgaaaaagttaaggtcgatatgaatttaggatatatagatcgtgaagttatattttacgggtaattggtagngttatattcggtagatacgtgaacgtggttaagaatcgacggtgagtgtatatatggggttttaagatggggggaatttgcggaatattacgggaatcggttaaaagtaataggggtaggat

SEQ ID NO: 28202 - DNA, 852 bp, Artificial Sequence
  chemically treated genomic DNA (Homo sapiens) CpG-island No: 28202
  unsure (123)
atcctacccctattacttttaaccgattcccgtaatattccgcaaattccccccatcttaaaaccccatatatacactcaccgtcgattcttaaccacgttcacgtatctaccgaatataacnctaccaattacccgtaaaatataacttcacgatctatatatcctaaattcatatcgaccttaactttttcgatacctctaatcaccgcttatccgcttaatcattaaatacacgcaatatatcctataaccctactacgtacgttactaaaacctaccgctataactacgcaatatctaaaatacgatcgaacgattacatctacgcgtctaacactatctaataaaacataaaatcgtttccgtaacaaacgatctaaaaaatatattaccaacgtcacgatacgccaacaaataacgaataactaaaaaacgtacgaacttataaaaaaaatattttaaatcgtccgcgaataaacactaccgaatacgacgcgaacgccttatccgacctacgaatcgacaacaattataaacctaataaaacgcgacaacgtcgcatcaaacattaattaccgaatacgacacaaataccttatccgacctacaaatcgacaataattataaacctaataaaacgcgacaacgtcgcatcaaacattaattaccgaatacgacacaaataccttatccgacctacaaatcgacaacaattataaacctaataaaacgcgacaacgtcgcatcaaacattaattaccgaatacgacacaaataccttatcaaacctacaaatcgacaataattataaacctaataaaacgcgacaacgtcgcatcaaacattaatt

SEQ ID NO: 28203 - DNA, 852 bp, Artificial Sequence
  chemically treated genomic DNA (Homo sapiens) CpG-island No: 28203
  unsure (123)
gttttatttttgttgtttttgatcggttttcgtggtgtttcgtaagttttttttattttgaggttttatgtgtgtatttatcgtcggtttttggttacgtttacgtatttgtcggatgtgatnttgttagttgttcgtgagatgtggttttacgatttgtgtgttttgggtttatatcggttttgattttttcgatgtttttgattatcgtttgttcgtttggttattgggtatacgtaatatgttttatagttttgttgcgtgcgttgttggaatttatcgttgtagttgcgtaatgtttggaatgcggtcgggcgattatatttgcgcgtttggtattgtttggtagagtatgaaatcgttttcgtggtaggcggtttgggaaatgtattgttaacgttacgatacgttagtaggtagcgaatggttggagagcgtgcgggtttatgagaaagatattttgagtcgttcgcgggtaaatattgtcggatgcggcgcgagcgttttattcggtttacgggtcggtaatagttgtaggtttgataagacgcgatagcgtcgtattaggtattgattgtcggatgcggtataagtgttttattcggtttataggtcggtaatagttgtaggtttgataagacgcgatagcgtcgtattaggtattgattgtcggatgcggtataagtgttttattcggtttataggtcggtaatagttgtaggtttgataagacgcgatagcgtcgtattaggtattgattgtcggatgcggtataagtgttttattaggtttataggtcggtaatagttgtaggtttgataagacgcgatagcgtcgtattaggtattgatt

SEQ ID NO: 28204 - DNA, 852 bp, Artificial Sequence
  chemically treated genomic DNA (Homo sapiens) CpG-island No: 28204
  unsure (730)
aatcaatacctaatacgacgctatcgcgtcttatcaaacctacaactattaccgacctataaacctaataaaacacttataccgcatccgacaatcaatacctaatacgacgctatcgcgtcttatcaaacctacaactattaccgacctataaaccgaataaaacacttataccgcatccgacaatcaatacctaatacgacgctatcgcgtcttatcaaacctacaactattaccgacctataaaccgaataaaacacttataccgcatccgacaatcaatacctaatacgacgctatcgcgtcttatcaaacctacaactattaccgacccgtaaaccgaataaaacgctcgcgccgcatccgacaatatttacccgcgaacgactcaaaatatctttctcataaacccgcacgctctccaaccattcgctacctactaacgtatcgtaacgttaacaatacatttcccaaaccgcctaccacgaaaacgatttcatactctaccaaacaataccaaacgcgcaaatataatcgcccgaccgcattccaaacattacgcaactacaacgataaattccaacaacgcacgcaacaaaactataaaacatattacgtatacccaataaccaaacgaacaaacgataatcaaaaacatcgaaaaaatcaaaaccgatataaacccaaaacacacaaatcgtaaaaccacatctcacgaacaactaacaanatcacatccgacaaatacgtaaacgtaaccaaaaaccgacgataaatacacacataaaacctcaaaataaaaaaaacttacgaaacaccacgaaaaccgatcaaaaacaacaaaaataaaac

SEQ ID NO: 28205 - DNA, 1048 bp, Artificial Sequence
  chemically treated genomic DNA (Homo sapiens) CpG-island No: 28205
cgtgttttttaagggtttttcggcgtcgcggtttagttcggcgttatttgtagttcggttcgtagtcgtttgtttttcgtgtttagtttggtttcgcggcggtttatggataataatttttggtttttgttgacgcgaaagatttcgtatttttttttgagtcgttcgtattcggtcgtcgcgtattttagttttggtatcgacgagttagtggatttgaagttggtttttagtagttcgttcgcgtttatttcgcggggtagcgattcgggttcggtttttgttgtcgttttcgcgtttcggcggaacgagttgcgtagtaggcgggttttgggttttatttttatcgggatttcgtaggtttcgtcgtcgttcgtttcgtacgtgttttcgattattttttcgttcgcggggtttacgagcgacgaggcggtttttatggcgttcgttgtcgttattatttagtgagtattagtaggattgggtagcggaacggaacgggacggggtggggtagaggaacggaacgggacggggcggggtagaggaacggaacgggacggggcgggttagcgggatggagcggggtcggagagtaggattgggcggagtagcgggacggggcggagtagcggaacggggcgaggcgggggagcgggatggggcggggaaataggaggggcggggtagtagaattgggcggggcgggggtgtaggacggggcgggggagtaggacggggcggggtagcggaacggggcggggcggggtcggagagtcggacgaggcgaggtagcggaacggggcggggagggagagcggaagggggtggggtaattggaggggcggggtagcggaacgggacggggtagcggaattggggggatgggcgagggggacggggcggggtagtagggttaggcgggataataagaggggtcgggtaagtggggcggggtatgtgggcggggtagggtaaacgggggtgggtcgagaaagtatatagggttaggcgggttagtaagaagggcggggttagtaggaaggatg

SEQ ID NO: 28206 - DNA, 1048 bp, Artificial Sequence
  chemically treated genomic DNA (Homo sapiens) CpG-island No: 28206
catccttcctactaaccccgcccttcttactaacccgcctaaccctatatactttctcgacccacccccgtttaccctaccccgcccacataccccgccccacttacccgacccctcttattatcccgcctaaccctactaccccgccccgtccccctcgcccatccccccaattccgctaccccgtcccgttccgctaccccgcccctccaattaccccacccccttccgctctccctccccgccccgttccgctacctcgcctcgtccgactctccgaccccgccccgccccgttccgctaccccgccccgtcctactcccccgccccgtcctacacccccgccccgcccaattctactaccccgcccctcctatttccccgccccatcccgctcccccgcctcgccccgttccgctactccgccccgtcccgctactccgcccaatcctactctccgaccccgctccatcccgctaacccgccccgtcccgttccgttcctctaccccgccccgtcccgttccgttcctctaccccaccccgtcccgttccgttccgctacccaatcctactaatactcactaaataataacgacaacgaacgccataaaaaccgcctcgtcgctcgtaaaccccgcgaacgaaaaaataatcgaaaacacgtacgaaacgaacgacgacgaaacctacgaaatcccgataaaaataaaacccaaaacccgcctactacgcaactcgttccgccgaaacgcgaaaacgacaacaaaaaccgaacccgaatcgctaccccgcgaaataaacgcgaacgaactactaaaaaccaacttcaaatccactaactcgtcgataccaaaactaaaatacgcgacgaccgaatacgaacgactcaaaaaaaaatacgaaatctttcgcgtcaacaaaaaccaaaaattattatccataaaccgccgcgaaaccaaactaaacacgaaaaacaaacgactacgaaccgaactacaaataacgccgaactaaaccgcgacgccgaaaaacccttaaaaaacacg

SEQ ID NO: 28207 - DNA, 1048 bp, Artificial Sequence
  chemically treated genomic DNA (Homo sapiens) CpG-island No: 28207
tattttttttgttagtttcgttttttttgttagttcgtttggttttgtgtgttttttcgatttattttcgtttgttttgtttcgtttatatgtttcgttttatttgttcggttttttttgttgtttcgtttagttttgttgtttcgtttcgtttttttcgtttatttttttagtttcgttgtttcgtttcgtttcgttgtttcgtttttttagttgttttattttttttcgtttttttttttcgtttcgtttcgttgtttcgtttcgttcggtttttcggtttcgtttcgtttcgtttcgttgtttcgtttcgttttgttttttcgtttcgttttgtattttcgtttcgtttagttttgttgtttcgttttttttgttttttcgttttatttcgttttttcgtttcgtttcgtttcgttgtttcgtttcgtttcgttgtttcgtttagttttgtttttcggtttcgttttatttcgttggttcgtttcgtttcgtttcgtttttttgtttcgtttcgtttcgtttcgtttttttgttttatttcgtttcgtttcgtttcgttgtttagttttgttggtatttattaggtagtagcggtaacggacgttatggggatcgtttcgtcgttcgtgagtttcgcgggcggggaagtgatcgaggatacgtacggggcgggcggcggcgaggtttgcgagatttcggtggaggtgaagtttaaggttcgtttgttgcgtaattcgtttcgtcgaggcgcgggggcggtagtaggggtcgggttcgggtcgttgtttcgcggggtgggcgcgggcgggttgttgggggttagttttaagtttattggttcgtcggtgttagagttggagtacgcggcggtcgagtacgagcggtttaggaaggagtacgagatttttcgcgttagtaagaattaggagttgttgtttatgggtcgtcgcgaggttaagttggatacggagaataagcggttgcgggtcgaattgtaggtaacgtcgggttgggtcgcgacgtcgggagatttttgggaagtacg

SEQ ID NO: 28208 - DNA, 1048 bp, Artificial Sequence
  chemically treated genomic DNA (Homo sapiens) CpG-island No: 28208
cgtacttcccaaaaatctcccgacgtcgcgacccaacccgacgttacctacaattcgacccgcaaccgcttattctccgtatccaacttaacctcgcgacgacccataaacaacaactcctaattcttactaacgcgaaaaatctcgtactccttcctaaaccgctcgtactcgaccgccgcgtactccaactctaacaccgacgaaccaataaacttaaaactaacccccaacaacccgcccgcgcccaccccgcgaaacaacgacccgaacccgacccctactaccgcccccgcgcctcgacgaaacgaattacgcaacaaacgaaccttaaacttcacctccaccgaaatctcgcaaacctcgccgccgcccgccccgtacgtatcctcgatcacttccccgcccgcgaaactcacgaacgacgaaacgatccccataacgtccgttaccgctactacctaataaataccaacaaaactaaacaacgaaacgaaacgaaacgaaataaaacaaaaaaacgaaacgaaacgaaacgaaacaaaaaaacgaaacgaaacgaaacgaaccaacgaaataaaacgaaaccgaaaaacaaaactaaacgaaacaacgaaacgaaacgaaacaacgaaacgaaacgaaacgaaaaaacgaaataaaacgaaaaaacaaaaaaaacgaaacaacaaaactaaacgaaacgaaaatacaaaacgaaacgaaaaaacaaaacgaaacgaaacaacgaaacgaaacgaaacgaaaccgaaaaaccgaacgaaacgaaacaacgaaacgaaacgaaaaaaaaaaacgaaaaaaaataaaacaactaaaaaaacgaaacaacgaaacgaaacgaaacaacgaaactaaaaaaataaacgaaaaaaacgaaacgaaacaacaaaactaaacgaaacaacaaaaaaaaccgaacaaataaaacgaaacatataaacgaaacaaaacaaacgaaaataaatcgaaaaaacacacaaaaccaaacgaactaacaaaaaaaacgaaactaacaaaaaaaata

SEQ ID NO: 28209 - DNA, 509 bp, Artificial Sequence
  chemically treated genomic DNA (Homo sapiens) CpG-island No: 28209
ttgttcgggtaatcgtttttagtagggattagacgagagcggcgcgtttagtaatgtagtcgttagattgaggtttgatagcgcgttcgttgcgaagggtcgttgacgcggttgcgtatcgcggttttttcgtttttcgtttcgtttatttaggtttaatttgtatacgggagtcgttattttcgcgggcgcgtgcgtagtggcgggtcgggcgcgtgcgtagcgtcggtttttttttagcgcgagttgttgttaacgttttttttttagttttttattttcgtcgttcgtcgcggttcggtattaacgggtggtttcgtcgagggagttgtcgtgtttcgtggtttcgggattgtagtggtgtgcgttttcggcgcgtggcgttaggtatggcgatggattaagtaaacgcgttgtgcgagtagttggtgaaagcggtgacggttatgatggattttaattttatttagcgttatcggttggaagtttttaaggtagttggggttttg

SEQ ID NO: 28210 - DNA, 509 bp, Artificial Sequence
  chemically treated genomic DNA (Homo sapiens) CpG-island No: 28210
caaaaccccaactaccttaaaaacttccaaccgataacgctaaataaaattaaaatccatcataaccgtcaccgctttcaccaactactcgcacaacgcgtttacttaatccatcgccatacctaacgccacgcgccgaaaacgcacaccactacaatcccgaaaccacgaaacacgacaactccctcgacgaaaccacccgttaataccgaaccgcgacgaacgacgaaaataaaaaactaaaaaaaaaacgttaacaacaactcgcgctaaaaaaaaaccgacgctacgcacgcgcccgacccgccactacgcacgcgcccgcgaaaataacgactcccgtatacaaattaaacctaaataaacgaaacgaaaaacgaaaaaaccgcgatacgcaaccgcgtcaacgacccttcgcaacgaacgcgctatcaaacctcaatctaacgactacattactaaacgcgccgctctcgtctaatccctactaaaaacgattacccgaacaa

SEQ ID NO: 28211 - DNA, 509 bp, Artificial Sequence
  chemically treated genomic DNA (Homo sapiens) CpG-island No: 28211
taggattttagttattttgagggtttttagtcggtagcgttgggtggagttggggtttattatgatcgttatcgtttttattagttgttcgtatagcgcgtttatttgatttatcgttatgtttagcgttacgcgtcgagagcgtatattattgtagtttcgggattacgaggtacgatagttttttcggcgagattattcgttggtatcgggtcgcggcgggcggcgggggtgggaagttggaggaggagcgttagtagtaattcgcgttgggaagaagtcggcgttgcgtacgcgttcggttcgttattgcgtacgcgttcgcggaagtggcggttttcgtgtgtaggttgagtttaggtgggcggggcgggaggcggaagggtcgcggtgcgtagtcgcgttaacggtttttcgtagcgggcgcgttgttagattttagtttggcggttgtattgttgggcgcgtcgttttcgtttgatttttgttggggacggttgttcgggtag

SEQ ID NO: 28212 - DNA, 509 bp, Artificial Sequence
  chemically treated genomic DNA (Homo sapiens) CpG-island No: 28212
ctacccgaacaaccgtccccaacaaaaatcaaacgaaaacgacgcgcccaacaatacaaccgccaaactaaaatctaacaacgcgcccgctacgaaaaaccgttaacgcgactacgcaccgcgacccttccgcctcccgccccgcccacctaaactcaacctacacacgaaaaccgccacttccgcgaacgcgtacgcaataacgaaccgaacgcgtacgcaacgccgacttcttcccaacgcgaattactactaacgctcctcctccaacttcccacccccgccgcccgccgcgacccgataccaacgaataatctcgccgaaaaaactatcgtacctcgtaatcccgaaactacaataatatacgctctcgacgcgtaacgctaaacataacgataaatcaaataaacgcgctatacgaacaactaataaaaacgataacgatcataataaaccccaactccacccaacgctaccgactaaaaaccctcaaaataactaaaatccta

SEQ ID NO: 28213 - DNA, 631 bp, Artificial Sequence
  chemically treated genomic DNA (Homo sapiens) CpG-island No: 28213
ttacgttcggaggggtttcgttgatcgggttgcggggggagatgaggggttgcgcgggtgcggtcgggtatcgggttgcggttttcgattcgggaaaggagtagaaaatttcgggaggaggtgtgcgcgttttaagggtcggacgatttgtcgggagtcggttaggggattttcgcgttttggagggttgagcgtatttaagggggaacgcgagtttcggagaatagttgtcgatcgcgggttacggttttgttagttagtgtattgggtcgaggattttacggtcgcgatcggtgttcgatcgttgtcgtcgggagaggtagttgggtttggttacggagtcgcggttgtcgttttggtgttttgttttgtcgttttcggatggcgcggcgtgtatttagtttcggcggcggaggttgcgaggtcgggtttcggttcggcgtcgttttagttagtagtagattttcgggttcggtcggtttcgatttagtttttttttttttcgtcgcgcggatttcggagggaaggagattcgagggtgggggtggggacgtttggattacggtttggtcggtaagtttagagttggggttcgtaggattcgggcggggcgataagggtatttttaggt

SEQ ID NO: 28214 - DNA, 631 bp, Artificial Sequence
  chemically treated genomic DNA (Homo sapiens) CpG-island No: 28214
acctaaaaatacccttatcgccccgcccgaatcctacgaaccccaactctaaacttaccgaccaaaccgtaatccaaacgtccccacccccaccctcgaatctccttccctccgaaatccgcgcgacgaaaaaaaaaaaaactaaatcgaaaccgaccgaacccgaaaatctactactaactaaaacgacgccgaaccgaaacccgacctcgcaacctccgccgccgaaactaaatacacgccgcgccatccgaaaacgacaaaacaaaacaccaaaacgacaaccgcgactccgtaaccaaacccaactacctctcccgacgacaacgatcgaacaccgatcgcgaccgtaaaatcctcgacccaatacactaactaacaaaaccgtaacccgcgatcgacaactattctccgaaactcgcgttcccccttaaatacgctcaaccctccaaaacgcgaaaatcccctaaccgactcccgacaaatcgtccgacccttaaaacgcgcacacctcctcccgaaattttctactcctttcccgaatcgaaaaccgcaacccgatacccgaccgcacccgcgcaacccctcatctccccccgcaacccgatcaacgaaacccctccgaacgtaa

SEQ ID NO: 28215 - DNA, 631 bp, Artificial Sequence
  chemically treated genomic DNA (Homo sapiens) CpG-island No: 28215
gtttgagggtatttttgtcgtttcgttcgggttttgcgggttttagttttgggtttgtcgattagatcgtgatttagacgtttttatttttattttcgagttttttttttttcggagttcgcgcggcggaaggaggagggattgagtcggggtcggtcgggttcggagatttgttgttggttggggcggcgtcgggtcggggttcggtttcgtagttttcgtcgtcggggttaagtgtacgtcgcgttattcgagagcggtagagtagagtattaaagcggtaatcgcggtttcgtaattaagtttagttgtttttttcggcggtagcggtcgggtatcgatcgcggtcgtggggttttcggtttagtgtattaattggtagggtcgtagttcgcgatcggtagttgtttttcggggttcgcgtttttttttgggtgcgtttagttttttagagcgcgggagttttttggtcggttttcggtaggtcgttcggtttttggagcgcgtatattttttttcggagttttttgtttttttttcgggtcggaggtcgtagttcgatgttcggtcgtattcgcgtagttttttattttttttcgtagttcggttagcggggttttttcgggcgtgg

SEQ ID NO: 28216 - DNA, 631 bp, Artificial Sequence
  chemically treated genomic DNA (Homo sapiens) CpG-island No: 28216
ccacgcccgaaaaaaccccgctaaccgaactacgaaaaaaaataaaaaactacgcgaatacgaccgaacatcgaactacgacctccgacccgaaaaaaaaacaaaaaactccgaaaaaaaatatacgcgctccaaaaaccgaacgacctaccgaaaaccgaccaaaaaactcccgcgctctaaaaaactaaacgcacccaaaaaaaaacgcgaaccccgaaaaacaactaccgatcgcgaactacgaccctaccaattaatacactaaaccgaaaaccccacgaccgcgatcgatacccgaccgctaccgccgaaaaaaacaactaaacttaattacgaaaccgcgattaccgctttaatactctactctaccgctctcgaataacgcgacgtacacttaaccccgacgacgaaaactacgaaaccgaaccccgacccgacgccgccccaaccaacaacaaatctccgaacccgaccgaccccgactcaatccctcctccttccgccgcgcgaactccgaaaaaaaaaaaactcgaaaataaaaataaaaacgtctaaatcacgatctaatcgacaaacccaaaactaaaacccgcaaaacccgaacgaaacgacaaaaataccctcaaac

SEQ ID NO: 28217 - DNA, 742 bp, Artificial Sequence
  chemically treated genomic DNA (Homo sapiens) CpG-island No: 28217
ttcgtagacgcgagtagaggtaggtagtcggggcgaaggggcggtattcggttcggagttttattttttggcgttagcgtacgcgttttttcgggtttatttggtcgcggtcggatagcgagaaggtggcgtggttggcgaagcgtgcgttgtttaggcggggcgcgcggtcgggaatttcgggcgcgggcggggggttgggcgtgtcgggagtgtcgggtatcggggatatttcgttggttaagtttagcgtttttatttggcgcgttaggcgttcgagttgcgtttgtagtcgttggttgtttcgttgtaggtcggttatcgtgcgcgttagggggtcggttaggcgtatcgtttttgttattcgtcgttttacgtcgcgttgtagttttcgtatgttttcgtgtagcgcgcgtatcgtattttttagcgtcgtttcgtagcggtttagcgtttcgcgtatagtgcgcgttttttgggcgtcgggggtcggttttatggtttagtagagcgcgcgggtcgagagcgggttagacgggggagaagattcgagtttcgtagtttcgggtcgcgattggtcgttcgtggttggtttcgttcgaggggttgtcggggaggcgggcgcggggcggggtttcgggggcggagtcggggacgatttcgggatatttttttgttttggagtttagcgggacggtgcggagggagagttcgtttagtttttttttttttcggtttttaa

SEQ ID NO: 28218 - DNA, 742 bp, Artificial Sequence
  chemically treated genomic DNA (Homo sapiens) CpG-island No: 28218
ttaaaaaccgaaaaaaaaaaaaactaaacgaactctccctccgcaccgtcccgctaaactccaaaacaaaaaaatatcccgaaatcgtccccgactccgcccccgaaaccccgccccgcgcccgcctccccgacaacccctcgaacgaaaccaaccacgaacgaccaatcgcgacccgaaactacgaaactcgaatcttctcccccgtctaacccgctctcgacccgcgcgctctactaaaccataaaaccgacccccgacgcccaaaaaacgcgcactatacgcgaaacgctaaaccgctacgaaacgacgctaaaaaatacgatacgcgcgctacacgaaaacatacgaaaactacaacgcgacgtaaaacgacgaataacaaaaacgatacgcctaaccgaccccctaacgcgcacgataaccgacctacaacgaaacaaccaacgactacaaacgcaactcgaacgcctaacgcgccaaataaaaacgctaaacttaaccaacgaaatatccccgatacccgacactcccgacacgcccaaccccccgcccgcgcccgaaattcccgaccgcgcgccccgcctaaacaacgcacgcttcgccaaccacgccaccttctcgctatccgaccgcgaccaaataaacccgaaaaaacgcgtacgctaacgccaaaaaataaaactccgaaccgaataccgccccttcgccccgactacctacctctactcgcgtctacgaa

SEQ ID NO: 28219 - DNA, 742 bp, Artificial Sequence
  chemically treated genomic DNA (Homo sapiens) CpG-island No: 28219
ttaagagtcggggaggggagaggttgggcgagtttttttttcgtatcgtttcgttgggttttagggtaggggggtgtttcggagtcgttttcggtttcgttttcgaggtttcgtttcgcgttcgttttttcggtagtttttcgagcgaagttagttacggacggttagtcgcggttcggagttgcggagttcggattttttttttcgtttggttcgttttcgattcgcgcgttttgttgggttatggagtcggttttcgacgtttaggaggcgcgtattgtgcgcgaggcgttgggtcgttacgaggcggcgttggagggtgcggtgcgcgcgttgtacgaggatatgcgggggttgtagcgcggcgtggagcggcgagtggtagaggcgatgcgtttggtcggttttttggcgcgtacggtgatcgatttgtagcgggataattagcggttgtaggcgtagttcgagcgtttgacgcgttaggtggaggcgttgggtttggttagcgggatgttttcggtgttcggtattttcggtacgtttagtttttcgttcgcgttcggggttttcgatcgcgcgtttcgtttgggtagcgtacgtttcgttagttacgttattttttcgttgttcggtcgcggttaggtgagttcgggggagcgcgtgcgttggcgttagggagtggggtttcgaatcgggtgtcgttttttcgtttcgattgtttgtttttgttcgcgtttgcggg

SEQ ID NO: 28220 - DNA, 742 bp, Artificial Sequence
  chemically treated genomic DNA (Homo sapiens) CpG-island No: 28220
cccgcaaacgcgaacaaaaacaaacaatcgaaacgaaaaaacgacacccgattcgaaaccccactccctaacgccaacgcacgcgctcccccgaactcacctaaccgcgaccgaacaacgaaaaaataacgtaactaacgaaacgtacgctacccaaacgaaacgcgcgatcgaaaaccccgaacgcgaacgaaaaactaaacgtaccgaaaataccgaacaccgaaaacatcccgctaaccaaacccaacgcctccacctaacgcgtcaaacgctcgaactacgcctacaaccgctaattatcccgctacaaatcgatcaccgtacgcgccaaaaaaccgaccaaacgcatcgcctctaccactcgccgctccacgccgcgctacaacccccgcatatcctcgtacaacgcgcgcaccgcaccctccaacgccgcctcgtaacgacccaacgcctcgcgcacaatacgcgcctcctaaacgtcgaaaaccgactccataacccaacaaaacgcgcgaatcgaaaacgaaccaaacgaaaaaaaaaatccgaactccgcaactccgaaccgcgactaaccgtccgtaactaacttcgctcgaaaaactaccgaaaaaacgaacgcgaaacgaaacctcgaaaacgaaaccgaaaacgactccgaaacacccccctaccctaaaacccaacgaaacgatacgaaaaaaaaactcgcccaacctctcccctccccgactcttaa

SEQ ID NO: 28221 - DNA, 663 bp, Artificial Sequence
  chemically treated genomic DNA (Homo sapiens) CpG-island No: 28221
tatattttatttcggatttttgcggaattaagtatattttcgtgtttaatggtgataataaggtgtacgttttcgcgtattttggtatttaggttcgcgattacgtgtttttagttttaattttttgggttcgtcgtcgtttttttgtcgggatatgcgtagtttttgttttagatttcgttattttattttcggtttgttacgtagatattttagtagttttttcgtggtcgtaagtcgcgttttttgtttaggtttcgtaatgttttagaagaagtttaagaattcgcgattgtgttttaataggttatagcggtcggtaggtcgggcgttattttgcgtcgtttttttaggcgatatcggttgggcgggatttcggttttttattttcgttatatttatcgaaatacgaaatacgtgtgtttcggttttagtcgtttttaggttagggtacggcgtatgcgtatcggtttgtgtcggttcggaggcggaagaattcggaggggcgggggaattaagagagatcggtttagagttaaaagagcggtattttcgtcgtagttttgagcggaagtttttcgtttagcggcgttttattttttttagttttttgtttatattcgtttcgttttggcggttgtggtatttgtttttttggagttt

SEQ ID NO: 28222 - DNA, 663 bp, Artificial Sequence
  chemically treated genomic DNA (Homo sapiens) CpG-island No: 28222
aaactccaaaaaaacaaataccacaaccgccaaaacgaaacgaatataaacaaaaaactaaaaaaaataaaacgccgctaaacgaaaaacttccgctcaaaactacgacgaaaataccgctcttttaactctaaaccgatctctcttaattcccccgcccctccgaattcttccgcctccgaaccgacacaaaccgatacgcatacgccgtaccctaacctaaaaacgactaaaaccgaaacacacgtatttcgtatttcgataaatataacgaaaataaaaaaccgaaatcccgcccaaccgatatcgcctaaaaaaacgacgcaaaataacgcccgacctaccgaccgctataacctattaaaacacaatcgcgaattcttaaacttcttctaaaacattacgaaacctaaacaaaaaacgcgacttacgaccacgaaaaaactactaaaatatctacgtaacaaaccgaaaataaaataacgaaatctaaaacaaaaactacgcatatcccgacaaaaaaacgacgacgaacccaaaaaattaaaactaaaaacacgtaatcgcgaacctaaataccaaaatacgcgaaaacgtacaccttattatcaccattaaacacgaaaatatacttaattccgcaaaaatccgaaataaaatata

SEQ ID NO: 28223 - DNA, 663 bp, Artificial Sequence
  chemically treated genomic DNA (Homo sapiens) CpG-island No: 28223
gggttttaaaggggtagatgttatagtcgttagggcggagcgggtgtgagtagaaggttgggaaagatgggacgtcgttaggcgagggattttcgtttagagttacggcggaaatgtcgtttttttaattttgggtcggttttttttggttttttcgttttttcgggttttttcgttttcgagtcgatataaatcggtgcgtatgcgtcgtgttttgatttggaagcggttggggtcggagtatacgtgtttcgtgtttcggtgagtgtggcggagatggagagtcgggatttcgtttagtcgatgtcgtttggagaagcgacgtagagtggcgttcggtttgtcgatcgttatggtttattgaagtatagtcgcgagtttttggattttttttgggatattgcgaagtttgagtaggagacgcgatttgcggttacggagaagttgttggagtatttgcgtggtaggtcgaaggtggagtggcggggtttggggtagaggttgcgtatatttcggtaaggaagcggcggcgggtttagggagttgagattgggggtacgtggtcgcgaatttggatgttagggtgcgcgggggcgtgtattttgttgttattattgaatacgagggtgtgtttggtttcgtaggggttcgagatgaaatatg

SEQ ID NO: 28224 - DNA, 663 bp, Artificial Sequence
  chemically treated genomic DNA (Homo sapiens) CpG-island No: 28224
catatttcatctcgaacccctacgaaaccaaacacaccctcgtattcaataataacaacaaaatacacgcccccgcgcaccctaacatccaaattcgcgaccacgtacccccaatctcaactccctaaacccgccgccgcttccttaccgaaatatacgcaacctctaccccaaaccccgccactccaccttcgacctaccacgcaaatactccaacaacttctccgtaaccgcaaatcgcgtctcctactcaaacttcgcaatatcccaaaaaaaatccaaaaactcgcgactatacttcaataaaccataacgatcgacaaaccgaacgccactctacgtcgcttctccaaacgacatcgactaaacgaaatcccgactctccatctccgccacactcaccgaaacacgaaacacgtatactccgaccccaaccgcttccaaatcaaaacacgacgcatacgcaccgatttatatcgactcgaaaacgaaaaaacccgaaaaaacgaaaaaaccaaaaaaaaccgacccaaaattaaaaaaacgacatttccgccgtaactctaaacgaaaatccctcgcctaacgacgtcccatctttcccaaccttctactcacacccgctccgccctaacgactataacatctacccctttaaaaccc

SEQ ID NO: 28225 - DNA, 597 bp, Artificial Sequence
  chemically treated genomic DNA (Homo sapiens) CpG-island No: 28225
gggtcgtagttgttagagtcgcggcggcgaacgaggcgtagcgagttgagcggtggtagcgtcgtagtcggggtcggagcgtaggagtcgacggggttcgattaggatggtgtagtggcggtttcgcggcgtacgtacgcgttgagcgggtttagtttgggtttcgcgtttttcgcgtttttcgtcgtttcgattcgggtcggtatgatgtgtttggaatgcgtttcggcggcggcgggcggcgcggaggaggaggaggcggacgcggagcggcggcgtcggcgtcggggggcgtagcgaggggttggcggtagcggttgttgcggggcgcggggcgcgggcggcgttggagtttcggtcgcgggcgatgaggtgtagacgttgtcgggtagcgtaaggcgggtttcgatcggatttttcggtattttcggtattttcggttgcgtagttattgtaaagggtttcggcgtttagtagtttaaatcggttagtttgggtcgcgggcggggggtagtcgtcgttatttttagtttgggtaacgtgtttaattatttggataggtatatcgtggtaggtgagcgagtgttttatttagtt

SEQ ID NO: 28226 - DNA, 597 bp, Artificial Sequence
  chemically treated genomic DNA (Homo sapiens) CpG-island No: 28226
aactaaataaaacactcgctcacctaccacgatatacctatccaaataattaaacacgttacccaaactaaaaataacgacgactaccccccgcccgcgacccaaactaaccgatttaaactactaaacgccgaaaccctttacaataactacgcaaccgaaaataccgaaaataccgaaaaatccgatcgaaacccgccttacgctacccgacaacgtctacacctcatcgcccgcgaccgaaactccaacgccgcccgcgccccgcgccccgcaacaaccgctaccgccaacccctcgctacgccccccgacgccgacgccgccgctccgcgtccgcctcctcctcctccgcgccgcccgccgccgccgaaacgcattccaaacacatcataccgacccgaatcgaaacgacgaaaaacgcgaaaaacgcgaaacccaaactaaacccgctcaacgcgtacgtacgccgcgaaaccgccactacaccatcctaatcgaaccccgtcgactcctacgctccgaccccgactacgacgctaccaccgctcaactcgctacgcctcgttcgccgccgcgactctaacaactacgaccc

SEQ ID NO: 28227 - DNA, 597 bp, Artificial Sequence
  chemically treated genomic DNA (Homo sapiens) CpG-island No: 28227
ggttgggtggggtattcgtttatttgttacggtgtatttgtttaggtagttgagtacgttgtttaagttgaggatggcggcggttgtttttcgttcgcggtttaagttggtcggtttgggttgttgagcgtcggggttttttgtagtagttgcgtagtcgggggtgtcgggggtgtcggggggttcggtcggggttcgttttacgttgttcgatagcgtttgtattttatcgttcgcggtcgagattttagcgtcgttcgcgtttcgcgtttcgtagtaatcgttatcgttagtttttcgttgcgtttttcggcgtcggcgtcgtcgtttcgcgttcgtttttttttttttcgcgtcgttcgtcgtcgtcgaggcgtattttaggtatattatgtcggttcggatcggggcggcggggggcgcggggggcgcggggtttaggttgggttcgtttagcgcgtgcgtgcgtcgcggagtcgttattgtattattttggtcgggtttcgtcggtttttgcgtttcggtttcggttgcggcgttgttatcgtttagttcgttgcgtttcgttcgtcgtcgcggttttgatagttgcggttt

SEQ ID NO: 28228 - DNA, 597 bp, Artificial Sequence
  chemically treated genomic DNA (Homo sapiens) CpG-island No: 28228
aaaccgcaactatcaaaaccgcgacgacgaacgaaacgcaacgaactaaacgataacaacgccgcaaccgaaaccgaaacgcaaaaaccgacgaaacccgaccaaaataatacaataacgactccgcgacgcacgcacgcgctaaacgaacccaacctaaaccccgcgccccccgcgccccccgccgccccgatccgaaccgacataatatacctaaaatacgcctcgacgacgacgaacgacgcgaaaaaaaaaaaaacgaacgcgaaacgacgacgccgacgccgaaaaacgcaacgaaaaactaacgataacgattactacgaaacgcgaaacgcgaacgacgctaaaatctcgaccgcgaacgataaaatacaaacgctatcgaacaacgtaaaacgaaccccgaccgaaccccccgacacccccgacacccccgactacgcaactactacaaaaaaccccgacgctcaacaacccaaaccgaccaacttaaaccgcgaacgaaaaacaaccgccgccatcctcaacttaaacaacgtactcaactacctaaacaaatacaccgtaacaaataaacgaataccccacccaacc

SEQ ID NO: 28229 - DNA, 531 bp, Artificial Sequence
  chemically treated genomic DNA (Homo sapiens) CpG-island No: 28229
acgttcggtttagtttttattttattgtattttttttttttttcgttttttttttgtattttttttcgtacgtatttttttttttttattttatattattgttttatattttttattcgtttttttaatatattttaatttttcgtattattcgtttatttttatatattattatttttttttttttttttttttttttacgttttttcgatttattttttttttttttgattttttatttttattttgatttttttttttttttttattttatatttcgcgcgtcgcgcggtaatcgtattattttttcgtttatttattatttcgtttttttttttttcgttatattttttatcgtttattttttttttttttttttttatttttttattatttttcgttattttttattttttttttatttttatttcgtcgtttttatttattttttattttattatatttttaatttcgttattttttttattttttttacgttcggtcgtttattttattcgttttataaatttt

SEQ ID NO: 28230 - DNA, 531 bp, Artificial Sequence
  chemically treated genomic DNA (Homo sapiens) CpG-island No: 28230
aaaatttataaaacgaataaaataaacgaccgaacgtaaaaaaaataaaaaaaataacgaaattaaaaatataataaaataaaaaataaataaaaacgacgaaataaaaataaaaaaaaaataaaaaataacgaaaaataataaaaaaataaaaaaaaaaaaaaaaaaaataaacgataaaaaatataacgaaaaaaaaaaaaacgaaataataaataaacgaaaaaataatacgattaccgcgcgacgcgcgaaatataaaataaaaaaaaaaaaaaaaatcaaaataaaaataaaaaatcaaaaaaaaaaaaaataaatcgaaaaaacgtaaaaaaaaaaaaaaaaaaaaaaaaataataatatataaaaataaacgaataatacgaaaaattaaaatatattaaaaaaacgaataaaaaatataaaacaataatataaaataaaaaaaaaaaaatacgtacgaaaaaaaatacaaaaaaaaaacgaaaaaaaaaaaaaatacaataaaataaaaactaaaccgaacgt

SEQ ID NO: 28231 - DNA, 531 bp, Artificial Sequence
  chemically treated genomic DNA (Homo sapiens) CpG-island No: 28231
ggggtttatggagcgggtggggtgggcggtcgggcgtggggagggtggggggggtggcggggttagagatatggtggggtgaggggtaggtgggagcggcgaggtgggggtggggagagagtgggaggtggcggggagtgatggggagatggagagaggagagagaggggtgggcggtgggggatgtggcgaggggggggggggcggaatggtaggtaggcgggaaggtggtgcgattgtcgcgcggcgcgcgagatatggagtaggaggggggggaagagttagagtaagggtggggggttaggggaggaggaggtgggtcgggaagacgtaggggaaaaagggggagggagggggtggtggtgtgtggaggtgggcgggtaatgcggggggttggggtgtgttgggagagcgggtggagagtgtggggtagtggtgtggggtagggaagaggggatgcgtgcggggggggatgtagagggggggcgggggagaggggaggtgtagtagagtgggggttggatcgggcgt

SEQ ID NO: 28232 - DNA, 531 bp, Artificial Sequence
  chemically treated genomic DNA (Homo sapiens) CpG-island No: 28232
acgcccgatccaacccccactctactacacctcccctctcccccgccccccctctacatccccccccgcacgcatcccctcttccctaccccacaccactaccccacactctccacccgctctcccaacacaccccaaccccccgcattacccgcccacctccacacaccaccaccccctccctccccctttttcccctacgtcttcccgacccacctcctcctcccctaaccccccacccttactctaactcttcccccccctcctactccatatctcgcgcgccgcgcgacaatcgcaccaccttcccgcctacctaccattccgcccccccccccctcgccacatcccccaccgcccacccctctctctcctctctccatctccccatcactccccgccacctcccactctctccccacccccacctcgccgctcccacctacccctcaccccaccatatctctaaccccgccaccccccccaccctccccacgcccgaccgcccaccccacccgctccataaacccc

SEQ ID NO: 28233 - DNA, 940 bp, Artificial Sequence
  chemically treated genomic DNA (Homo sapiens) CpG-island No: 28233
  unsure (152)
tatatttacggttcgatacgtttcggtcgttttagtatttatcgataggggggggtttttaaaaataggcggcgttttcgaacggggagcgcgggcgcggtcgtacgacgcgcgtttaaacgttcggtagggagtacggaagattattcgtntcgtcgatttttattttttcgttaggcgggcgttttaaataagtttggtcgcgcggttttagggtttatttatttttttattaaatttaaggggttcgtcggtttaaaatatttttttttcggggcgcgttaaaaaaaaaaaaaatgggggcgtcggggggttcgcgttcgggtcgttcgtataaagtcgtagaggattttcgatttcggagttacgatagcggtggttcgggagtcgcggggatatcgcgattttacggtttaggcggttttttatatttcgcggagttttagttttttagagtcgcgagttttcgttttaggtcgcgtaaatcgagttcgatttttttcggcgaatagaacgggacggagttagcgttagttagtcgcgttcggtcgtttaaggaatcgtataattttttcgtttttagtcggcggttttttcgttttcggtcgtaagggtcgcgaattacgtcgtttttagggttagtttcgttttgtcgtcggcgagtaggttcgcgttagatacgtagttttatgcgcgttttattttcgattatttacgttcggagttttcggaggttttcgggtttttacgcgagcggttttcgtttcgcgaacgcgagattaggagcggagttttcgaggtcgtaagggtaatagagtcggagcgagtcgtttcgtacgacggtttacggaattaatcgttagcgggagacgtatcgtcggatattttagggttatacggtaaagcggcggcgcgcgtatcggtatcggtttcgcggttt

SEQ ID NO: 28234 - DNA, 940 bp, Artificial Sequence
  chemically treated genomic DNA (Homo sapiens) CpG-island No: 28234
  unsure (789)
aaaccgcgaaaccgataccgatacgcgcgccgccgctttaccgtataaccctaaaatatccgacgatacgtctcccgctaacgattaattccgtaaaccgtcgtacgaaacgactcgctccgactctattacccttacgacctcgaaaactccgctcctaatctcgcgttcgcgaaacgaaaaccgctcgcgtaaaaacccgaaaacctccgaaaactccgaacgtaaataatcgaaaataaaacgcgcataaaactacgtatctaacgcgaacctactcgccgacgacaaaacgaaactaaccctaaaaacgacgtaattcgcgacccttacgaccgaaaacgaaaaaaccgccgactaaaaacgaaaaaattatacgattccttaaacgaccgaacgcgactaactaacgctaactccgtcccgttctattcgccgaaaaaaatcgaactcgatttacgcgacctaaaacgaaaactcgcgactctaaaaaactaaaactccgcgaaatataaaaaaccgcctaaaccgtaaaatcgcgatatccccgcgactcccgaaccaccgctatcgtaactccgaaatcgaaaatcctctacgactttatacgaacgacccgaacgcgaaccccccgacgcccccattttttttttttttaacgcgccccgaaaaaaaaatattttaaaccgacgaaccccttaaatttaataaaaaaataaataaaccctaaaaccgcgcgaccaaacttatttaaaacgcccgcctaacgaaaaaataaaaatcgacganacgaataatcttccgtactccctaccgaacgtttaaacgcgcgtcgtacgaccgcgcccgcgctccccgttcgaaaacgccgcctatttttaaaaacccccccctatcgataaatactaaaacgaccgaaacgtatcgaaccgtaaatata

SEQ ID NO: 28235 - DNA, 940 bp, Artificial Sequence
  chemically treated genomic DNA (Homo sapiens) CpG-island No: 28235
  unsure (789)
gggtcgcggggtcggtgtcggtgcgcgcgtcgtcgttttgtcgtgtggttttggggtgttcggcggtgcgtttttcgttggcggttggtttcgtgggtcgtcgtgcggggcggttcgtttcggttttgttgtttttgcggtttcgggggtttcgtttttggtttcgcgttcgcggggcgggggtcgttcgcgtgggggttcgggggttttcgggggtttcgggcgtgggtggtcgggggtggggcgcgtatggggttgcgtgtttggcgcgggtttgttcgtcggcggtagggcggggttggttttgggggcggcgtggttcgcggtttttgcggtcgggggcgggggggtcgtcggttgggggcgggggggttgtgcggttttttgggcggtcgggcgcggttggttggcgttggtttcgtttcgttttgttcgtcggggggggtcgggttcggtttgcgcggtttggggcgggggttcgcggttttggggggttggggtttcgcggggtgtggggggtcgtttgggtcgtggggtcgcggtgttttcgcggttttcgggttatcgttgtcgtggtttcggggtcgggggttttttgcggttttgtgcgggcggttcgggcgcgggtttttcggcgtttttattttttttttttttggcgcgtttcggggggggggtgttttgggtcgacgggttttttgggtttggtgggggggtgggtgggttttggggtcgcgcggttaaatttatttaaggcgttcgtttggcgagaaggtgggggtcggcggngcgggtggtttttcgtgttttttgtcgggcgtttgggcgcgcgtcgtgcggtcgcgttcgcgtttttcgttcgggggcgtcgtttgtttttgggggtttttttttgtcggtgggtgttaaaacggtcggggcgtgtcgggtcgtgggtgtg

SEQ ID NO: 28236 - DNA, 940 bp, Artificial Sequence
  chemically treated genomic DNA (Homo sapiens) CpG-island No: 28236
  unsure (152)
cacacccacgacccgacacgccccgaccgttttaacacccaccgacaaaaaaaaacccccaaaaacaaacgacgcccccgaacgaaaaacgcgaacgcgaccgcacgacgcgcgcccaaacgcccgacaaaaaacacgaaaaaccacccgcnccgccgacccccaccttctcgccaaacgaacgccttaaataaatttaaccgcgcgaccccaaaacccacccacccccccaccaaacccaaaaaacccgtcgacccaaaacaccccccccccgaaacgcgccaaaaaaaaaaaaaataaaaacgccgaaaaacccgcgcccgaaccgcccgcacaaaaccgcaaaaaacccccgaccccgaaaccacgacaacgataacccgaaaaccgcgaaaacaccgcgaccccacgacccaaacgaccccccacaccccgcgaaaccccaaccccccaaaaccgcgaacccccgccccaaaccgcgcaaaccgaacccgaccccccccgacgaacaaaacgaaacgaaaccaacgccaaccaaccgcgcccgaccgcccaaaaaaccgcacaacccccccgcccccaaccgacgacccccccgcccccgaccgcaaaaaccgcgaaccacgccgcccccaaaaccaaccccgccctaccgccgacgaacaaacccgcgccaaacacgcaaccccatacgcgccccacccccgaccacccacgcccgaaacccccgaaaacccccgaacccccacgcgaacgacccccgccccgcgaacgcgaaaccaaaaacgaaacccccgaaaccgcaaaaacaacaaaaccgaaacgaaccgccccgcacgacgacccacgaaaccaaccgccaacgaaaaacgcaccgccgaacaccccaaaaccacacgacaaaacgacgacgcgcgcaccgacaccgaccccgcgaccc

SEQ ID NO: 28237 - DNA, 1000 bp, Artificial Sequence
  chemically treated genomic DNA (Homo sapiens) CpG-island No: 28237
  unsure (332, 383, 464)
aatacgcgttttgcggttttatttttttttcgtttttttcgttcgttttttcgttttcgtaggcgttcgtcgcgcgcggcgtttcgcgtttttgttttcgtcgtcgtcgcgggttcgttcgtattttttttttttcgcgttttcggcgcgggttatttttgggttttttttcgttcgtcgttcgttttttcgtattttttcgttttattttatttacgttttttacgttcgttcgcgtagcgtattttcgtcggttttcgtgcggtttggtacgcgcgtttcgcgtttcgtcgttattttcgggtttttttttttttttcgttttcgcgagngtttcgcgtcgtttattcgtttttttttttcgttggttttacggattattnttcgtgcggttcgcgttttcgcgtcgtttttcggcgcgttatatcgtttacgcgggcgacgtcgtcgaagcggtacgatanaggagaaggtaatgtggtgtgggtcgatttcggttcgtcgaggcgcgatcgtagagtcggtcgtttttttttcgttattgttttaggttttatcgtttcgcggtttcgggcgcgtttttcgggcgtcgggggcggcgtatcgattcgttcgtcgcgggttcgttcggcgttttcgttcgttcgcgtgcggcgagggtttcgcgttatttcgttattcgcgacgggttcgcgagttcgggcgtcgcgcgtttcgtcgtttcgtatcgtcgttataggatttcgggattcgtaattttattagttattcggagcggtcgtttcggcgtcgcgtcgcgttttattcgcgggtcggggcgttcgcgcgcgcgttattatgttcgttttggcgggtttttagacggttttcgaggtacgtttttttcgacgtttcgtcgtttattcgcgttcgggtatagtcgaggagtgtttttcgtttttcgttttttagggaaggtttttttttttcggtttcggcgggtatatttatattttgcggt

SEQ ID NO: 28238 - DNA, 1000 bp, Artificial Sequence
  chemically treated genomic DNA (Homo sapiens) CpG-island No: 28238
  unsure (537, 618, 669)
accgcaaaatataaatatacccgccgaaaccgaaaaaaaaaaaccttccctaaaaaacgaaaaacgaaaaacactcctcgactatacccgaacgcgaataaacgacgaaacgtcgaaaaaaacgtacctcgaaaaccgtctaaaaacccgccaaaacgaacataataacgcgcgcgcgaacgccccgacccgcgaataaaacgcgacgcgacgccgaaacgaccgctccgaataactaataaaattacgaatcccgaaatcctataacgacgatacgaaacgacgaaacgcgcgacgcccgaactcgcgaacccgtcgcgaataacgaaataacgcgaaaccctcgccgcacgcgaacgaacgaaaacgccgaacgaacccgcgacgaacgaatcgatacgccgcccccgacgcccgaaaaacgcgcccgaaaccgcgaaacgataaaacctaaaacaataacgaaaaaaaaacgaccgactctacgatcgcgcctcgacgaaccgaaatcgacccacaccacattaccttctcctntatcgtaccgcttcgacgacgtcgcccgcgtaaacgatataacgcgccgaaaaacgacgcgaaaacgcgaaccgcacgaanaataatccgtaaaaccaacgaaaaaaaaaaacgaataaacgacgcgaaacnctcgcgaaaacgaaaaaaaaaaaaaaacccgaaaataacgacgaaacgcgaaacgcgcgtaccaaaccgcacgaaaaccgacgaaaatacgctacgcgaacgaacgtaaaaaacgtaaataaaataaaacgaaaaaatacgaaaaaacgaacgacgaacgaaaaaaaacccaaaaataacccgcgccgaaaacgcgaaaaaaaaaaaatacgaacgaacccgcgacgacgacgaaaacaaaaacgcgaaacgccgcgcgcgacgaacgcctacgaaaacgaaaaaacgaacgaaaaaaacgaaaaaaaaataaaaccgcaaaacgcgtatt

SEQ ID NO: 28239 - DNA, 1000 bp, Artificial Sequence
  chemically treated genomic DNA (Homo sapiens) CpG-island No: 28239
  unsure (537, 618, 669)
atcgtagagtgtgggtgtgttcgtcggggtcgaggggggggagttttttttggggggcggggggcgggggatatttttcggttgtgttcgggcgcgggtgggcggcggggcgtcgaggggggcgtgtttcgggggtcgtttgggggttcgttagggcgggtatggtggcgcgcgcgcgagcgtttcggttcgcgggtggggcgcggcgcggcgtcggagcggtcgtttcgggtggttgatgagattgcgggtttcgaggttttgtggcggcggtgcggggcggcggggcgcgcggcgttcgggttcgcgggttcgtcgcgagtggcggggtggcgcgggattttcgtcgtacgcgagcgggcggggacgtcgagcgggttcgcggcgggcgagtcggtgcgtcgttttcggcgttcggggggcgcgttcggggtcgcggggcggtggagtttagggtagtggcggggggggagcggtcggttttgcggtcgcgtttcggcgggtcgaggtcggtttatattatattatttttttttntgtcgtgtcgtttcggcggcgtcgttcgcgtgggcgatgtggcgcgtcggggggcggcgcgggggcgcgggtcgtacgaanagtggttcgtggggttagcggggggggggggcgggtgggcggcgcgggatnttcgcgggggcgaaaaaaaagaaaaaattcgggggtggcgacggggcgcggggcgcgcgtattaggtcgtacgggggtcggcgggggtgcgttgcgcgggcgggcgtggggggcgtgggtggggtggggcgggggggtgcgggggggcgggcggcgggcgggggggggtttaggggtggttcgcgtcgggggcgcgagggggggggggtgcgggcgggttcgcggcggcggcggggataggggcgcggggcgtcgcgcgcggcgggcgtttgcggaggcggagaggcgggcgggaagggcgggggggaggtggggtcgtagggcgcgtgtt

SEQ ID NO: 28240 - DNA, 1000 bp, Artificial Sequence
  chemically treated genomic DNA (Homo sapiens) CpG-island No: 28240
  unsure (332, 383, 464)
aacacgcgccctacgaccccacctcccccccgcccttcccgcccgcctctccgcctccgcaaacgcccgccgcgcgcgacgccccgcgcccctatccccgccgccgccgcgaacccgcccgcaccccccccccctcgcgcccccgacgcgaaccacccctaaacccccccccgcccgccgcccgcccccccgcacccccccgccccaccccacccacgccccccacgcccgcccgcgcaacgcacccccgccgacccccgtacgacctaatacgcgcgccccgcgccccgtcgccacccccgaattttttcttttttttcgcccccgcgaanatcccgcgccgcccacccgccccccccccccgctaaccccacgaaccactnttcgtacgacccgcgcccccgcgccgccccccgacgcgccacatcgcccacgcgaacgacgccgccgaaacgacacgacanaaaaaaaaataatataatataaaccgacctcgacccgccgaaacgcgaccgcaaaaccgaccgctccccccccgccactaccctaaactccaccgccccgcgaccccgaacgcgccccccgaacgccgaaaacgacgcaccgactcgcccgccgcgaacccgctcgacgtccccgcccgctcgcgtacgacgaaaatcccgcgccaccccgccactcgcgacgaacccgcgaacccgaacgccgcgcgccccgccgccccgcaccgccgccacaaaacctcgaaacccgcaatctcatcaaccacccgaaacgaccgctccgacgccgcgccgcgccccacccgcgaaccgaaacgctcgcgcgcgcgccaccatacccgccctaacgaacccccaaacgacccccgaaacacgcccccctcgacgccccgccgcccacccgcgcccgaacacaaccgaaaaatatcccccgccccccgccccccaaaaaaaactcccccccctcgaccccgacgaacacacccacactctacgat

SEQ ID NO: 28241 - DNA, 1163 bp, Artificial Sequence
  chemically treated genomic DNA (Homo sapiens) CpG-island No: 28241
  unsure (127, 621, 907, 1007)
gtgcggcgcgttaatttcgtcgtttttttttatatttcgcgtttcgtacgtcgacgttcgtatcgtcgcgcgtcgcgtttcgtttgtttttcgttttttttcgtcgtttttatttcgttacgttttncggtcgggtatttaatcgatattttttgacgtttagtttttcgttcgtttaggcggtacgtcgtttgagtatcgtttttattttagtttatcgtttatattttttcgtatagttcgtatgtcgattatcgtcgacggtacgtattcgagtggtttcgtcgggtttcgacgcggttatattttatttaatacgttttcgttattttacgcggtatttattttttttttattaatatttttcgtcgttttttcgcgtcgttttttttcgttttcgtttttttttttcgtttaattcgtcgagtgtcgtagcgatcgatcgagttttttttcggttttcgcgttttttacgattatacgtcgttttttttattcgatttttatattattattacgtattcgcgaacgtattttatttttcgtcgtcgttcgttaaattatttttattcgtttcgcgcgtttcgcgtttttcgtacgcgtgttcggcgttgcgttttngagtatatttttatcgaatttttttatttttttgttatttatttaacgtttttttacgtatttcgtttattagtagcgaaagcgacgacgtcgattttttacgttcgttatcgacgcgacgtatatgttcgtgcgtcgtcgggttcgcggttacgcgcgtttttcgtcgtatatacgcgttttcgtacgttttatttagacgtttcgtcgcgttcgcgttattacggagttttattatcgcgtatcgtagagatcggacgaaaatacggaagtagttattattttngtattcgtttacgaaagtagttcgcgtcgttagtcgtatcgcgtcgcgattattttatcgttagattgtcgtatattatattcgagcgattacgcgaaangtaatacgtattttatttataataaattttttaatttttatttattcgtttgtattatttttattttttttttgttttcgcgttacgttattttttattatcgcgtttttatttttcgtttttatatcgttttttgtttcgattagtcgcgtttag

SEQ ID NO: 28242 - DNA, 1163 bp, Artificial Sequence
  chemically treated genomic DNA (Homo sapiens) CpG-island No: 28242
  unsure (157, 257, 543, 1037)
ctaaacgcgactaatcgaaacaaaaaacgatataaaaacgaaaaataaaaacgcgataataaaaaataacgtaacgcgaaaacaaaaaaaaaataaaaataatacaaacgaataaataaaaattaaaaaatttattataaataaaatacgtattacntttcgcgtaatcgctcgaatataatatacgacaatctaacgataaaataatcgcgacgcgatacgactaacgacgcgaactactttcgtaaacgaatacnaaaataataactacttccgtattttcgtccgatctctacgatacgcgataataaaactccgtaataacgcgaacgcgacgaaacgtctaaataaaacgtacgaaaacgcgtatatacgacgaaaaacgcgcgtaaccgcgaacccgacgacgcacgaacatatacgtcgcgtcgataacgaacgtaaaaaatcgacgtcgtcgctttcgctactaataaacgaaatacgtaaaaaaacgttaaataaataacaaaaaaataaaaaaattcgataaaaatatactcnaaaacgcaacgccgaacacgcgtacgaaaaacgcgaaacgcgcgaaacgaataaaaataatttaacgaacgacgacgaaaaataaaatacgttcgcgaatacgtaataataatataaaaatcgaataaaaaaaacgacgtataatcgtaaaaaacgcgaaaaccgaaaaaaaactcgatcgatcgctacgacactcgacgaattaaacgaaaaaaaaaaacgaaaacgaaaaaaaacgacgcgaaaaaacgacgaaaaatattaataaaaaaaaaataaataccgcgtaaaataacgaaaacgtattaaataaaatataaccgcgtcgaaacccgacgaaaccactcgaatacgtaccgtcgacgataatcgacatacgaactatacgaaaaaatataaacgataaactaaaataaaaacgatactcaaacgacgtaccgcctaaacgaacgaaaaactaaacgtcaaaaaatatcgattaaatacccgaccgnaaaacgtaacgaaataaaaacgacgaaaaaaaacgaaaaacaaacgaaacgcgacgcgcgacgatacgaacgtcgacgtacgaaacgcgaaatataaaaaaaaacgacgaaattaacgcgccgcac

SEQ ID NO: 28243 - DNA, 1163 bp, Artificial Sequence
  chemically treated genomic DNA (Homo sapiens) CpG-island No: 28243
  unsure (157, 257, 543, 1037)
ttgggcgcgattggtcggggtagggggcggtgtgggggcggggggtggaggcgcggtggtggggggtggcgtggcgcgagggtagggggagagtgagagtagtgtaggcgggtgggtgggggttggagggtttgttgtgggtggggtgcgtgttgtntttcgcgtggtcgttcgggtgtggtgtgcggtagtttggcggtggggtagtcgcggcgcggtgcggttggcggcgcgggttgttttcgtgggcgggtgtnggggtggtggttattttcgtgttttcgttcggtttttgcggtgcgcggtggtggggtttcgtagtggcgcgggcgcggcggggcgtttgggtggggcgtgcgggggcgcgtgtgtgcggcggagggcgcgcgtggtcgcggattcggcggcgtacgggtatgtacgtcgcgtcggtggcgggcgtgggggatcggcgtcgtcgttttcgttgttggtgggcggagtgcgtgagggggcgttgggtgggtggtagagaggtggagaggttcggtgggagtgtgtttnagggcgtaacgtcggatacgcgtgcggggggcgcggggcgcgcggggcgggtgggggtggtttggcgagcggcgacgaggggtggggtgcgttcgcggatgcgtggtggtggtgtaggggtcgggtggggggggcggcgtgtaatcgtggggggcgcgggggtcggaggggggttcgatcgatcgttgcggtattcggcgggttggacggggggggggggcgggggcgggggggggcggcgcgggggggcggcggggagtgttggtggggggggagtgggtgtcgcgtggggtggcgggggcgtgttgggtggggtgtggtcgcgtcgaggttcggcggggttattcgggtgcgtgtcgtcggcggtggtcggtatgcgggttgtacgggggggtgtgggcggtggattgaggtggggacggtgtttaggcggcgtgtcgtttgggcgggcggggggttgggcgttagggggtgtcggttgggtgttcggtcgnggggcgtggcggggtgggggcggcgggggggggcggggggtaggcggggcgcggcgcgcggcggtgcgggcgtcggcgtgcggggcgcggggtgtgggggggggcgacggagttggcgcgtcgtat

SEQ ID NO: 28244 - DNA, 1163 bp, Artificial Sequence
  chemically treated genomic DNA (Homo sapiens) CpG-island No: 28244
  unsure (127, 621, 907, 1007)
atacgacgcgccaactccgtcgcccccccccacaccccgcgccccgcacgccgacgcccgcaccgccgcgcgccgcgccccgcctaccccccgcccccccccgccgcccccaccccgccacgccccncgaccgaacacccaaccgacaccccctaacgcccaaccccccgcccgcccaaacgacacgccgcctaaacaccgtccccacctcaatccaccgcccacacccccccgtacaacccgcataccgaccaccgccgacgacacgcacccgaataaccccgccgaacctcgacgcgaccacaccccacccaacacgcccccgccaccccacgcgacacccactccccccccaccaacactccccgccgcccccccgcgccgcccccccccgcccccgccccccccccccgtccaacccgccgaataccgcaacgatcgatcgaacccccctccgacccccgcgccccccacgattacacgccgccccccccacccgacccctacaccaccaccacgcatccgcgaacgcaccccacccctcgtcgccgctcgccaaaccacccccacccgccccgcgcgccccgcgccccccgcacgcgtatccgacgttacgccctnaaacacactcccaccgaacctctccacctctctaccacccacccaacgccccctcacgcactccgcccaccaacaacgaaaacgacgacgccgatcccccacgcccgccaccgacgcgacgtacatacccgtacgccgccgaatccgcgaccacgcgcgccctccgccgcacacacgcgcccccgcacgccccacccaaacgccccgccgcgcccgcgccactacgaaaccccaccaccgcgcaccgcaaaaaccgaacgaaaacacgaaaataaccaccaccccnacacccgcccacgaaaacaacccgcgccgccaaccgcaccgcgccgcgactaccccaccgccaaactaccgcacaccacacccgaacgaccacgcgaaanacaacacgcaccccacccacaacaaaccctccaacccccacccacccgcctacactactctcactctccccctaccctcgcgccacgccaccccccaccaccgcgcctccaccccccgcccccacaccgccccctaccccgaccaatcgcgcccaa

SEQ ID NO: 28245 - DNA, 694 bp, Artificial Sequence
  chemically treated genomic DNA (Homo sapiens) CpG-island No: 28245
ttttttttcgttatttattcgttttaatttttcgcgtcgttttcgttttcgtcggtcgcgtttcggcgcgttacggtgagttttcggcgtcgtcggtcgtttttcgtttttatcgtcgtatttttgaggcggcgttttttcgtcggttcgtcggagggttttcgtaatttttatttcggggacgttcgttttcgattttagttattcgtttttttttttcggtcgtttttatcgtttcgttaaatatagtttcgggagtttttattatttcgtagattttttatattttattacgttttttttcggcgcgtcgttattttttacgtttttttattgcggtttcggttcgcgttttatttagtttcgttcgcgtcgggggcgtggaatatcgcgcggttttattttattttatatcgaaggtggttacgtatcgagttttggttgcgcgttttacgtcggggcgtgtcgtcgttacggttttttcgcgttaatttcgtatttttttttcgtatgcgatttattttttttatacgtcgatattttacgcggtcgttcggcggagttggaagggtcgcgtaagaaagagttatattcgttgtgtatttcgtttatcgtcgtttttatcgtaatatattatcggtatttgttcgtgtcgttatattttcggttatattcgaatatattattaatttat

SEQ ID NO: 28246 - DNA, 694 bp, Artificial Sequence
  chemically treated genomic DNA (Homo sapiens) CpG-island No: 28246
ataaattaataatatattcgaatataaccgaaaatataacgacacgaacaaataccgataatatattacgataaaaacgacgataaacgaaatacacaacgaatataactctttcttacgcgacccttccaactccgccgaacgaccgcgtaaaatatcgacgtataaaaaaaataaatcgcatacgaaaaaaaaatacgaaattaacgcgaaaaaaccgtaacgacgacacgccccgacgtaaaacgcgcaaccaaaactcgatacgtaaccaccttcgatataaaataaaataaaaccgcgcgatattccacgcccccgacgcgaacgaaactaaataaaacgcgaaccgaaaccgcaataaaaaaacgtaaaaaataacgacgcgccgaaaaaaaacgtaataaaatataaaaaatctacgaaataataaaaactcccgaaactatatttaacgaaacgataaaaacgaccgaaaaaaaaaaacgaataactaaaatcgaaaacgaacgtccccgaaataaaaattacgaaaaccctccgacgaaccgacgaaaaaacgccgcctcaaaaatacgacgataaaaacgaaaaacgaccgacgacgccgaaaactcaccgtaacgcgccgaaacgcgaccgacgaaaacgaaaacgacgcgaaaaattaaaacgaataaataacgaaaaaaaa

SEQ ID NO: 28247 - DNA, 694 bp, Artificial Sequence
  chemically treated genomic DNA (Homo sapiens) CpG-island No: 28247
gtgggttggtggtgtgttcgggtgtagtcgggggtgtggcggtacgggtaagtatcggtggtgtgttgcggtgggggcggcggtggacggggtgtatagcgggtgtggtttttttttgcgcggtttttttagtttcgtcgggcgatcgcgtggagtgtcggcgtatggggggggtgggtcgtatgcggggggggggtgcgggattggcgcgggggagtcgtggcggcgatacgtttcggcgtggggcgcgtagttagagttcggtgcgtggttattttcggtgtggggtggggtggggtcgcgcggtgttttacgttttcggcgcgagcggggttaggtggagcgcgagtcggggtcgtagtgggaagacgtggggggtagcggcgcgtcgaggggaggcgtaatggggtgtggggagtttacgaggtggtggggattttcgaggttatatttaacggggcggtagggacggtcgggaagaaggggcgggtggttggggtcgggggcgggcgttttcggagtgggggttgcgggggtttttcggcgggtcgacgggggggcgtcgttttaggggtgcggcggtgggggcgaggggcgatcggcggcgtcgggggtttatcgtggcgcgtcggggcgcggtcggcgagggcgggggcggcgcggggaattggggcgggtgggtggcggggggggg

SEQ ID NO: 28248 - DNA, 694 bp, Artificial Sequence
  chemically treated genomic DNA (Homo sapiens) CpG-island No: 28248
cccccccccgccacccacccgccccaattccccgcgccgcccccgccctcgccgaccgcgccccgacgcgccacgataaacccccgacgccgccgatcgcccctcgcccccaccgccgcacccctaaaacgacgcccccccgtcgacccgccgaaaaacccccgcaacccccactccgaaaacgcccgcccccgaccccaaccacccgccccttcttcccgaccgtccctaccgccccgttaaatataacctcgaaaatccccaccacctcgtaaactccccacaccccattacgcctcccctcgacgcgccgctaccccccacgtcttcccactacgaccccgactcgcgctccacctaaccccgctcgcgccgaaaacgtaaaacaccgcgcgaccccaccccaccccacaccgaaaataaccacgcaccgaactctaactacgcgccccacgccgaaacgtatcgccgccacgactcccccgcgccaatcccgcaccccccccccgcatacgacccaccccccccatacgccgacactccacgcgatcgcccgacgaaactaaaaaaaccgcgcaaaaaaaaaccacacccgctatacaccccgtccaccgccgcccccaccgcaacacaccaccgatacttacccgtaccgccacacccccgactacacccgaacacaccaccaacccac

SEQ ID NO: 28249 - DNA, 1329 bp, Artificial Sequence
  chemically treated genomic DNA (Homo sapiens) CpG-island No: 28249
  unsure (531, 592, 674, 772, 836, 874, 895, 989, 1008, 1064)
gcgattttagtcgatttcgagtacggaggatcgagaatatcgttatacgttcggaaacgcgtaaaaatagaaagagaagagagaaagaaggagggggcgtaagaggggggacgtagaggtttagggcggggacgtattacgattttcgaagtagtaacgggaacgcggtatgcgaaggaatcgttcgagacgatagggtgattatcgacgaatattcggatcgataagaagaagaagtttttttttttttggcgcgtgagcggtggagagaattaatcgaagatcgcgtacgcgtcggggttcggagggggaataggagacgttatagtacgcgaaaatcggacgcgcgagaggggagggcgaaggcggtagacgaagtataggcgagggggtcgggatacgtataaagggaaattacgagggaggatcgagagcgagcggaggtacgggagttagagggaatcgatcgggcgttaagaaatatttattgagcggcgacgagacgcgcgaagcgtagggcgtcggtcgganggtagcgagggagtaggcgggtcgcgagggggagggagagaggggcgcgcggttatagatnatatagagatagtcgattttacgggcgacgacggtcgcggagtcggcgagtattcgcgtacgaagatagagcgacgagagangcgtgtagagtacgcgcgagagatagtatcgacgggtcgatgaggagcggagattagttatagataataaacgacgaataataaagttatataaatanataggacgtacgcggcgacggatttatttagagcgattagagatttacgttttatattatatanatattagagatagacgcggtcgcgtagagagcggaggnagagttttagaggcgaagatntcgatcggcgatacgataacgtacgagcgagagagtggacggcgagtgtagtatttgtgcgatgtgagatgtgatatagtagttacgatgtatnagtgagagaaaggcgcgangcggcgcgtttggggaggtcgtcgcgtcgagagcgagtgaggcggtacgaacgatntagcgtttaaattgtgttatatgcgttaacgtagacgtggatgagagcgcgaatcgataggttatcggacgttatacgagcgcgagagaagcgtagatatagagagaacgagaaaaaatcggttcggtgttatattacgcgagttgcgcgcgcgtacgttaggtcgacgaggagcgggatagacgagagcgcggcgcgcggtttaataacgaagagatgtatttcgagggcgatattggcgttcgtagttaagaaggagtatata

SEQ ID NO: 28250 - DNA, 1329 bp, Artificial Sequence
  chemically treated genomic DNA (Homo sapiens) CpG-island No: 28250
  unsure (266, 322, 341, 435, 456, 494, 558, 656, 738, 799)
tatatactccttcttaactacgaacgccaatatcgccctcgaaatacatctcttcgttattaaaccgcgcgccgcgctctcgtctatcccgctcctcgtcgacctaacgtacgcgcgcgcaactcgcgtaatataacaccgaaccgattttttctcgttctctctatatctacgcttctctcgcgctcgtataacgtccgataacctatcgattcgcgctctcatccacgtctacgttaacgcatataacacaatttaaacgctanatcgttcgtaccgcctcactcgctctcgacgcgacgacctccccaaacgcgccgcntcgcgcctttctctcactnatacatcgtaactactatatcacatctcacatcgcacaaatactacactcgccgtccactctctcgctcgtacgttatcgtatcgccgatcganatcttcgcctctaaaactctncctccgctctctacgcgaccgcgtctatctctaatatntatataatataaaacgtaaatctctaatcgctctaaataaatccgtcgccgcgtacgtcctatntatttatataactttattattcgtcgtttattatctataactaatctccgctcctcatcgacccgtcgatactatctctcgcgcgtactctacacgcntctctcgtcgctctatcttcgtacgcgaatactcgccgactccgcgaccgtcgtcgcccgtaaaatcgactatctctatatnatctataaccgcgcgcccctctctccctccccctcgcgacccgcctactccctcgctaccntccgaccgacgccctacgcttcgcgcgtctcgtcgccgctcaataaatatttcttaacgcccgatcgattccctctaactcccgtacctccgctcgctctcgatcctccctcgtaatttccctttatacgtatcccgaccccctcgcctatacttcgtctaccgccttcgccctcccctctcgcgcgtccgattttcgcgtactataacgtctcctattccccctccgaaccccgacgcgtacgcgatcttcgattaattctctccaccgctcacgcgccaaaaaaaaaaaaacttcttcttcttatcgatccgaatattcgtcgataatcaccctatcgtctcgaacgattccttcgcataccgcgttcccgttactacttcgaaaatcgtaatacgtccccgccctaaacctctacgtcccccctcttacgccccctccttctttctctcttctctttctatttttacgcgtttccgaacgtataacgatattctcgatcctccgtactcgaaatcgactaaaatcgc

SEQ ID NO: 28251 - DNA, 1329 bp, Artificial Sequence
  chemically treated genomic DNA (Homo sapiens) CpG-island No: 28251
  unsure (266, 322, 341, 435, 456, 494, 558, 656, 738, 799)
tgtgtgtttttttttggttgcgggcgttagtgtcgttttcggggtgtattttttcgttgttgggtcgcgcgtcgcgttttcgtttgtttcgtttttcgtcggtttggcgtgcgcgcgcgtagttcgcgtggtgtggtatcgggtcggttttttttcgttttttttgtgtttgcgtttttttcgcgttcgtgtggcgttcggtggtttgtcggttcgcgtttttatttacgtttgcgttgacgtatgtggtatagtttgaacgttgngtcgttcgtgtcgttttattcgttttcggcgcggcggtttttttaggcgcgtcgtntcgcgttttttttttattngtgtatcgtagttgttatgttatattttatatcgtataggtgttgtattcgtcgtttattttttcgttcgtgcgttgtcgtgtcgtcggtcggngttttcgtttttgggattttnttttcgttttttgcgcgatcgcgtttatttttggtatntgtgtggtgtgaggcgtggatttttggtcgttttgggtgggttcgtcgtcgcgtgcgttttatntgtttgtgtggttttattgttcgtcgtttgttatttgtggttggttttcgttttttatcggttcgtcggtgttgtttttcgcgcgtgttttgtacgtntttttcgtcgttttgttttcgtgcgcgggtgttcgtcgatttcgcggtcgtcgtcgttcgtgaggtcggttatttttgtgtngtttgtgatcgcgcgtttttttttttttttttttcgcggttcgtttgttttttcgttgttnttcggtcggcgttttacgtttcgcgcgtttcgtcgtcgtttagtgggtgttttttggcgttcgatcggttttttttggttttcgtgttttcgttcgttttcggttttttttcgtgatttttttttgtgcgtgtttcggttttttcgtttgtatttcgtttgtcgttttcgtttttttttttcgcgcgttcggttttcgcgtgttgtggcgttttttgtttttttttcgggtttcggcgcgtgcgcggttttcggttggttttttttatcgtttacgcgttaaaaaaaaaaagattttttttttttgtcggttcgggtgttcgtcggtggttattttgtcgtttcgggcggttttttcgtatgtcgcgttttcgttgttgtttcgggggtcgtggtgcgttttcgttttgggtttttgcgtttttttttttgcgtttttttttttttttttttttttttttttgtttttgcgcgttttcgggcgtgtggcggtgttttcggtttttcgtgttcggggtcggttggggtcgt

SEQ ID NO: 28252 - DNA, 1329 bp, Artificial Sequence
  chemically treated genomic DNA (Homo sapiens) CpG-island No: 28252
  unsure (531, 592, 674, 772, 836, 874, 895, 989, 1008, 1064)
acgaccccaaccgaccccgaacacgaaaaaccgaaaacaccgccacacgcccgaaaacgcgcaaaaacaaaaaaaaaaaaaaaaaaaaaaaaaaaaacgcaaaaaaaaaaacgcaaaaacccaaaacgaaaacgcaccacgacccccgaaacaacaacgaaaacgcgacatacgaaaaaaccgcccgaaacgacaaaataaccaccgacgaacacccgaaccgacaaaaaaaaaaaatctttttttttttaacgcgtaaacgataaaaaaaaccaaccgaaaaccgcgcacgcgccgaaacccgaaaaaaaaacaaaaaacgccacaacacgcgaaaaccgaacgcgcgaaaaaaaaaaacgaaaacgacaaacgaaatacaaacgaaaaaaccgaaacacgcacaaaaaaaaatcacgaaaaaaaaccgaaaacgaacgaaaacacgaaaaccaaaaaaaaccgatcgaacgccaaaaaacacccactaaacgacgacgaaacgcgcgaaacgtaaaacgccgaccgaanaacaacgaaaaaacaaacgaaccgcgaaaaaaaaaaaaaaaaaaacgcgcgatcacaaacnacacaaaaataaccgacctcacgaacgacgacgaccgcgaaatcgacgaacacccgcgcacgaaaacaaaacgacgaaaaanacgtacaaaacacgcgcgaaaaacaacaccgacgaaccgataaaaaacgaaaaccaaccacaaataacaaacgacgaacaataaaaccacacaaacanataaaacgcacgcgacgacgaacccacccaaaacgaccaaaaatccacgcctcacaccacacanataccaaaaataaacgcgatcgcgcaaaaaacgaaaanaaaatcccaaaaacgaaaacnccgaccgacgacacgacaacgcacgaacgaaaaaataaacgacgaatacaacacctatacgatataaaatataacataacaactacgatacacnaataaaaaaaaaacgcganacgacgcgcctaaaaaaaccgccgcgccgaaaacgaataaaacgacacgaacgacncaacgttcaaactataccacatacgtcaacgcaaacgtaaataaaaacgcgaaccgacaaaccaccgaacgccacacgaacgcgaaaaaaacgcaaacacaaaaaaaacgaaaaaaaaccgacccgataccacaccacgcgaactacgcgcgcgcacgccaaaccgacgaaaaacgaaacaaacgaaaacgcgacgcgcgacccaacaacgaaaaaatacaccccgaaaacgacactaacgcccgcaaccaaaaaaaaacacaca

SEQ ID NO: 28253 - DNA, 1164 bp, Artificial Sequence
  chemically treated genomic DNA (Homo sapiens) CpG-island No: 28253
  unsure (816, 942, 985, 1058, 1082)
cgttcggcgaaaggacgtataagttttattttacgagggcgtagtatagacgattttcgcggaggtcgcgttgattttatttttttttacgagtatttgttttttcgatattcggtcgttcgatttatcgtttttcgtattataggatagtttaacggaagaaagataaaacggaatataaattgttacgaaggacgtttttcggtatatatttcggtatatttatcggattataggtgcggattttttttttttattttaatttcgttcgttatttttcgatcgtcgtgtggattcgtcgcgtttttttacgataattatattagtatagtattttttttcgggttattttttgaggaatatatcgtcgtcggtttatttcgtcgcgagtttcgtcgcgggtgcgcggttcgttatttagtggtatcgacggttattatataatttttatatattatttatcgttattaagatttaatattaatattattttttagttattgcgtttttatttttttttacgtaattaaataatttttttttttattattttcgatttttagttaagtacgcggtagcgtatataatttcgggtcgcgcgaacgtatagcgttatattttagtattcgatcgttttcgcgttttatttttcgtttcgtatagtaggcgcgttttcgtgttttcgttcgggtcgtttaagattatatttatatacgtttagggaaggacggttcgttaagatataatcgaattatagagatttgatttattcgttaatagttttatttattttcgtcgttatcggatacgtatttnttcgtttattatttcgttcgtttaattttttttattcgtcgatttgtgcgtattttttttatatttattatacgaaaatatagtacgcgtattcgcgataataagcgtttatcggtttttcgtcgnagcgaggcgttttatatattattagattttataatttagagantagtagcgttacgtcgttaacgtagtatatttagtagtatattaggtaatatatagatatacgttgtacgatngaaatagtataaaagattaataantatataatttatatacgtagaatttatgatacggcggtttttcggacggttaacgtcgttacgggatttcgtcgtttagtta

SEQ ID NO: 28254 - DNA, 1164 bp, Artificial Sequence
  chemically treated genomic DNA (Homo sapiens) CpG-island No: 28254
  unsure (83, 107, 180, 223, 349)
taactaaacgacgaaatcccgtaacgacgttaaccgtccgaaaaaccgccgtatcataaattctacgtatataaattatatanttattaatcttttatactatttcnatcgtacaacgtatatctatatattacctaatatactactaaatatactacgttaacgacgtaacgctactantctctaaattataaaatctaataatatataaaacgcctcgctncgacgaaaaaccgataaacgcttattatcgcgaatacgcgtactatattttcgtataataaatataaaaaaaatacgcacaaatcgacgaataaaaaaaattaaacgaacgaaataataaacgaanaaatacgtatccgataacgacgaaaataaataaaactattaacgaataaatcaaatctctataattcgattatatcttaacgaaccgtccttccctaaacgtatataaatataatcttaaacgacccgaacgaaaacacgaaaacgcgcctactatacgaaacgaaaaataaaacgcgaaaacgatcgaatactaaaatataacgctatacgttcgcgcgacccgaaattatatacgctaccgcgtacttaactaaaaatcgaaaataataaaaaaaaaaattatttaattacgtaaaaaaaaataaaaacgcaataactaaaaaataatattaatattaaatcttaataacgataaataatatataaaaattatataataaccgtcgataccactaaataacgaaccgcgcacccgcgacgaaactcgcgacgaaataaaccgacgacgatatattcctcaaaaaataacccgaaaaaaaatactatactaatataattatcgtaaaaaaacgcgacgaatccacacgacgatcgaaaaataacgaacgaaattaaaataaaaaaaaaaaatccgcacctataatccgataaatataccgaaatatataccgaaaaacgtccttcgtaacaatttatattccgttttatctttcttccgttaaactatcctataatacgaaaaacgataaatcgaacgaccgaatatcgaaaaaacaaatactcgtaaaaaaaaataaaatcaacgcgacctccgcgaaaatcgtctatactacgccctcgtaaaataaaacttatacgtcctttcgccgaacg

SEQ ID NO: 28255 - DNA, 1164 bp, Artificial Sequence
  chemically treated genomic DNA (Homo sapiens) CpG-island No: 28255
  unsure (83, 107, 180, 223, 349)
tggttgggcggcgaggtttcgtggcggcgttggtcgttcggaggatcgtcgtgttatgggttttgcgtgtgtggattgtgtgnttgttggttttttgtgttgttttngtcgtgtagcgtgtgtttgtgtgttgtttagtgtgttgttaggtgtgttgcgttggcggcgtggcgttgttgntttttgggttgtggggtttggtagtgtgtggagcgtttcgttncggcggggagtcggtgggcgtttattgtcgcgggtgcgcgtgttgtattttcgtgtggtgggtgtgggggagatgcgtataggtcggcgggtgaggggggttgggcgagcgaggtggtgggcgganaggtgcgtgttcggtggcggcgggggtgagtggggttgttggcgggtgagttaagtttttgtggttcgattgtgttttagcgggtcgtttttttttgggcgtgtgtgggtgtagttttgggcggttcgggcgggggtacgggggcgcgtttgttgtgcggggcggagagtggggcgcgagggcgatcgggtgttagagtatgacgttgtgcgttcgcgcggttcggggttgtgtgcgttgtcgcgtatttgattgggggtcgggagtggtgggggagggggttgtttggttacgtgggggggggtggaggcgtaatggttagggggtggtgttgatgttgggttttgatgacgatgggtggtatatgggggttgtgtggtagtcgtcggtgttattgggtggcgggtcgcgtattcgcggcggggttcgcggcggggtgggtcggcggcggtgtgttttttagggggtggttcggggggggatgttgtgttagtgtggttgtcgtgggggggcgcggcggatttatacggcggtcgaggggtggcgggcggggttgaggtggggggggagggttcgtatttgtggttcggtgggtatgtcggggtgtgtgtcggggggcgtttttcgtgatagtttatgtttcgttttgtttttttttcgttgggttgttttgtggtgcggggggcggtgggtcgggcggtcgggtgtcgagggggtaggtgttcgtgggagggggtggggttagcgcgattttcgcgggagtcgtttgtgttacgttttcgtagggtggggtttgtgcgttttttcgtcgggcg

SEQ ID NO: 28256 - DNA, 1164 bp, Artificial Sequence
  chemically treated genomic DNA (Homo sapiens) CpG-island No: 28256
  unsure (816, 942, 985, 1058, 1082)
cgcccgacgaaaaaacgcacaaaccccaccctacgaaaacgtaacacaaacgactcccgcgaaaatcgcgctaaccccaccccctcccacgaacacctaccccctcgacacccgaccgcccgacccaccgccccccgcaccacaaaacaacccaacgaaaaaaaaacaaaacgaaacataaactatcacgaaaaacgccccccgacacacaccccgacatacccaccgaaccacaaatacgaaccctccccccccacctcaaccccgcccgccacccctcgaccgccgtataaatccgccgcgcccccccacgacaaccacactaacacaacatccccccccgaaccaccccctaaaaaacacaccgccgccgacccaccccgccgcgaaccccgccgcgaatacgcgacccgccacccaataacaccgacgactaccacacaacccccatataccacccatcgtcatcaaaacccaacatcaacaccaccccctaaccattacgcctccacccccccccacgtaaccaaacaaccccctcccccaccactcccgacccccaatcaaatacgcgacaacgcacacaaccccgaaccgcgcgaacgcacaacgtcatactctaacacccgatcgccctcgcgccccactctccgccccgcacaacaaacgcgcccccgtacccccgcccgaaccgcccaaaactacacccacacacgcccaaaaaaaaacgacccgctaaaacacaatcgaaccacaaaaacttaactcacccgccaacaaccccactcacccccgccgccaccgaacacgcacctntccgcccaccacctcgctcgcccaacccccctcacccgccgacctatacgcatctcccccacacccaccacacgaaaatacaacacgcgcacccgcgacaataaacgcccaccgactccccgccgnaacgaaacgctccacacactaccaaaccccacaacccaaaaancaacaacgccacgccgccaacgcaacacacctaacaacacactaaacaacacacaaacacacgctacacgacnaaaacaacacaaaaaaccaacaancacacaatccacacacgcaaaacccataacacgacgatcctccgaacgaccaacgccgccacgaaacctcgccgcccaacca

SEQ ID NO: 28257 - DNA, 778 bp, Artificial Sequence
  chemically treated genomic DNA (Homo sapiens) CpG-island No: 28257
  unsure (261, 378)
tggcggcgagggcgggtcgttagtggtagtcggagcggtagggaggcggtagtttcgttttacgggcggggagatatgttggtcgggcggcgtaggttggaggcgagttgaaaatcgagcggaggaatgtttatacgtttcgaggtaaatttgtcggagaagtgagttagtcgtaaagaggtggcgttttaggaacgcgcgcggggcgagcgagggcgtaggcgggttggcgggcgggcgcgcgggggtcggggtcggttnacgggtcgggttcgaacggggttcgcgtcgtcgtttcgagcgagttgaagggggaggttttcgagttcggaaattgagcggcgagcggcggagtttttttttttcgcgttgtcgatntcggagttgttaggagttttgtcgagttttatttcggagttcgggtttttgtcgcgttattttcgtgtcgggggcgtgggcgtattcgtttgttttttttaggttcggtcggtttttgtcggcgcggcggattcgggagtcgagattttcgagggcgtgcggattgtttcgggtagtcggcggttttcggcgcgtcgagttggacgagcgggcgttaagattattaggggcggatcgacgaggaggaggttaaggagttgggtcggggatcgcgggtaatcgggagtttgcgcggagaggacgcgggttgttggtttgtgaatttaaggagttcgaagttcgtttggtagttcggggcgatgtatgagaatttttttttttggtttattttcgggatgaa

SEQ ID NO: 28258 - DNA, 778 bp, Artificial Sequence
  chemically treated genomic DNA (Homo sapiens) CpG-island No: 28258
  unsure (401, 518)
ttcatcccgaaaataaaccaaaaaaaaaaattctcatacatcgccccgaactaccaaacgaacttcgaactccttaaattcacaaaccaacaacccgcgtcctctccgcgcaaactcccgattacccgcgatccccgacccaactccttaacctcctcctcgtcgatccgcccctaataatcttaacgcccgctcgtccaactcgacgcgccgaaaaccgccgactacccgaaacaatccgcacgccctcgaaaatctcgactcccgaatccgccgcgccgacaaaaaccgaccgaacctaaaaaaaacaaacgaatacgcccacgcccccgacacgaaaataacgcgacaaaaacccgaactccgaaataaaactcgacaaaactcctaacaactccganatcgacaacgcgaaaaaaaaaaactccgccgctcgccgctcaatttccgaactcgaaaacctcccccttcaactcgctcgaaacgacgacgcgaaccccgttcgaacccgacccgtnaaccgaccccgacccccgcgcgcccgcccgccaacccgcctacgccctcgctcgccccgcgcgcgttcctaaaacgccacctctttacgactaactcacttctccgacaaatttacctcgaaacgtataaacattcctccgctcgattttcaactcgcctccaacctacgccgcccgaccaacatatctccccgcccgtaaaacgaaactaccgcctccctaccgctccgactaccactaacgacccgccctcgccgcca

SEQ ID NO: 28259 - DNA, 778 bp, Artificial Sequence
  chemically treated genomic DNA (Homo sapiens) CpG-island No: 28259
  unsure (401, 518)
tttatttcgggaatgggttagggaggaaggtttttatgtatcgtttcgagttgttaggcgagtttcgggttttttaaatttataggttaatagttcgcgtttttttcgcgtaggttttcggttgttcgcggttttcggtttagttttttggtttttttttcgtcggttcgtttttggtggttttggcgttcgttcgtttagttcggcgcgtcggggatcgtcggttgttcggggtagttcgtacgttttcggggatttcggttttcggattcgtcgcgtcggtaggagtcggtcgggtttggagggagtaagcggatgcgtttacgttttcggtacggggatggcgcgataggggttcgggtttcggggtggggttcggtagagtttttgatagtttcggngtcggtagcgcgggaggggggagtttcgtcgttcgtcgtttaattttcgggttcgggggtttttttttttaattcgttcggggcggcggcgcgggtttcgttcgggttcggttcgtnggtcggtttcggttttcgcgcgttcgttcgttagttcgtttgcgttttcgttcgtttcgcgcgcgtttttagggcgttatttttttgcgattagtttattttttcggtaggtttgtttcggagcgtgtgaatattttttcgttcggtttttaattcgtttttaatttgcgtcgttcggttagtatgttttttcgttcgtgaagcggggttgtcgtttttttgtcgtttcggttgttattaacgattcgttttcgtcgtta

SEQ ID NO: 28260 - DNA, 778 bp, Artificial Sequence
  chemically treated genomic DNA (Homo sapiens) CpG-island No: 28260
  unsure (261, 378)
taacgacgaaaacgaatcgttaataacaaccgaaacgacaaaaaaacgacaaccccgcttcacgaacgaaaaaacatactaaccgaacgacgcaaattaaaaacgaattaaaaaccgaacgaaaaaatattcacacgctccgaaacaaacctaccgaaaaaataaactaatcgcaaaaaaataacgccctaaaaacgcgcgcgaaacgaacgaaaacgcaaacgaactaacgaacgaacgcgcgaaaaccgaaaccgaccnacgaaccgaacccgaacgaaacccgcgccgccgccccgaacgaattaaaaaaaaaaacccccgaacccgaaaattaaacgacgaacgacgaaactcccccctcccgcgctaccgacnccgaaactatcaaaaactctaccgaaccccaccccgaaacccgaacccctatcgcgccatccccgtaccgaaaacgtaaacgcatccgcttactccctccaaacccgaccgactcctaccgacgcgacgaatccgaaaaccgaaatccccgaaaacgtacgaactaccccgaacaaccgacgatccccgacgcgccgaactaaacgaacgaacgccaaaaccaccaaaaacgaaccgacgaaaaaaaaaccaaaaaactaaaccgaaaaccgcgaacaaccgaaaacctacgcgaaaaaaacgcgaactattaacctataaatttaaaaaacccgaaactcgcctaacaactcgaaacgatacataaaaaccttcctccctaacccattcccgaaataaa

SEQ ID NO: 28261 - DNA, 523 bp, Artificial Sequence
  chemically treated genomic DNA (Homo sapiens) CpG-island No: 28261
tgcgacgtcgtattttgtttagtattttaaacgcgtatttacggcggataacgaggttattttttggcggtaaaattagttattttcgttggcgtattttatttttcgtattgattggtatttcgcgattggcgtattataattagaataatagtaatttttaaagtagttaatgattatgtcgtcgggcgtggtagcggtaacggttgcgcgtgggcgcggtaagtcggcgttggtagggtaatttatttttcgtattgcgggtagagcgattgttatcgcgttcgtaaaagcgttaacggatgtattggtataatttgcgggcgagaagtttcgttttattgcgtcggatgttttgttagttagcgatgagtaagtcgattggttggtggtcgatgaagtcgtagttatatttgcgttattgttgtattaattggtatcgcgtttttttcgaacgttgttattattacggtgtagggttacgaaggtatcggacgtggtttttgttgaattttgcgttcgt

SEQ ID NO: 28262 - DNA, 523 bp, Artificial Sequence
  chemically treated genomic DNA (Homo sapiens) CpG-island No: 28262
acgaacgcaaaattcaacaaaaaccacgtccgataccttcgtaaccctacaccgtaataataacaacgttcgaaaaaaacgcgataccaattaatacaacaataacgcaaatataactacgacttcatcgaccaccaaccaatcgacttactcatcgctaactaacaaaacatccgacgcaataaaacgaaacttctcgcccgcaaattataccaatacatccgttaacgcttttacgaacgcgataacaatcgctctacccgcaatacgaaaaataaattaccctaccaacgccgacttaccgcgcccacgcgcaaccgttaccgctaccacgcccgacgacataatcattaactactttaaaaattactattattctaattataatacgccaatcgcgaaataccaatcaatacgaaaaataaaatacgccaacgaaaataactaattttaccgccaaaaaataacctcgttatccgccgtaaatacgcgtttaaaatactaaacaaaatacgacgtcgca

SEQ ID NO: 28263 - DNA, 523 bp, Artificial Sequence
  chemically treated genomic DNA (Homo sapiens) CpG-island No: 28263
gcgagcgtaaaatttagtaaaaattacgttcggtgttttcgtagttttgtatcgtagtggtaataacgttcgaggaaaacgcgatattagttgatgtaataatggcgtaggtatggttgcggttttatcgattattagttagtcggtttgtttatcgttggttaataaggtattcggcgtaataaagcgaaatttttcgttcgtaaattgtgttagtatattcgttgacgtttttgcgggcgcggtgataatcgttttgttcgtaatacgagaaatgagttgttttgttaacgtcgatttatcgcgtttacgcgtagtcgttatcgttgttacgttcggcggtatggttattagttgttttaagagttgttgttgttttggttgtggtgcgttagtcgcggggtattagttagtacggggagtaaaatgcgttaacgagaatggttggttttgtcgttagaggatagtttcgttattcgtcgtaagtacgcgtttgagatgttggataaaatgcggcgtcgta

SEQ ID NO: 28264 - DNA, 523 bp, Artificial Sequence
  chemically treated genomic DNA (Homo sapiens) CpG-island No: 28264
tacgacgccgcattttatccaacatctcaaacgcgtacttacgacgaataacgaaactatcctctaacgacaaaaccaaccattctcgttaacgcattttactccccgtactaactaataccccgcgactaacgcaccacaaccaaaacaacaacaactcttaaaacaactaataaccataccgccgaacgtaacaacgataacgactacgcgtaaacgcgataaatcgacgttaacaaaacaactcatttctcgtattacgaacaaaacgattatcaccgcgcccgcaaaaacgtcaacgaatatactaacacaatttacgaacgaaaaatttcgctttattacgccgaataccttattaaccaacgataaacaaaccgactaactaataatcgataaaaccgcaaccatacctacgccattattacatcaactaatatcgcgttttcctcgaacgttattaccactacgatacaaaactacgaaaacaccgaacgtaatttttactaaattttacgctcgc

SEQ ID NO: 28265 - DNA, 940 bp, Artificial Sequence
  chemically treated genomic DNA (Homo sapiens) CpG-island No: 28265
  unsure (13, 161, 236, 337, 339, 381, 407, 428, 444)
ggcgcgggttttntcgtcggttcgtttttgttttacgatgggattttttttagttgacgatcgtatttaatattatatattcgatttcgtattttatatcgtatcgtataatgcgttatcgttatttcgatttttacgtatatgtgtaggttatatgagtngttatattagtataggcgattatttttagtcgattaatttatgcgttaacgttttttcgattaatagcgtcgcgnattgtatcgtcgacgtttcgttattacgatattttaattgcgatcggatattacgtcgattcgatgtatcgagtgcgtcgcggcgttcgcgtcgcggcggntnacgcgatttagcgtttagaggatcgtgttaagtcgttatgtnagaggttaatgattacgtaggttcgnacgagttttaggttcgttttnacgtatttcgcgttantgtagatttttatttttatagcggatcgagcgcggtcgtttatttcgttagtattgtagtatagtttatcgagtatttagtattcgatcgtttaacgttttcgtattacgtttttaatcgtgtcgtattgtcgttatgcggtagcgtttttttaattggtattcgttatgacgtcgtgtgtacgtatttatttagcgtttgtcgaatatagtaatacgtatacgtcgttgtttcggtcgttataagtataattcgttattcgtattaagtacgttagaatattttatcgaagtagtttatcgggtagtcgtagacgattcgtagtgtattttgtttattgtagagcgaattagtcgttttcgtttttcgtcgagtagcgtagtttacgtagtttgttttcgatcgcgtattgtcgggtttagttattgtttttggtcgtgtcgttgatagtcgcgtcgtcgtcgcgttttagttttatacgattttatttattgtt

SEQ ID NO: 28266 - DNA, 940 bp, Artificial Sequence
  chemically treated genomic DNA (Homo sapiens) CpG-island No: 28266
  unsure (497, 513, 534, 560, 602, 604, 705, 780, 928)
aacaataaataaaatcgtataaaactaaaacgcgacgacgacgcgactatcaacgacacgaccaaaaacaataactaaacccgacaatacgcgatcgaaaacaaactacgtaaactacgctactcgacgaaaaacgaaaacgactaattcgctctacaataaacaaaatacactacgaatcgtctacgactacccgataaactacttcgataaaatattctaacgtacttaatacgaataacgaattatacttataacgaccgaaacaacgacgtatacgtattactatattcgacaaacgctaaataaatacgtacacacgacgtcataacgaataccaattaaaaaaacgctaccgcataacgacaatacgacacgattaaaaacgtaatacgaaaacgttaaacgatcgaatactaaatactcgataaactatactacaatactaacgaaataaacgaccgcgctcgatccgctataaaaataaaaatctacantaacgcgaaatacgtnaaaacgaacctaaaactcgtncgaacctacgtaatcattaacctctnacataacgacttaacacgatcctctaaacgctaaatcgcgtnanccgccgcgacgcgaacgccgcgacgcactcgatacatcgaatcgacgtaatatccgatcgcaattaaaatatcgtaataacgaaacgtcgacgatacaatncgcgacgctattaatcgaaaaaacgttaacgcataaattaatcgactaaaaataatcgcctatactaatataacnactcatataacctacacatatacgtaaaaatcgaaataacgataacgcattatacgatacgatataaaatacgaaatcgaatatataatattaaatacgatcgtcaactaaaaaaaatcccatcgtaaaacaaaaacgaaccgacganaaaacccgcgcc

SEQ ID NO: 28267 - DNA, 940 bp, Artificial Sequence
  chemically treated genomic DNA (Homo sapiens) CpG-island No: 28267
  unsure (497, 513, 534, 560, 602, 604, 705, 780, 928)
agtagtgagtgagatcgtgtaggattgagacgcgacggcggcgcgattgttagcggtacggttagagatagtagttagattcggtagtacgcgatcgagggtagattacgtggattacgttattcgacggggagcggaggcggttggttcgttttatagtgaatagggtgtattgcgggtcgtttgcggttgttcgatgggttgtttcgatggggtgttttagcgtatttggtgcgggtagcgggttgtgtttgtggcgatcggagtagcgacgtatgcgtattattatgttcggtagacgttgggtagatgcgtatatacgacgttataacgaatattagttaggaggacgttatcgtatggcggtagtacggtacggttgaggacgtgatacgggagcgttgaacgatcgagtattgagtgttcgatggattatattatagtgttgacgagataaacgatcgcgttcgattcgttgtggaagtaaggatttgtantggcgcgggatgcgtnggggcggatttaggattcgtncggatttacgtgattattgatttttnatatggcgatttagtacggttttttgagcgttgagtcgcgtngntcgtcgcggcgcgggcgtcgcgacgtattcgatgtatcgagtcggcgtgatgttcgatcgtagttaaggtatcgtggtagcgggacgtcgacggtgtaatncgcgacgttgttgatcgagaaagcgttggcgtataggttggtcgattagagataatcgtttatgttggtatggtnatttatgtggtttatatatatgcgtgggggtcgggatgacgatggcgtattgtgcgatacggtgtaagatacggagtcggatatgtaatgttggatgcggtcgttaattggaggaggttttatcgtagaataaagacgagtcgacggnggggttcgcgtt

SEQ ID NO: 28268 - DNA, 940 bp, Artificial Sequence
  chemically treated genomic DNA (Homo sapiens) CpG-island No: 28268
  unsure (13, 161, 236, 337, 339, 381, 407, 428, 444)
aacgcgaaccccnccgtcgactcgtctttattctacgataaaacctcctccaattaacgaccgcatccaacattacatatccgactccgtatcttacaccgtatcgcacaatacgccatcgtcatcccgacccccacgcatatatataaaccacataaatnaccataccaacataaacgattatctctaatcgaccaacctatacgccaacgctttctcgatcaacaacgtcgcgnattacaccgtcgacgtcccgctaccacgataccttaactacgatcgaacatcacgccgactcgatacatcgaatacgtcgcgacgcccgcgccgcgacgancnacgcgactcaacgctcaaaaaaccgtactaaatcgccatatnaaaaatcaataatcacgtaaatccgnacgaatcctaaatccgccccnacgcatcccgcgccantacaaatccttacttccacaacgaatcgaacgcgatcgtttatctcgtcaacactataatataatccatcgaacactcaatactcgatcgttcaacgctcccgtatcacgtcctcaaccgtaccgtactaccgccatacgataacgtcctcctaactaatattcgttataacgtcgtatatacgcatctacccaacgtctaccgaacataataatacgcatacgtcgctactccgatcgccacaaacacaacccgctacccgcaccaaatacgctaaaacaccccatcgaaacaacccatcgaacaaccgcaaacgacccgcaatacaccctattcactataaaacgaaccaaccgcctccgctccccgtcgaataacgtaatccacgtaatctaccctcgatcgcgtactaccgaatctaactactatctctaaccgtaccgctaacaatcgcgccgccgtcgcgtctcaatcctacacgatctcactcactact

SEQ ID NO: 28269 - DNA, 524 bp, Artificial Sequence
  chemically treated genomic DNA (Homo sapiens) CpG-island No: 28269
  unsure (2, 25, 32, 44, 88, 147, 232, 499)
tncgcgggcgcgcgcgggtcggttngtcgttncgggcgtcgggnggtcgcgggtttttttttttttcgttcggtcgttcgtcggattncgcggttcgcgcgtcgtcggcggttagtagcggcggtttaagatttataaagaggagtnagttaataatttatatcgattaacgaatcgacgcgcggagagtaggaatacgtcggggggagagaaagcgagcgagaataggaancgaatcgacgggcgaggcgcgagagagaggcggaagagatcggcggaagaggcgaaaatatttagcgagaggagataggtaaagacgtagcggttacggtaaagcgagaaatattttatacggtaaggacgcgttttagttagttcggatcgtacgagaggtagaacggggtacgagatcggcgtcgcgcgcgtcggagatagatagtcgatgttaacggttatttaataaatagattatatattaagagtaagagaaagaaggcgnaaagagaggatagtacgttattaat

SEQ ID NO: 28270 - DNA, 524 bp, Artificial Sequence
  chemically treated genomic DNA (Homo sapiens) CpG-island No: 28270
  unsure (26, 293, 378, 437, 481, 493, 500, 523)
attaataacgtactatcctctctttncgccttctttctcttactcttaatatataatctatttattaaataaccgttaacatcgactatctatctccgacgcgcgcgacgccgatctcgtaccccgttctacctctcgtacgatccgaactaactaaaacgcgtccttaccgtataaaatatttctcgctttaccgtaaccgctacgtctttacctatctcctctcgctaaatattttcgcctcttccgccgatctcttccgcctctctctcgcgcctcgcccgtcgattcgnttcctattctcgctcgctttctctccccccgacgtattcctactctccgcgcgtcgattcgttaatcgatataaattattaactnactcctctttataaatcttaaaccgccgctactaaccgccgacgacgcgcgaaccgcgnaatccgacgaacgaccgaacgaaaaaaaaaaaaacccgcgaccncccgacgcccgnaacgacnaaccgacccgcgcgcgcccgcgna

SEQ ID NO: 28271 - DNA, 524 bp, Artificial Sequence
  chemically treated genomic DNA (Homo sapiens) CpG-island No: 28271
  unsure (26, 293, 378, 437, 481, 493, 500, 523)
gttgatggcgtgttgttttttttttncgtttttttttttttgtttttggtgtgtggtttgtttgttgggtggtcgttggtatcggttgtttgttttcggcgcgcgcggcgtcggtttcgtgtttcgttttgtttttcgtgcggttcgggttggttggggcgcgtttttgtcgtgtggggtgtttttcgttttgtcgtggtcgttgcgtttttgtttgttttttttcgttgggtgttttcgtttttttcgtcggtttttttcgtttttttttcgcgtttcgttcgtcggttcgntttttgttttcgttcgtttttttttttttcggcgtgtttttgtttttcgcgcgtcggttcgttggtcggtgtgggttgttggttngtttttttttgtgggttttgggtcgtcgttgttggtcgtcggcggcgcgcgggtcgcgnggttcggcgggcggtcgggcggggggggggggggttcgcggttnttcggcgttcgnggcggtnggtcggttcgcgcgcgttcgcgng

SEQ ID NO: 28272 - DNA, 524 bp, Artificial Sequence
  chemically treated genomic DNA (Homo sapiens) CpG-island No: 28272
  unsure (2, 25, 32, 44, 88, 147, 232, 499)
cncgcgaacgcgcgcgaaccgaccnaccgccncgaacgccgaanaaccgcgaaccccccccccccccgcccgaccgcccgccgaaccncgcgacccgcgcgccgccgacgaccaacaacgacgacccaaaacccacaaaaaaaaacnaaccaacaacccacaccgaccaacgaaccgacgcgcgaaaaacaaaaacacgccgaaaaaaaaaaaaacgaacgaaaacaaaaancgaaccgacgaacgaaacgcgaaaaaaaaacgaaaaaaaccgacgaaaaaaacgaaaacacccaacgaaaaaaaacaaacaaaaacgcaacgaccacgacaaaacgaaaaacaccccacacgacaaaaacgcgccccaaccaacccgaaccgcacgaaaaacaaaacgaaacacgaaaccgacgccgcgcgcgccgaaaacaaacaaccgataccaacgaccacccaacaaacaaaccacacaccaaaaacaaaaaaaaaaaaacgnaaaaaaaaaacaacacgccatcaac

SEQ ID NO: 28273 - DNA, 581 bp, Artificial Sequence
  chemically treated genomic DNA (Homo sapiens) CpG-island No: 28273
ggatttcgtttttgcgttttgtatttcgcgtttcggttcggtttcgtttttgcgcgtagtttcgtattttgacgtttcgtttattgatttttcgttttttgtgtttttttcgcggcgtcgtgtggttacgttttttgtgtttttttttttatacgtttcgtgtagtttcgtattatcgtagcgtagtttcgtttttagttcgttttttaggtttcgtttttagttcgtttttcggtttcgttttcgttttgtttcgtttattttagggttatattttttcggttcggtttcgcgttgcgttaagcgggcggcggcggaggggcgggtttggttggtttggggttcggatttggggtcggagtcgcgggagtcggcggacgttggattaggagtttcgacgtgatcgcgtggcgggtggtcgggttttcgggtgttcgggtgtcggtttcgggattcggtcgtttattgtcgggagtcggattgttatgatgggtttgagtttcggttttcggatcggttcgtttttattgcggtcgttatgtggtgtttgtattgtaattcggagaggatttagttttttt

SEQ ID NO: 28274 - DNA, 581 bp, Artificial Sequence
  chemically treated genomic DNA (Homo sapiens) CpG-island No: 28274
aaaaaaactaaatcctctccgaattacaatacaaacaccacataacgaccgcaataaaaacgaaccgatccgaaaaccgaaactcaaacccatcataacaatccgactcccgacaataaacgaccgaatcccgaaaccgacacccgaacacccgaaaacccgaccacccgccacgcgatcacgtcgaaactcctaatccaacgtccgccgactcccgcgactccgaccccaaatccgaaccccaaaccaaccaaacccgcccctccgccgccgcccgcttaacgcaacgcgaaaccgaaccgaaaaaatataaccctaaaataaacgaaacaaaacgaaaacgaaaccgaaaaacgaactaaaaacgaaacctaaaaaacgaactaaaaacgaaactacgctacgataatacgaaactacacgaaacgtataaaaaaaaaaacacaaaaaacgtaaccacacgacgccgcgaaaaaaacacaaaaaacgaaaaatcaataaacgaaacgtcaaaatacgaaactacgcgcaaaaacgaaaccgaaccgaaacgcgaaatacaaaacgcaaaaacgaaatcc

SEQ ID NO: 28275 - DNA, 581 bp, Artificial Sequence
  chemically treated genomic DNA (Homo sapiens) CpG-island No: 28275
gaagggattgggtttttttcgagttgtagtgtaggtattatatggcggtcgtagtgggagcggatcggttcgggagtcgggatttaggtttattatagtagttcgattttcgatagtgagcggtcggatttcggggtcgatattcggatattcggagattcgattattcgttacgcgattacgtcggggtttttggtttagcgttcgtcggttttcgcggtttcggttttaagttcgagttttaggttagttaagttcgttttttcgtcgtcgttcgtttggcgtagcgcgaggtcgggtcggaggaatgtggttttgaagtgggcggggtagggcgggggcggggtcggagggcgagttgggggcggggtttggagggcgagttgggggcggggttgcgttgcggtggtgcgagattgtacggagcgtgtggggaagagagtataggaggcgtggttatacggcgtcgcggaagaagtatagggggcggggggttagtgggcggggcgttagggtgcggggttacgcgtaggggcggggtcgagtcgaggcgcggggtgtagagcgtaagggcggagttt

SEQ ID NO: 28276 - DNA, 581 bp, Artificial Sequence
  chemically treated genomic DNA (Homo sapiens) CpG-island No: 28276
aaactccgcccttacgctctacaccccgcgcctcgactcgaccccgcccctacgcgtaaccccgcaccctaacgccccgcccactaaccccccgccccctatacttcttccgcgacgccgtataaccacgcctcctatactctcttccccacacgctccgtacaatctcgcaccaccgcaacgcaaccccgcccccaactcgccctccaaaccccgcccccaactcgccctccgaccccgcccccgccctaccccgcccacttcaaaaccacattcctccgacccgacctcgcgctacgccaaacgaacgacgacgaaaaaacgaacttaactaacctaaaactcgaacttaaaaccgaaaccgcgaaaaccgacgaacgctaaaccaaaaaccccgacgtaatcgcgtaacgaataatcgaatctccgaatatccgaatatcgaccccgaaatccgaccgctcactatcgaaaatcgaactactataataaacctaaatcccgactcccgaaccgatccgctcccactacgaccgccatataatacctacactacaactcgaaaaaaacccaatcccttc

SEQ ID NO: 28277 - DNA, 711 bp, Artificial Sequence
  chemically treated genomic DNA (Homo sapiens) CpG-island No: 28277
gtcgcgtgggatagttatttagagcggattacgttagcgtaaagcggagtagtaagtcgtacgcgcggagaagacgatttttagtttagagatatttaaagtataatttttatcgatgtataaagacggagagaggcgagttcgtttacgtcggtggtgcgttatatcgtatagacggagtagtttatttagacgacgagggtataagtttacgatagatagcgatgcgcgaggtatcgcgaaagacgtcgtaaatagaaaagtagcggattacgatagagtattagatcgttttgaacgatagataagattaataattttcggttagagtaatataaatcgagttattttatcgtaatttaagcgtaggtcgttattattatacgtatgtattataacgtaaagtataaataagggcgtagcgaacggaggagataggcgatagacgcgtatttatagtagcgaggaagggtcggaatagggtacgagttttgtgtagatatatacgcgcgattcggaatcgtagggtatttatcgaagaaaacgtagagtagagattaaggagtagtaggagtaagtgagaggtacgtatacgcggagtacggaagttagcgtaaataatataaggaggggcgaaagtatttagagagtaggagcgggagaagcgatataaattttagggagtaatagagagaataattatacgattag

SEQ ID NO: 28278 - DNA, 711 bp, Artificial Sequence
  chemically treated genomic DNA (Homo sapiens) CpG-island No: 28278
ctaatcgtataattattctctctattactccctaaaatttatatcgcttctcccgctcctactctctaaatactttcgcccctccttatattatttacgctaacttccgtactccgcgtatacgtacctctcacttactcctactactccttaatctctactctacgttttcttcgataaataccctacgattccgaatcgcgcgtatatatctacacaaaactcgtaccctattccgacccttcctcgctactataaatacgcgtctatcgcctatctcctccgttcgctacgcccttatttatactttacgttataatacatacgtataataataacgacctacgcttaaattacgataaaataactcgatttatattactctaaccgaaaattattaatcttatctatcgttcaaaacgatctaatactctatcgtaatccgctacttttctatttacgacgtctttcgcgatacctcgcgcatcgctatctatcgtaaacttataccctcgtcgtctaaataaactactccgtctatacgatataacgcaccaccgacgtaaacgaactcgcctctctccgtctttatacatcgataaaaattatactttaaatatctctaaactaaaaatcgtcttctccgcgcgtacgacttactactccgctttacgctaacgtaatccgctctaaataactatcccacgcgac

SEQ ID NO: 28279 - DNA, 711 bp, Artificial Sequence
  chemically treated genomic DNA (Homo sapiens) CpG-island No: 28279
ttggtcgtgtggttattttttttgttgttttttggagtttgtatcgtttttttcgtttttgttttttaggtgttttcgtttttttttgtgttgtttgcgttggttttcgtgtttcgcgtgtgcgtgttttttatttatttttgttattttttggtttttgttttgcgtttttttcggtgggtgttttgcggtttcgagtcgcgcgtgtgtgtttgtatagagttcgtattttgtttcggttttttttcgttgttgtgggtgcgcgtttgtcgtttgtttttttcgttcgttgcgtttttgtttgtgttttgcgttgtagtgtatgcgtgtggtggtggcggtttgcgtttgggttgcggtgggatggttcggtttatgttgttttggtcgagagttattgattttgtttgtcgtttaaagcggtttagtgttttgtcgtggttcgttgtttttttatttgcggcgtttttcgcggtgtttcgcgtatcgttgtttgtcgtgggtttgtgttttcgtcgtttgggtaggttgtttcgtttgtgcggtgtagcgtattatcgacgtggacggattcgttttttttcgtttttgtgtatcggtgggagttgtgttttggatgtttttgggttgggggtcgtttttttcgcgcgtgcggtttgttgtttcgttttgcgttgacgtgattcgttttgagtggttgttttacgcggt

SEQ ID NO: 28280 - DNA, 711 bp, Artificial Sequence
  chemically treated genomic DNA (Homo sapiens) CpG-island No: 28280
accgcgtaaaacaaccactcaaaacgaatcacgtcaacgcaaaacgaaacaacaaaccgcacgcgcgaaaaaaacgacccccaacccaaaaacatccaaaacacaactcccaccgatacacaaaaacgaaaaaaaacgaatccgtccacgtcgataatacgctacaccgcacaaacgaaacaacctacccaaacgacgaaaacacaaacccacgacaaacaacgatacgcgaaacaccgcgaaaaacgccgcaaataaaaaaacaacgaaccacgacaaaacactaaaccgctttaaacgacaaacaaaatcaataactctcgaccaaaacaacataaaccgaaccatcccaccgcaacccaaacgcaaaccgccaccaccacacgcatacactacaacgcaaaacacaaacaaaaacgcaacgaacgaaaaaaacaaacgacaaacgcgcacccacaacaacgaaaaaaaaccgaaacaaaatacgaactctatacaaacacacacgcgcgactcgaaaccgcaaaacacccaccgaaaaaaacgcaaaacaaaaaccaaaaaataacaaaaataaataaaaaacacgcacacgcgaaacacgaaaaccaacgcaaacaacacaaaaaaaaacgaaaacacctaaaaaacaaaaacgaaaaaaacgatacaaactccaaaaaacaacaaaaaaaataaccacacgaccaa

SEQ ID NO: 28281 - DNA, 572 bp, Artificial Sequence
  chemically treated genomic DNA (Homo sapiens) CpG-island No: 28281
cgtttttttgtacgggatcgttcgatcgcgtttttgtagtatttttttttttttttttttgtcgcgggtttttcgttgtttttttttttttttttttatttttcgtgcgtttttcgttttttcgtttttttcgttttcgtttttttttttttcgtcgtttcgtttcgtgttttttttgttgtttttttttttacgttcgttgtcgttttatcggtttggtttcgtgtcggtttttcgcggtcggcgtcgttttcgttgcgttcgttgtttttttcgtttcgtttttttgttttttttttttcgtcgcgtcgcggttttttcgcgttagtttttaggtgtgtttttcgtttttttttttttttttattgtttcgtgcgttcgttttcgtttttttgtttttttcgttttatagtacgcgttatttggtcgttgtcgttgttcgttttacgtttgtttatatttttttcgtttttatttgtcgttttcgttgttttttcgtcgtcgtcgttttttttattgttttcgtttttttcgtgcgtttggtttgttcgtcgttttttttttgttttgcg

SEQ ID NO: 28282 - DNA, 572 bp, Artificial Sequence
  chemically treated genomic DNA (Homo sapiens) CpG-island No: 28282
cgcaaaacaaaaaaaaaacgacgaacaaaccaaacgcacgaaaaaaacgaaaacaataaaaaaaacgacgacgacgaaaaaacaacgaaaacgacaaataaaaacgaaaaaaatataaacaaacgtaaaacgaacaacgacaacgaccaaataacgcgtactataaaacgaaaaaaacaaaaaaacgaaaacgaacgcacgaaacaataaaaaaaaaaaaaaaaacgaaaaacacacctaaaaactaacgcgaaaaaaccgcgacgcgacgaaaaaaaaaaaacaaaaaaacgaaacgaaaaaaacaacgaacgcaacgaaaacgacgccgaccgcgaaaaaccgacacgaaaccaaaccgataaaacgacaacgaacgtaaaaaaaaaaacaacaaaaaaaacacgaaacgaaacgacgaaaaaaaaaaaaacgaaaacgaaaaaaacgaaaaaacgaaaaacgcacgaaaaataaaaaaaaaaaaaaaaaaacaacgaaaaacccgcgacaaaaaaaaaaaaaaaaaaatactacaaaaacgcgatcgaacgatcccgtacaaaaaaacg

SEQ ID NO: 28283 - DNA, 572 bp, Artificial Sequence
  chemically treated genomic DNA (Homo sapiens) CpG-island No: 28283
cgtaggataagagaagaacgacgaatagattagacgtacggaagaggcggaagtagtgaaggaagcggcgacggcgagaaagtagcggaagcggtaagtagaaacgaaggagatgtaagtaaacgtaaagcgagtagcgatagcggttagatagcgcgtgttgtaagacggaaaagatagagggacgagagcgagcgtacggagtaataaaaagaggaaggagaacggagagtatatttgggagttagcgcgggagggtcgcggcgcgacgaaagggagggggtagggaggcggagcggaaggggtagcgaacgtagcgagggcggcgtcgatcgcggaggatcgatacgaggttaggtcggtgaggcgatagcgagcgtaaggagaaggatagtagagggagtacgaggcgaggcgacggaggagaaaagggcggaagcgagagaagcgaggaggcgaaagacgtacgagaagtggaggaaggaaaagaggggtagcgaaggattcgcggtagagggaaaaagagggggatgttgtagagacgcgatcgagcggtttcgtgtaggagggcg

SEQ ID NO: 28284 - DNA, 572 bp, Artificial Sequence
  chemically treated genomic DNA (Homo sapiens) CpG-island No: 28284
cgccctcctacacgaaaccgctcgatcgcgtctctacaacatccccctctttttccctctaccgcgaatccttcgctacccctcttttccttcctccacttctcgtacgtctttcgcctcctcgcttctctcgcttccgcccttttctcctccgtcgcctcgcctcgtactccctctactatccttctccttacgctcgctatcgcctcaccgacctaacctcgtatcgatcctccgcgatcgacgccgccctcgctacgttcgctaccccttccgctccgcctccctaccccctccctttcgtcgcgccgcgaccctcccgcgctaactcccaaatatactctccgttctccttcctctttttattactccgtacgctcgctctcgtccctctatcttttccgtcttacaacacgcgctatctaaccgctatcgctactcgctttacgtttacttacatctccttcgtttctacttaccgcttccgctactttctcgccgtcgccgcttccttcactacttccgcctcttccgtacgtctaatctattcgtcgttcttctcttatcctacg

SEQ ID NO: 28285 - DNA, 607 bp, Artificial Sequence
  chemically treated genomic DNA (Homo sapiens) CpG-island No: 28285
gcgttcgataagtcggtttcgaaagatatggttatttggaatcgtgaacgggttagcgacgtttaggacggtattgtttcgtcgatagttggtgttgatttgtttattttcggttatatttttgcgcgttagtttttgaagtatgttaattagatgtatatcgatattggtgtcgtgttttgcggaaattttacgttggtataggtttaaggtggtgtttatgcgtaaattatttcgtcgtaagtgtaaagtatgcggtgaatatttcgtgtcgaaattttacgatattcggattcggtggtgtagttcggagtatggcgtaattttcgtaatggaagaacgtaagaaggataacgtgaaagtcgcggttaagcgtattaaggagtaaaaagaggttgaaaaggacgggcgtaaacgtcgtaaggagcggttggtagagtttaggttagacggatattataaggtttaggtttagaaagtttttaacgtttttattcgtgcgcgcgacgtcgatttgttatgtattagttgcggcgagattaattcgtttgatttgtatggtggttagtgggattgcggttattttaagatagtaggtgtttatttt

SEQ ID NO: 28286 - DNA, 607 bp, Artificial Sequence
  chemically treated genomic DNA (Homo sapiens) CpG-island No: 28286
aaaataaacacctactatcttaaaataaccgcaatcccactaaccaccatacaaatcaaacgaattaatctcgccgcaactaatacataacaaatcgacgtcgcgcgcacgaataaaaacgttaaaaactttctaaacctaaaccttataatatccgtctaacctaaactctaccaaccgctccttacgacgtttacgcccgtccttttcaacctctttttactccttaatacgcttaaccgcgactttcacgttatccttcttacgttcttccattacgaaaattacgccatactccgaactacaccaccgaatccgaatatcgtaaaatttcgacacgaaatattcaccgcatactttacacttacgacgaaataatttacgcataaacaccaccttaaacctataccaacgtaaaatttccgcaaaacacgacaccaatatcgatatacatctaattaacatacttcaaaaactaacgcgcaaaaatataaccgaaaataaacaaatcaacaccaactatcgacgaaacaataccgtcctaaacgtcgctaacccgttcacgattccaaataaccatatctttcgaaaccgacttatcgaacgc

SEQ ID NO: 28287 - DNA, 607 bp, Artificial Sequence
  chemically treated genomic DNA (Homo sapiens) CpG-island No: 28287
agggtaagtatttattgttttgaaatggtcgtaattttattggttattatgtagattaggcggattggtttcgtcgtagttgatgtatggtaaatcggcgtcgcgcgtacggataaaggcgttgaaagttttttgagtttgagttttgtagtattcgtttggtttgagttttgttagtcgttttttgcggcgtttgcgttcgttttttttagtttttttttgttttttgatgcgtttagtcgcggtttttacgttgttttttttgcgtttttttattgcgaggattgcgttatgtttcgggttgtattatcggattcggatgtcgtggaatttcggtacgaagtatttatcgtatattttgtatttacggcgggatggtttacgtatgggtattattttgaatttgtattagcgtgaggttttcgtagaatacggtattagtatcgatgtatatttggttggtatattttaggggttggcgcgtaggggtgtggtcgaagataaatagattagtattagttatcggcgagataatgtcgttttgagcgtcgttaattcgtttacgattttagatgattatgtttttcgggatcggtttgtcgaacgt

SEQ ID NO: 28288 - DNA, 607 bp, Artificial Sequence
  chemically treated genomic DNA (Homo sapiens) CpG-island No: 28288
acgttcgacaaaccgatcccgaaaaacataatcatctaaaatcgtaaacgaattaacgacgctcaaaacgacattatctcgccgataactaatactaatctatttatcttcgaccacacccctacgcgccaacccctaaaatataccaaccaaatatacatcgatactaataccgtattctacgaaaacctcacgctaatacaaattcaaaataatacccatacgtaaaccatcccgccgtaaatacaaaatatacgataaatacttcgtaccgaaattccacgacatccgaatccgataatacaacccgaaacataacgcaatcctcgcaataaaaaaacgcaaaaaaaacaacgtaaaaaccgcgactaaacgcatcaaaaaacaaaaaaaaactaaaaaaaacgaacgcaaacgccgcaaaaaacgactaacaaaactcaaaccaaacgaatactacaaaactcaaactcaaaaaactttcaacgcctttatccgtacgcgcgacgccgatttaccatacatcaactacgacgaaaccaatccgcctaatctacataataaccaataaaattacgaccatttcaaaacaataaatacttaccct

SEQ ID NO: 28289 - DNA, 943 bp, Artificial Sequence
  chemically treated genomic DNA (Homo sapiens) CpG-island No: 28289
tcggcgttacgtgttgtttatggttattacgcgtatcggtttttcgttcgtgggcgagttttttaattagtagggtaatattttttattttttcgagtcgttgtggtatatcgagcgtatagtgtttttcgagtcggggggcgttaacgtcgcgggttcggttttggtgtatcgcgacgtgtttaagtagttttttttgtgcgatttgtacgtgttggagtattttattacgtcgttgttcgaggattatttgatttagtttatgtttcgtcggggttttagtcgttttttgtgcgaggatttcgtttgtacgtttttcgttaagaaggttttcgagaagtattattgtaagaatcgtcgttgcggtttttttaacgtgacgttggtcgtagaggtttgtcgtcgtaaggagtatatggtttttaaggcggtgcgtattcggtagttggagtttttgtagtcgttggtcgaggattttcgtttggatttgcgcgttatttagttggtgcgcgattttcgggtcgtgttggtttcgcgtatggtggttttcgtcggtaagtataagatttggaagaagtggttggacgacgagggttaggacggtttgagggaagaggaggtgtagcggttgcggggtaattgcgagagtattcgtttgttcgcggagttggggttgcggtagttcgtttggttgcggggtcgttatatgttggtgcgttacgaggacgtggtacgcgggtcgttgtagaaggttcgcgagatgtatcgtttcgtcggtatttttttgatttcgtaggtggaagattggatttaaaagaatacgtaggcggtttacgacggtagcggtatttattttacgtagaagaatttttcggagtagttcgagaagtggcgttttagtatgttttttaagttggtttaggtggtgtaggtcgtttgcggt

SEQ ID NO: 28290 - DNA, 943 bp, Artificial Sequence
  chemically treated genomic DNA (Homo sapiens) CpG-island No: 28290
accgcaaacgacctacaccacctaaaccaacttaaaaaacatactaaaacgccacttctcgaactactccgaaaaattcttctacgtaaaataaataccgctaccgtcgtaaaccgcctacgtattcttttaaatccaatcttccacctacgaaatcaaaaaaataccgacgaaacgatacatctcgcgaaccttctacaacgacccgcgtaccacgtcctcgtaacgcaccaacatataacgaccccgcaaccaaacgaactaccgcaaccccaactccgcgaacaaacgaatactctcgcaattaccccgcaaccgctacacctcctcttccctcaaaccgtcctaaccctcgtcgtccaaccacttcttccaaatcttatacttaccgacgaaaaccaccatacgcgaaaccaacacgacccgaaaatcgcgcaccaactaaataacgcgcaaatccaaacgaaaatcctcgaccaacgactacaaaaactccaactaccgaatacgcaccgccttaaaaaccatatactccttacgacgacaaacctctacgaccaacgtcacgttaaaaaaaccgcaacgacgattcttacaataatacttctcgaaaaccttcttaacgaaaaacgtacaaacgaaatcctcgcacaaaaaacgactaaaaccccgacgaaacataaactaaatcaaataatcctcgaacaacgacgtaataaaatactccaacacgtacaaatcgcacaaaaaaaactacttaaacacgtcgcgatacaccaaaaccgaacccgcgacgttaacgccccccgactcgaaaaacactatacgctcgatataccacaacgactcgaaaaaataaaaaatattaccctactaattaaaaaactcgcccacgaacgaaaaaccgatacgcgtaataaccataaacaacacgtaacgccga

SEQ ID NO: 28291 - DNA, 943 bp, Artificial Sequence
  chemically treated genomic DNA (Homo sapiens) CpG-island No: 28291
gtcgtaggcggtttgtattatttgggttagtttgaagggtatgttgaagcgttatttttcgaattgtttcgaggagtttttttgcgtggagtagatgtcgttgtcgtcgtgggtcgtttgcgtgtttttttggatttagttttttatttgcggggttagggggatgtcggcgaagcggtatatttcgcgggttttttgtagcggttcgcgtgttacgttttcgtagcgtattagtatgtagcggtttcgtagttaggcgggttgtcgtagttttagtttcgcggataggcggatgttttcgtagttgtttcgtagtcgttgtattttttttttttttaggtcgttttggttttcgtcgtttagttattttttttaggttttatatttgtcggcgaaggttattatgcgcgaggttagtacggttcgggggtcgcgtattagttggatgacgcgtaggtttaggcgggggttttcggttagcggttgtaggaattttagttgtcggatgcgtatcgttttgagggttatgtgttttttgcggcggtaggtttttgcggttagcgttacgttgagggggtcgtagcggcggtttttgtagtggtatttttcgaagatttttttgacgaagggcgtatagacggggttttcgtatagggagcggttggagtttcggcggaatatgaattgagttaggtggttttcgggtagcggcgtgatgaagtgttttagtacgtataggtcgtataggaagagttgtttgagtacgtcgcggtatattagggtcgagttcgcggcgttggcgtttttcggttcgaaggatattgtgcgttcgatgtgttatagcggttcgaagaggtagaagatgttgttttgttggttgaagaattcgtttacgaacgaggagtcggtgcgcgtggtggttatgagtagtacgtggcgtcgg

SEQ ID NO: 28292 - DNA, 943 bp, Artificial Sequence
  chemically treated genomic DNA (Homo sapiens) CpG-island No: 28292
ccgacgccacgtactactcataaccaccacgcgcaccgactcctcgttcgtaaacgaattcttcaaccaacaaaacaacatcttctacctcttcgaaccgctataacacatcgaacgcacaatatccttcgaaccgaaaaacgccaacgccgcgaactcgaccctaatataccgcgacgtactcaaacaactcttcctatacgacctatacgtactaaaacacttcatcacgccgctacccgaaaaccacctaactcaattcatattccgccgaaactccaaccgctccctatacgaaaaccccgtctatacgcccttcgtcaaaaaaatcttcgaaaaataccactacaaaaaccgccgctacgaccccctcaacgtaacgctaaccgcaaaaacctaccgccgcaaaaaacacataaccctcaaaacgatacgcatccgacaactaaaattcctacaaccgctaaccgaaaacccccgcctaaacctacgcgtcatccaactaatacgcgacccccgaaccgtactaacctcgcgcataataaccttcgccgacaaatataaaacctaaaaaaaataactaaacgacgaaaaccaaaacgacctaaaaaaaaaaaaaatacaacgactacgaaacaactacgaaaacatccgcctatccgcgaaactaaaactacgacaacccgcctaactacgaaaccgctacatactaatacgctacgaaaacgtaacacgcgaaccgctacaaaaaacccgcgaaatataccgcttcgccgacatccccctaaccccgcaaataaaaaactaaatccaaaaaaacacgcaaacgacccacgacgacaacgacatctactccacgcaaaaaaactcctcgaaacaattcgaaaaataacgcttcaacatacccttcaaactaacccaaataatacaaaccgcctacgac

SEQ ID NO: 28293 - DNA, 553 bp, Artificial Sequence
  chemically treated genomic DNA (Homo sapiens) CpG-island No: 28293
cgcgatttatttttcgttagttatcggaggtagatcgcgggaggagagttgaggatagtcgcgtgcgtttcgttagtagcggggtgggaggaaggatattaaaatattgtagaagttaagatttttttaggtcgaatttagattacgatgcgcgtttcgggttgcgggcggttggtgttgtcgttgttgtttttggtcgcggtagttttggtcgaaggcgacgttaaggggtttaaggagggcgagattttcggtaattttatggaggacgagtaatggttgtcgtttatttcgtagtatagcggtaagattaagtattggaatcgttttcgagacgtgagttcgtagggttgttaaggtagagattcggggttgcgggttcggggattgagtttcggggtttgcgggagcggtcgtcgtacgtcgtagttcgaggtttcgtagtttgttcggttaattatacggtaagtaaatagtattgggggttatagtttagcgttttttttttgttcgtgcggttcgggtcggcggttttgggattttttagtttcgg

SEQ ID NO: 28294 - DNA, 553 bp, Artificial Sequence
  chemically treated genomic DNA (Homo sapiens) CpG-island No: 28294
ccgaaactaaaaaatcccaaaaccgccgacccgaaccgcacgaacaaaaaaaaaacgctaaactataacccccaatactatttacttaccgtataattaaccgaacaaactacgaaacctcgaactacgacgtacgacgaccgctcccgcaaaccccgaaactcaatccccgaacccgcaaccccgaatctctaccttaacaaccctacgaactcacgtctcgaaaacgattccaatacttaatcttaccgctatactacgaaataaacgacaaccattactcgtcctccataaaattaccgaaaatctcgccctccttaaaccccttaacgtcgccttcgaccaaaactaccgcgaccaaaaacaacaacgacaacaccaaccgcccgcaacccgaaacgcgcatcgtaatctaaattcgacctaaaaaaatcttaacttctacaatattttaatatccttcctcccaccccgctactaacgaaacgcacgcgactatcctcaactctcctcccgcgatctacctccgataactaacgaaaaataaatcgcg

SEQ ID NO: 28295 - DNA, 553 bp, Artificial Sequence
  chemically treated genomic DNA (Homo sapiens) CpG-island No: 28295
tcggggttggggggttttagggtcgtcggttcgggtcgtacggataggggaggggcgttgggttgtgatttttagtattgtttatttgtcgtgtaattagtcgggtaggttgcggagtttcggattgcgacgtgcggcggtcgttttcgtagatttcggagtttaattttcgaattcgtaatttcgggtttttgttttggtagttttgcggatttacgtttcggaagcggttttagtgtttgattttgtcgttgtattgcgagatggacgatagttattgttcgttttttatgaaattgtcgggggtttcgttttttttgagttttttggcgtcgttttcggttagggttgtcgcggttaggagtagtagcggtagtattagtcgttcgtagttcggggcgcgtatcgtggtttgggttcgatttgggggggttttgatttttgtagtattttaatgtttttttttttatttcgttgttggcgaagcgtacgcggttgtttttagtttttttttcgcggtttgttttcggtgattggcggagagtgggtcgcg

SEQ ID NO: 28296 - DNA, 553 bp, Artificial Sequence
  chemically treated genomic DNA (Homo sapiens) CpG-island No: 28296
cgcgacccactctccgccaatcaccgaaaacaaaccgcgaaaaaaaaactaaaaacaaccgcgtacgcttcgccaacaacgaaataaaaaaaaaaacattaaaatactacaaaaatcaaaacccccccaaatcgaacccaaaccacgatacgcgccccgaactacgaacgactaatactaccgctactactcctaaccgcgacaaccctaaccgaaaacgacgccaaaaaactcaaaaaaaacgaaacccccgacaatttcataaaaaacgaacaataactatcgtccatctcgcaatacaacgacaaaatcaaacactaaaaccgcttccgaaacgtaaatccgcaaaactaccaaaacaaaaacccgaaattacgaattcgaaaattaaactccgaaatctacgaaaacgaccgccgcacgtcgcaatccgaaactccgcaacctacccgactaattacacgacaaataaacaatactaaaaatcacaacccaacgcccctcccctatccgtacgacccgaaccgacgaccctaaaaccccccaaccccga

SEQ ID NO: 28297 - DNA, 558 bp, Artificial Sequence
  chemically treated genomic DNA (Homo sapiens) CpG-island No: 28297
ttacggcgcgggtaaggagaaggaagcgacgagtatcgaggcgtcgcgatttaagggattagtatatcgtcgattattaggcgtttaatgaataatacgattttttggattatcggagcgagtaatcggtgtttattttagtattatcgataatgattttatttttaatcgtttttttttttttcggttattattcggtgttttcggataggggtaaagggacggcgagtcggggagtgaggagttgtttttagttagtgcgatttcgggacgcggacgtttaatttagttttattatgtttatatgtagggttgttggcggttgcggttggggtcggggtcggggatttataggttcgggtgtcgtggtgcggggtggggatagttaattatagcgggagacggaggaagttgggggtagttgggtgcgtgttttgtatcgtttatttgtcggggttcggtttttggcggtgggcgagagggagtatattcgtttatattttaggaatttgttggggagatgagttcgtggggttagaaagaagggaaaaatttttt

SEQ ID NO: 28298 - DNA, 558 bp, Artificial Sequence
  chemically treated genomic DNA (Homo sapiens) CpG-island No: 28298
aaaaaatttttcccttctttctaaccccacgaactcatctccccaacaaattcctaaaatataaacgaatatactccctctcgcccaccgccaaaaaccgaaccccgacaaataaacgatacaaaacacgcacccaactacccccaacttcctccgtctcccgctataattaactatccccaccccgcaccacgacacccgaacctataaatccccgaccccgaccccaaccgcaaccgccaacaaccctacatataaacataataaaactaaattaaacgtccgcgtcccgaaatcgcactaactaaaaacaactcctcactccccgactcgccgtccctttacccctatccgaaaacaccgaataataaccgaaaaaaaaaaaaacgattaaaaataaaatcattatcgataatactaaaataaacaccgattactcgctccgataatccaaaaaatcgtattattcattaaacgcctaataatcgacgatatactaatcccttaaatcgcgacgcctcgatactcgtcgcttccttctccttacccgcgccgtaa

SEQ ID NO: 28299 - DNA, 558 bp, Artificial Sequence
  chemically treated genomic DNA (Homo sapiens) CpG-island No: 28299
aaaggattttttttttttttttgattttacgaatttatttttttaataggtttttaaagtatgggcggatgtgttttttttcgtttatcgttaggagtcgagtttcggtaggtgagcggtgtaaaatacgtatttagttgtttttagtttttttcgtttttcgttgtagttggttgtttttatttcgtattacggtattcgagtttgtgagttttcgatttcggttttagtcgtagtcgttaataattttatatataaatatagtaggattggattgagcgttcgcgtttcggagtcgtattggttgggggtaattttttatttttcggttcgtcgtttttttgtttttattcgagagtatcgggtagtagtcgagggaagggaaggcggttaggggtaaggttattgtcggtgatgttagggtaggtatcggttgttcgtttcggtagtttaggaagtcgtgttgtttattggacgtttagtagtcggcggtgtgttggttttttaggtcgcggcgtttcggtgttcgtcgtttttttttttttgttcgcgtcgtgg

SEQ ID NO: 28300 - DNA, 558 bp, Artificial Sequence
  chemically treated genomic DNA (Homo sapiens) CpG-island No: 28300
ccacgacgcgaacaaaaaaaaaaaaacgacgaacaccgaaacgccgcgacctaaaaaaccaacacaccgccgactactaaacgtccaataaacaacacgacttcctaaactaccgaaacgaacaaccgatacctaccctaacatcaccgacaataaccttacccctaaccgccttcccttccctcgactactacccgatactctcgaataaaaacaaaaaaacgacgaaccgaaaaataaaaaattacccccaaccaatacgactccgaaacgcgaacgctcaatccaatcctactatatttatatataaaattattaacgactacgactaaaaccgaaatcgaaaactcacaaactcgaataccgtaatacgaaataaaaacaaccaactacaacgaaaaacgaaaaaaactaaaaacaactaaatacgtattttacaccgctcacctaccgaaactcgactcctaacgataaacgaaaaaaaacacatccgcccatactttaaaaacctattaaaaaaataaattcgtaaaatcaaaaaaaaaaaaaaaatccttt

SEQ ID NO: 28301 - DNA, 506 bp, Artificial Sequence
  chemically treated genomic DNA (Homo sapiens) CpG-island No: 28301
  unsure (445, 495..)
ttcgcgtacgtagcggtttcggttcgttggtacgtcgtagtgtgattgtagatagagtagcggcgcgtagtcgcggcggcgttatttcgcgcgttttatgggcggaggtatcgggcggcgtagataggcggtttcgggtagttattgtagcgatagcgggtaattcgagtggcgattgaaggtggaggtaagattgaagaggcggatgttcgggtcgggtttagtaagaagttgttgaggggcgatttttcgtggaggagcgtttagttttggtgcgttaggcgcggtagcggggcggtcgacgcgcggaagtttgtgtcgtagaagagtagcgcgcgcgttcgcgagttttttagcgttcggcggtttcgggacgttacgtacgcgtcgcgcgtatattcgatgcgtttcgagtttttcgggaagtgggggaatagttttgggnttttattatagtagtatcggtaagtttttcgttttttttttttttttggnntcgcggcgtt

SEQ ID NO: 28302 - DNA, 506 bp, Artificial Sequence
  chemically treated genomic DNA (Homo sapiens) CpG-island No: 28302
  unsure (11..12, 62)
aacgccgcgannccaaaaaaaaaaaaaaaacgaaaaacttaccgatactactataataaaancccaaaactattcccccacttcccgaaaaactcgaaacgcatcgaatatacgcgcgacgcgtacgtaacgtcccgaaaccgccgaacgctaaaaaactcgcgaacgcgcgcgctactcttctacgacacaaacttccgcgcgtcgaccgccccgctaccgcgcctaacgcaccaaaactaaacgctcctccacgaaaaatcgcccctcaacaacttcttactaaacccgacccgaacatccgcctcttcaatcttacctccaccttcaatcgccactcgaattacccgctatcgctacaataactacccgaaaccgcctatctacgccgcccgatacctccgcccataaaacgcgcgaaataacgccgccgcgactacgcgccgctactctatctacaatcacactacgacgtaccaacgaaccgaaaccgctacgtacgcgaa

SEQ ID NO: 28303 - DNA, 506 bp, Artificial Sequence
  chemically treated genomic DNA (Homo sapiens) CpG-island No: 28303
  unsure (11..12, 62)
gacgtcgcggnnttagggagggaaggaaggcgggggatttgtcggtattgttgtggtggagntttagggttatttttttatttttcgggagattcggagcgtatcgagtgtgcgcgcggcgcgtgcgtggcgtttcggaatcgtcgagcgttgagggattcgcggacgcgcgcgttgtttttttacggtatagattttcgcgcgtcggtcgtttcgttgtcgcgtttggcgtattagagttgggcgtttttttacgaggagtcgttttttaataattttttgttgagttcggttcgggtattcgtttttttaattttatttttatttttagtcgttattcggattattcgttgtcgttgtagtggttgttcgggatcgtttatttgcgtcgttcggtgttttcgtttatggaacgcgcggagtggcgtcgtcgcggttacgcgtcgttgttttatttgtagttatattgcgacgtgttagcggatcgggatcgttacgtgcgcgag

SEQ ID NO: 28304 - DNA, 506 bp, Artificial Sequence
  chemically treated genomic DNA (Homo sapiens) CpG-island No: 28304
  unsure (445, 495..)
ctcgcgcacgtaacgatcccgatccgctaacacgtcgcaatataactacaaataaaacaacgacgcgtaaccgcgacgacgccactccgcgcgttccataaacgaaaacaccgaacgacgcaaataaacgatcccgaacaaccactacaacgacaacgaataatccgaataacgactaaaaataaaaataaaattaaaaaaacgaatacccgaaccgaactcaacaaaaaattattaaaaaacgactcctcgtaaaaaaacgcccaactctaatacgccaaacgcgacaacgaaacgaccgacgcgcgaaaatctataccgtaaaaaaacaacgcgcgcgtccgcgaatccctcaacgctcgacgattccgaaacgccacgcacgcgccgcgcgcacactcgatacgctccgaatctcccgaaaaataaaaaaataaccctaaanctccaccacaacaataccgacaaatcccccgccttccttccctccctaannccgcgacgtc

SEQ ID NO: 28305 - DNA, 1127 bp, Artificial Sequence
  chemically treated genomic DNA (Homo sapiens) CpG-island No: 28305
  unsure (352, 931)
aggggcgtgagttggttcggttttcgggggaattgggggtttggggttgtttgtgagtggagagggtttgcgggattcggtaggcgggcggggggttgggttttgaggcggcgttgatggggtggttcgggggcggtttttgtgggggaggggtttggggggggcgggtgcgaggaatttgcgtttttgggaggggcgtttgtgggggggttgtcgtagagggggtttgagtgtttgtggggcgcgaacgcggttgggttttgggagaagtcgggcgtggttggtttgcgttgagcgttcgaaggaggagagtttggcgcgaggaggaggttttgtgtgcggcgtcgaaggncggttagatattggggtggtgcggcgttgtgagagagggtggagggattttcgtgcggtggaagaagagagtgcgcgcgcggaaggggtttgttagagttgttgtcgatagaggcgaggaagtgggtttttttgtgggggagagcgtgtttgatgtgttgaggaggtggagaaaatttgtgtggggcgggttgttgggggagaggcgacgtgttgtggggtcggggtgaaggggttgtgttatggcggaggtcgtgtgtgtttgtgcgcgcgcgattttggtcggtcgggcggcgttggagaaggatagattgtttcgcggttgaaagcggttcgatgtgttgtttttgcgggggggttttgtgtcgcgaggaggggttgttttgtcgagagcggcgataagtttcgcgttgtagggggggggcggggaagggaggagcgtgtcgtgcgtgtgggttttttgtggaggagacggttgagaatacgtgaggaaaagataggcgcgtcgtcgttgtgaggtggtgtcgcggtacgaatttttgggggggggtgttgtttgaagaggcggggttttgttggnttgatggagagtgtttcgtttcgtagaggggcgagcggttttttttttttgcgagcgtggggggttgcgcgattgtcggtcgtcggttgatgattgtcgtgaagaggatgtttgacggggttgtttgtgtgagaaggaggtgtgttggcggggggggagtggttgttgcgtgcgaaggagagacggtacggggggt

SEQ ID NO: 28306 - DNA, 1127 bp, Artificial Sequence
  chemically treated genomic DNA (Homo sapiens) CpG-island No: 28306
  unsure (197, 776)
accccccgtaccgtctctccttcgcacgcaacaaccactccccccccgccaacacacctccttctcacacaaacaaccccgtcaaacatcctcttcacgacaatcatcaaccgacgaccgacaatcgcgcaaccccccacgctcgcaaaaaaaaaaaaccgctcgcccctctacgaaacgaaacactctccatcaanccaacaaaaccccgcctcttcaaacaacacccccccccaaaaattcgtaccgcgacaccacctcacaacgacgacgcgcctatcttttcctcacgtattctcaaccgtctcctccacaaaaaacccacacgcacgacacgctcctcccttccccgccccccccctacaacgcgaaacttatcgccgctctcgacaaaacaacccctcctcgcgacacaaaacccccccgcaaaaacaacacatcgaaccgctttcaaccgcgaaacaatctatccttctccaacgccgcccgaccgaccaaaatcgcgcgcgcacaaacacacacgacctccgccataacacaaccccttcaccccgaccccacaacacgtcgcctctcccccaacaacccgccccacacaaattttctccacctcctcaacacatcaaacacgctctcccccacaaaaaaacccacttcctcgcctctatcgacaacaactctaacaaaccccttccgcgcgcgcactctcttcttccaccgcacgaaaatccctccaccctctctcacaacgccgcaccaccccaatatctaaccgnccttcgacgccgcacacaaaacctcctcctcgcgccaaactctcctccttcgaacgctcaacgcaaaccaaccacgcccgacttctcccaaaacccaaccgcgttcgcgccccacaaacactcaaaccccctctacgacaacccccccacaaacgcccctcccaaaaacgcaaattcctcgcacccgccccccccaaacccctcccccacaaaaaccgcccccgaaccaccccatcaacgccgcctcaaaacccaaccccccgcccgcctaccgaatcccgcaaaccctctccactcacaaacaaccccaaacccccaattcccccgaaaaccgaaccaactcacgcccct

SEQ ID NO: 28307 - DNA, 1127 bp, Artificial Sequence
  chemically treated genomic DNA (Homo sapiens) CpG-island No: 28307
  unsure (197, 776)
gtttttcgtgtcgtttttttttcgtacgtaataattatttttttttcgttagtatattttttttttatataaatagtttcgttaaatattttttttacgataattattaatcgacgatcgataatcgcgtagttttttacgttcgtaaaaaaaaaagatcgttcgtttttttgcgaggcgaagtattttttattaanttaatagagtttcgtttttttaaataatatttttttttaaaaattcgtgtcgcggtattattttataacgacgacgcgtttgttttttttttacgtatttttagtcgttttttttatagaaaatttatacgtacgatacgtttttttttttttcgttttttttttatagcgcggagtttatcgtcgttttcgatagaatagttttttttcgcggtataaaattttttcgtagaaataatatatcgagtcgtttttagtcgcggaataatttgtttttttttagcgtcgttcggtcgattaagatcgcgcgcgtataaatatatacggttttcgttatggtatagtttttttatttcgattttataatacgtcgttttttttttaataattcgttttatataaattttttttatttttttaatatattaaatacgtttttttttataaagaggtttattttttcgtttttgtcggtagtagttttaataaatttttttcgcgcgcgtattttttttttttatcgtacgggagtttttttatttttttttataacgtcgtattattttaatatttggtcgnttttcggcgtcgtatataaaatttttttttcgcgttaaatttttttttttcgagcgtttagcgtaaattaattacgttcggttttttttagaatttaatcgcgttcgcgttttataggtatttagattttttttgcgataatttttttataggcgttttttttaaaggcgtaaatttttcgtattcgttttttttaagttttttttttataaaagtcgttttcgggttattttattagcgtcgttttaaaatttaatttttcgttcgtttgtcgaatttcgtaggttttttttatttataagtaattttaaatttttaattttttcgaaaatcggattaatttacgttttt

SEQ ID NO: 28308 - DNA, 1127 bp, Artificial Sequence
  chemically treated genomic DNA (Homo sapiens) CpG-island No: 28308
  unsure (352, 931)
aaaaacgtaaattaatccgattttcgaaaaaattaaaaatttaaaattacttataaataaaaaaaacctacgaaattcgacaaacgaacgaaaaattaaattttaaaacgacgctaataaaataacccgaaaacgacttttataaaaaaaaaacttaaaaaaaacgaatacgaaaaatttacgcctttaaaaaaaacgcctataaaaaaattatcgcaaaaaaaatctaaatacctataaaacgcgaacgcgattaaattctaaaaaaaaccgaacgtaattaatttacgctaaacgctcgaaaaaaaaaaatttaacgcgaaaaaaaaattttatatacgacgccgaaaancgaccaaatattaaaataatacgacgttataaaaaaaaataaaaaaactcccgtacgataaaaaaaaaaaatacgcgcgcgaaaaaaatttattaaaactactaccgacaaaaacgaaaaaataaacctctttataaaaaaaaacgtatttaatatattaaaaaaataaaaaaaatttatataaaacgaattattaaaaaaaaaacgacgtattataaaatcgaaataaaaaaactataccataacgaaaaccgtatatatttatacgcgcgcgatcttaatcgaccgaacgacgctaaaaaaaaacaaattattccgcgactaaaaacgactcgatatattatttctacgaaaaaattttataccgcgaaaaaaaactattctatcgaaaacgacgataaactccgcgctataaaaaaaaaacgaaaaaaaaaaaaacgtatcgtacgtataaattttctataaaaaaaacgactaaaaatacgtaaaaaaaaaacaaacgcgtcgtcgttataaaataataccgcgacacgaatttttaaaaaaaaatattatttaaaaaaacgaaactctattaanttaataaaaaatacttcgcctcgcaaaaaaacgaacgatcttttttttttacgaacgtaaaaaactacgcgattatcgatcgtcgattaataattatcgtaaaaaaaatatttaacgaaactatttatataaaaaaaaaatatactaacgaaaaaaaaataattattacgtacgaaaaaaaaacgacacgaaaaac

SEQ ID NO: 28309 - DNA, 536 bp, Artificial Sequence
  chemically treated genomic DNA (Homo sapiens) CpG-island No: 28309
  unsure (222)
tttttttttttttttacgtttttttttgataaggtttgagtggcgggcgagacgagggttgggcggggtttttcgtttttcgggcggggtgttatttttaggtttcgcgagtattttcgggtcgttagtttagttttgcggtttttgcggcggttggagaggtggtcggagaagtaggaattttttgtcgggttcgtggcggtttttgttcgtttcgggggnggaagcgttttttttatagggagtgtgttatagagggtagggttaaggagggaaatatagtcgcgttttttttcgttttttcggagtcggagtgcgttggtggggtagtttttgaggttttttcgtttttgggatttgttcgttatcgatcgttgtcggtaaagtttcgcggcggtatcggagaagggcggcgaggcggcggtgatggtcgcgtttcgtggcgggaggttcgtcgtttatagggcgtttatagaatttatttaggggaggtttttagtttattatcgtatttttagttaggtgaatgttttaaa

SEQ ID NO: 28310 - DNA, 536 bp, Artificial Sequence
  chemically treated genomic DNA (Homo sapiens) CpG-island No: 28310
  unsure (315)
tttaaaacattcacctaactaaaaatacgataataaactaaaaacctcccctaaataaattctataaacgccctataaacgacgaacctcccgccacgaaacgcgaccatcaccgccgcctcgccgcccttctccgataccgccgcgaaactttaccgacaacgatcgataacgaacaaatcccaaaaacgaaaaaacctcaaaaactaccccaccaacgcactccgactccgaaaaaacgaaaaaaaacgcgactatatttccctccttaaccctaccctctataacacactccctataaaaaaaacgcttccncccccgaaacgaacaaaaaccgccacgaacccgacaaaaaattcctacttctccgaccacctctccaaccgccgcaaaaaccgcaaaactaaactaacgacccgaaaatactcgcgaaacctaaaaataacaccccgcccgaaaaacgaaaaaccccgcccaaccctcgtctcgcccgccactcaaaccttatcaaaaaaaaacgtaaaaaaaaaaaaaaa

SEQ ID NO: 28311 - DNA, 536 bp, Artificial Sequence
  chemically treated genomic DNA (Homo sapiens) CpG-island No: 28311
  unsure (315)
tttaagatatttatttggttgaaaatacggtggtgggttgaagattttttttaggtgggttttgtgggcgttttgtgaacgacgagtttttcgttacgggacgcgattattatcgtcgtttcgtcgttttttttcggtgtcgtcgcggggttttgtcggtaacggtcggtaacgggtagattttaggagcgaaagggttttagagattattttattaacgtatttcgatttcgggggggcggaagagagcgcggttgtgtttttttttttaattttgttttttataatatattttttgtggggaaggcgtttttnttttcggagcggatagaagtcgttacgagttcggtaggaggtttttattttttcgattatttttttagtcgtcgtagaaatcgtagaattgagttgacgattcggaagtgttcgcggaatttggaagtgatatttcgttcgagggacgggaggtttcgtttagttttcgtttcgttcgttatttaagttttgttagggaagggcgtggagagggaaggagg

SEQ ID NO: 28312 - DNA, 536 bp, Artificial Sequence
  chemically treated genomic DNA (Homo sapiens) CpG-island No: 28312
  unsure (222)
cctccttccctctccacgcccttccctaacaaaacttaaataacgaacgaaacgaaaactaaacgaaacctcccgtccctcgaacgaaatatcacttccaaattccgcgaacacttccgaatcgtcaactcaattctacgatttctacgacgactaaaaaaataatcgaaaaaataaaaacctcctaccgaactcgtaacgacttctatccgctccgaaaanaaaaacgccttccccacaaaaaatatattataaaaaacaaaattaaaaaaaaaaacacaaccgcgctctcttccgcccccccgaaatcgaaatacgttaataaaataatctctaaaaccctttcgctcctaaaatctacccgttaccgaccgttaccgacaaaaccccgcgacgacaccgaaaaaaaacgacgaaacgacgataataatcgcgtcccgtaacgaaaaactcgtcgttcacaaaacgcccacaaaacccacctaaaaaaaatcttcaacccaccaccgtattttcaaccaaataaatatcttaaa

SEQ ID NO: 28313 - DNA, 522 bp, Artificial Sequence
  chemically treated genomic DNA (Homo sapiens) CpG-island No: 28313
tttttcgatatttttgcgtcggggtttttttttagcgtttcgggaaagcgttcgtcgtaggtttgttaggggtttattaatatcgtaatatcgttttcgttttttttttcggtatcgttgtaaacgtttcgggtcgttattcggatttgacggtggttggagcggtacgggcgacgtaaggtaggtattgtattttggggtaaggtaaggtggataattagcggatgcggcgcggtcgcggtttgggtttgggtttttcgcgtcgtttattgttttattgggttttttttttcgcgtttatcggagggcgggtagttgttcgttatcgagattcgagattacggtgcggcggtttaatttgggttacgtttcgttttagaggagtggtcggggtttttcgttttaattggtcgggtttaggcgtttttaagatcggtcgtttcggaaaagtcgggtcgtgggtttattttttttcggggtaagatttaacgtttggaaattttgagggtttttttttaaatt

SEQ ID NO: 28314 - DNA, 522 bp, Artificial Sequence
  chemically treated genomic DNA (Homo sapiens) CpG-island No: 28314
aatttaaaaaaaaaccctcaaaatttccaaacgttaaatcttaccccgaaaaaaaataaacccacgacccgacttttccgaaacgaccgatcttaaaaacgcctaaacccgaccaattaaaacgaaaaaccccgaccactcctctaaaacgaaacgtaacccaaattaaaccgccgcaccgtaatctcgaatctcgataacgaacaactacccgccctccgataaacgcgaaaaaaaaaacccaataaaacaataaacgacgcgaaaaacccaaacccaaaccgcgaccgcgccgcatccgctaattatccaccttaccttaccccaaaatacaatacctaccttacgtcgcccgtaccgctccaaccaccgtcaaatccgaataacgacccgaaacgtttacaacgataccgaaaaaaaaaacgaaaacgatattacgatattaataaacccctaacaaacctacgacgaacgctttcccgaaacgctaaaaaaaaaccccgacgcaaaaatatcgaaaaa

SEQ ID NO: 28315 - DNA, 522 bp, Artificial Sequence
  chemically treated genomic DNA (Homo sapiens) CpG-island No: 28315
aatttaaaggggggtttttagggtttttaggcgttgagttttgtttcggggggaggtaagtttacggttcggttttttcggaacggtcggttttggaaacgtttagattcggttagttagggcgggaggtttcggttatttttttagagcggagcgtggtttaggttgagtcgtcgtatcgtggtttcgggtttcggtgacgagtagttgttcgtttttcggtgagcgcggagaaaggggtttagtggggtagtgggcgacgcggagggtttaggtttaggtcgcggtcgcgtcgtattcgttggttgtttattttgttttgttttagggtgtaatatttgttttgcgtcgttcgtgtcgttttagttatcgttaaattcgggtagcgattcggggcgtttgtagcggtgtcgaggaagaggacgggaacggtgttacggtattggtgggtttttaataggtttgcggcgaacgttttttcggagcgttagggaagggtttcggcgtagggatgtcggaggg

SEQ ID NO: 28316 - DNA, 522 bp, Artificial Sequence
  chemically treated genomic DNA (Homo sapiens) CpG-island No: 28316
ccctccgacatccctacgccgaaacccttccctaacgctccgaaaaaacgttcgccgcaaacctattaaaaacccaccaataccgtaacaccgttcccgtcctcttcctcgacaccgctacaaacgccccgaatcgctacccgaatttaacgataactaaaacgacacgaacgacgcaaaacaaatattacaccctaaaacaaaacaaaataaacaaccaacgaatacgacgcgaccgcgacctaaacctaaaccctccgcgtcgcccactaccccactaaacccctttctccgcgctcaccgaaaaacgaacaactactcgtcaccgaaacccgaaaccacgatacgacgactcaacctaaaccacgctccgctctaaaaaaataaccgaaacctcccgccctaactaaccgaatctaaacgtttccaaaaccgaccgttccgaaaaaaccgaaccgtaaacttacctccccccgaaacaaaactcaacgcctaaaaaccctaaaaacccccctttaaatt

SEQ ID NO: 28317 - DNA, 1102 bp, Artificial Sequence
  chemically treated genomic DNA (Homo sapiens) CpG-island No: 28317
ttcgatatcgaggtttaagatttcgtatttcgggtagcgaatataggagaaaagtatatcgcggttcggtcgcggggttttaaggcgttcgtgtcgtcgttgtttttggggtgtcgagagcgacgcggggtttatttttttcgtcggttcgaggttcgaagttcggttcgttatcgttttcggtcggcgtttttcgtacgtggcggtcgtgattgtttcggggcggtattttttcgcgttttcgttttagttttttttcgtttttttcgggatttttcgtgttcgggcgtcgcggaaggatcgtacgtacgcgcgcgcgtacgtttagtcgtgttcgcggaaaacggagggcgttgcggtaaggagtagtcgttataggtatagtcgtttcgtagtttttcgtcgttggtttgttagtttcgcggttgcgggcggtcgggcggtcgagcgcgttttgaggttcgttttttatcgttgaattcgcgttttttcgtcgtagtttttcggggaggggggcggtcggtgtttgcgtagagtcgtttttttttcgttttcgtttcgttttttttcgcgtcgtcgtcgttcgttatcgtcgtcgtcgtcgttgcgtttgttgtttttcgtcgttcgcgttgtagtgcgaagggttcgaagatggtcggttggtagagttacgtggataatttgatgtgcgatggttgttgttaggaggtcgttattgtcggttattgcgacgttaaatacgtttgggtagttacggtcgggggcgttttttagagtattacggtgaggattagtggcggtcggtattttggtttttgtatcggagcggggtggtcggtcgcgggggtatcgtagcgcggggttggaatattgagggtcgagttcgtaggtgtgttaggtagcgggcgtcgaggatgcggttgtcgggcgggcggggaggtcgaggttcggggacgtttttttattcggggttgcgttgataggttgggggcggcggtcggattttttgttggttttggtcgggcgttttcggcgtttttagcgtcggtttaggtgttcgggttgggggagggggtacgtatcggttagggtaagggga

SEQ ID NO: 28318 - DNA, 1102 bp, Artificial Sequence
  chemically treated genomic DNA (Homo sapiens) CpG-island No: 28318
tccccttaccctaaccgatacgtaccccctcccccaacccgaacacctaaaccgacgctaaaaacgccgaaaacgcccgaccaaaaccaacaaaaaatccgaccgccgcccccaacctatcaacgcaaccccgaataaaaaaacgtccccgaacctcgacctccccgcccgcccgacaaccgcatcctcgacgcccgctacctaacacacctacgaactcgaccctcaatattccaaccccgcgctacgatacccccgcgaccgaccaccccgctccgatacaaaaaccaaaataccgaccgccactaatcctcaccgtaatactctaaaaaacgcccccgaccgtaactacccaaacgtatttaacgtcgcaataaccgacaataacgacctcctaacaacaaccatcgcacatcaaattatccacgtaactctaccaaccgaccatcttcgaacccttcgcactacaacgcgaacgacgaaaaacaacaaacgcaacgacgacgacgacgataacgaacgacgacgacgcgaaaaaaaacgaaacgaaaacgaaaaaaaaacgactctacgcaaacaccgaccgcccccctccccgaaaaactacgacgaaaaaacgcgaattcaacgataaaaaacgaacctcaaaacgcgctcgaccgcccgaccgcccgcaaccgcgaaactaacaaaccaacgacgaaaaactacgaaacgactatacctataacgactactccttaccgcaacgccctccgttttccgcgaacacgactaaacgtacgcgcgcgcgtacgtacgatccttccgcgacgcccgaacacgaaaaatcccgaaaaaaacgaaaaaaaactaaaacgaaaacgcgaaaaaataccgccccgaaacaatcacgaccgccacgtacgaaaaacgccgaccgaaaacgataacgaaccgaacttcgaacctcgaaccgacgaaaaaaataaaccccgcgtcgctctcgacaccccaaaaacaacgacgacacgaacgccttaaaaccccgcgaccgaaccgcgatatacttttctcctatattcgctacccgaaatacgaaatcttaaacctcgatatcgaa

SEQ ID NO: 28319 - DNA, 1102 bp, Artificial Sequence
  chemically treated genomic DNA (Homo sapiens) CpG-island No: 28319
tttttttgttttggtcggtgcgtgtttttttttttaattcgggtatttggatcgacgttgggaacgtcgggggcgttcggttagggttagtaaggagttcggtcgtcgtttttagtttgttagcgtagtttcgggtgagggggcgttttcgggtttcggttttttcgttcgttcggtagtcgtattttcggcgttcgttgtttagtatatttgcgggttcggtttttagtgttttagtttcgcgttgcggtgttttcgcggtcggttatttcgtttcggtgtagggattagggtatcggtcgttattggtttttatcgtaatgttttgaaagacgttttcggtcgtggttgtttagacgtatttggcgtcgtagtagtcgataatggcggttttttggtagtagttatcgtatattaggttatttacgtagttttgttaatcggttattttcgagtttttcgtattgtagcgcggacggcgaggagtagtaggcgtagcggcggcggcggcggtagcgggcggcggcggcgcggggggaggcggggcgggggcggggaggaggcggttttgcgtaggtatcgatcgttttttttttcgaggagttgcggcgggaggacgcgggtttagcgatgagggacgaattttagagcgcgttcggtcgttcggtcgttcgtagtcgcggggttgataaattagcggcgggaggttgcgaagcggttgtgtttgtggcggttgttttttatcgtagcgtttttcgtttttcgcggatacggttgggcgtgcgcgcgcgcgtgcgtgcgattttttcgcggcgttcgggtacggagggtttcgggaagggcggggggagattgaggcgggggcgcggagggatatcgtttcgggataattacggtcgttacgtgcgggaggcgtcggtcgggagcggtggcgggtcgagtttcggatttcgggtcggcggagagggtggatttcgcgtcgttttcggtattttaggaatagcggcggtacggacgttttggagtttcgcggtcgggtcgcgatgtgttttttttttgtgttcgttgttcgggatgcggaattttgagtttcggtgtcggg

SEQ ID NO: 28320 - DNA, 1102 bp, Artificial Sequence
  chemically treated genomic DNA (Homo sapiens) CpG-island No: 28320
cccgacaccgaaactcaaaattccgcatcccgaacaacgaacacaaaaaaaaaacacatcgcgacccgaccgcgaaactccaaaacgtccgtaccgccgctattcctaaaataccgaaaacgacgcgaaatccaccctctccgccgacccgaaatccgaaactcgacccgccaccgctcccgaccgacgcctcccgcacgtaacgaccgtaattatcccgaaacgatatccctccgcgcccccgcctcaatctccccccgcccttcccgaaaccctccgtacccgaacgccgcgaaaaaatcgcacgcacgcgcgcgcgcacgcccaaccgtatccgcgaaaaacgaaaaacgctacgataaaaaacaaccgccacaaacacaaccgcttcgcaacctcccgccgctaatttatcaaccccgcgactacgaacgaccgaacgaccgaacgcgctctaaaattcgtccctcatcgctaaacccgcgtcctcccgccgcaactcctcgaaaaaaaaaacgatcgatacctacgcaaaaccgcctcctccccgcccccgccccgcctccccccgcgccgccgccgcccgctaccgccgccgccgccgctacgcctactactcctcgccgtccgcgctacaatacgaaaaactcgaaaataaccgattaacaaaactacgtaaataacctaatatacgataactactaccaaaaaaccgccattatcgactactacgacgccaaatacgtctaaacaaccacgaccgaaaacgtctttcaaaacattacgataaaaaccaataacgaccgataccctaatccctacaccgaaacgaaataaccgaccgcgaaaacaccgcaacgcgaaactaaaacactaaaaaccgaacccgcaaatatactaaacaacgaacgccgaaaatacgactaccgaacgaacgaaaaaaccgaaacccgaaaacgccccctcacccgaaactacgctaacaaactaaaaacgacgaccgaactccttactaaccctaaccgaacgcccccgacgttcccaacgtcgatccaaatacccgaattaaaaaaaaaaacacgcaccgaccaaaacaaaaaaa

SEQ ID NO: 28321 - DNA, 588 bp, Artificial Sequence
  chemically treated genomic DNA (Homo sapiens) CpG-island No: 28321
tcggttcgggttttttattggcgcgttcgtagcggcgttttatttttagtaggcgttgtggtaatataaggaatgcgcggcgcgttaggcgttcggggcgtacgttggcggcgcggtcgttttaaggaggcgtcggggcggggacggatcggagtggtcggttggcggggagtcgttagttcggcggtcgcggggttcggcgggcgcgacgttgtttttttatcggcgtaggttaggagggggcggtttgagtgtcgtagtcgagtcggggttggagcgcgcggtgagtggtcgggcggttttggaggggagggggttcggtcgcgtcgtttttcgtttcggtcgtcgttttgtttcggggcgggaggtgtggtcgtttttcgggttcggtcgcgtttttcgtttgcggggtgcgttttgggatcggttgtgcgtggcgttttgtttttatcgcgggttttcgcgtaacggtgtgcgttcgtgaaatcggttacgattaagattttagtggggagggtttgcgcgtcgtttagagagatttttttatggtaattatagttttttggttgtttgggcgagaattcggtg

SEQ ID NO: 28322 - DNA, 588 bp, Artificial Sequence
  chemically treated genomic DNA (Homo sapiens) CpG-island No: 28322
caccgaattctcgcccaaacaaccaaaaaactataattaccataaaaaaatctctctaaacgacgcgcaaaccctccccactaaaatcttaatcgtaaccgatttcacgaacgcacaccgttacgcgaaaacccgcgataaaaacaaaacgccacgcacaaccgatcccaaaacgcaccccgcaaacgaaaaacgcgaccgaacccgaaaaacgaccacacctcccgccccgaaacaaaacgacgaccgaaacgaaaaacgacgcgaccgaaccccctcccctccaaaaccgcccgaccactcaccgcgcgctccaaccccgactcgactacgacactcaaaccgccccctcctaacctacgccgataaaaaaacaacgtcgcgcccgccgaaccccgcgaccgccgaactaacgactccccgccaaccgaccactccgatccgtccccgccccgacgcctccttaaaacgaccgcgccgccaacgtacgccccgaacgcctaacgcgccgcgcattccttatattaccacaacgcctactaaaaataaaacgccgctacgaacgcgccaataaaaaacccgaaccga

SEQ ID NO: 28323 - DNA, 588 bp, Artificial Sequence
  chemically treated genomic DNA (Homo sapiens) CpG-island No: 28323
tatcgggttttcgtttaggtagttaaggaattgtaattattatgaaagggtttttttgagcggcgcgtaggttttttttattggggttttggtcgtggtcgattttacgaacgtatatcgttacgcgggagttcgcgatgggggtaaaacgttacgtatagtcggttttagggcgtatttcgtaagcggagagcgcggtcgagttcggagggcggttatatttttcgtttcggaataaagcgacggtcggggcgagaggcggcgcggtcgggtttttttttttttaaggtcgttcgattatttatcgcgcgttttagtttcggttcggttacggtatttaggtcgtttttttttagtttgcgtcggtgaggaggtagcgtcgcgttcgtcgggtttcgcggtcgtcggattgacggtttttcgttagtcggttatttcggttcgttttcgtttcggcgtttttttaaagcgatcgcgtcgttagcgtgcgtttcgagcgtttagcgcgtcgcgtattttttatattgttatagcgtttgttaaaaatagagcgtcgttgcgggcgcgttagtggggagttcgggtcgg

SEQ ID NO: 28324 - DNA, 588 bp, Artificial Sequence
  chemically treated genomic DNA (Homo sapiens) CpG-island No: 28324
ccgacccgaactccccactaacgcgcccgcaacgacgctctatttttaacaaacgctataacaatataaaaaatacgcgacgcgctaaacgctcgaaacgcacgctaacgacgcgatcgctttaaaaaaacgccgaaacgaaaacgaaccgaaataaccgactaacgaaaaaccgtcaatccgacgaccgcgaaacccgacgaacgcgacgctacctcctcaccgacgcaaactaaaaaaaaacgacctaaataccgtaaccgaaccgaaactaaaacgcgcgataaataatcgaacgaccttaaaaaaaaaaaaacccgaccgcgccgcctctcgccccgaccgtcgctttattccgaaacgaaaaatataaccgccctccgaactcgaccgcgctctccgcttacgaaatacgccctaaaaccgactatacgtaacgttttacccccatcgcgaactcccgcgtaacgatatacgttcgtaaaatcgaccacgaccaaaaccccaataaaaaaaacctacgcgccgctcaaaaaaaccctttcataataattacaattccttaactacctaaacgaaaacccgata

SEQ ID NO: 28325 - DNA, 1426 bp, Artificial Sequence
  chemically treated genomic DNA (Homo sapiens) CpG-island No: 28325
  unsure (595, 1385)
ggaaaaaatttttttggtgattattggcgatcgtagcgtaatcggtatggtagcgcgcgattagatggtggggtcgtggtaggtgtcggtcgttaattgcgcggttattatcgttagtttcgatagttattacggtgaagcgatggcgattggcgagcgtgcgtcggttgcgttgttggatttcgtcgtttttgttcgtttggcggtcggtgaagcgttaattaatatcgtcgtaatataaattggcgatattaaacgtattaaatttttcgttaattggatggcggcggtaggttattttggtgaagatgcgggtttgtatgaagtcgttaaagtcgtgggcgaagagttttgttcggcgttgggtttgacgatttcggtgggtaaagattttatgtcgatgaaaattcgttggtaggaaggtaacgaagagcgcgaaatgacgtcgtcgttgtcgttggtgatttttgtatttgttcgcgtggaagatgtacgttatattattacgtcgtagttttttatcgaagataacgtattgttgttgattgatttgggtaaaggtaataacgcgttgggcgtaacggcgtttgcgtangtttatcgttagtttggcgataaattcgtagatgtacgcgatgtcgcgtaattgaaaagttttttatgacgcgatttaggcgttggttgtatagcgtaagttgttggcgtattacgatcgttttgatggcggtttgttggtaacgttggcggaaatggtttttgttggttattgtggtattgacgcggatatcgttattttgggtgacgatcgtttggcggcgttgtttaacgaagaattgggtgcggtgatttaggttcgtgtcgttgatcgtgaagcggtcgagttcgtattggtatagtatgggtttgttgattgtgtttattatgtagggtaggcggttttcggtgatcgttttgtgattatcgttaacgggtagattgtatttagcgaaagtcgtattacgttgcgtgtttggtgggtagaaattatttggtagatgtagcgtttgcgtgataattcggagtgtgtcgattaggagtattaggcgaaatttaacgacgtcgattcgggtttgaatgtaaaattgtcgttcgatattaacgaagatgtggtagtatcgtatattgttattggcgtacgttcgaaagttgtcgtattgcgtgagtagggcgtgaattcgtatgttgaaatggcggtagttttttatcgtgtaggttttgatgttatcgacgtgtatatgagtgaattgttgatcggacgtacgggtttggaaaaattttacgttttggtcgcgtgtcggggtttttttttacgggatgtgttgggtgttcgtgaaagttgggcgaanttaattttgtttaatgattcgtgtacgttaataatttgtaa

SEQ ID NO: 28326 - DNA, 1426 bp, Artificial Sequence
  chemically treated genomic DNA (Homo sapiens) CpG-island No: 28326
  unsure (42, 832)
ttacaaattattaacgtacacgaatcattaaacaaaattaanttcgcccaactttcacgaacacccaacacatcccgtaaaaaaaaaccccgacacgcgaccaaaacgtaaaatttttccaaacccgtacgtccgatcaacaattcactcatatacacgtcgataacatcaaaacctacacgataaaaaactaccgccatttcaacatacgaattcacgccctactcacgcaatacgacaactttcgaacgtacgccaataacaatatacgatactaccacatcttcgttaatatcgaacgacaattttacattcaaacccgaatcgacgtcgttaaatttcgcctaatactcctaatcgacacactccgaattatcacgcaaacgctacatctaccaaataatttctacccaccaaacacgcaacgtaatacgactttcgctaaatacaatctacccgttaacgataatcacaaaacgatcaccgaaaaccgcctaccctacataataaacacaatcaacaaacccatactataccaatacgaactcgaccgcttcacgatcaacgacacgaacctaaatcaccgcacccaattcttcgttaaacaacgccgccaaacgatcgtcacccaaaataacgatatccgcgtcaataccacaataaccaacaaaaaccatttccgccaacgttaccaacaaaccgccatcaaaacgatcgtaatacgccaacaacttacgctatacaaccaacgcctaaatcgcgtcataaaaaacttttcaattacgcgacatcgcgtacatctacgaatttatcgccaaactaacgataaacntacgcaaacgccgttacgcccaacgcgttattacctttacccaaatcaatcaacaacaatacgttatcttcgataaaaaactacgacgtaataatataacgtacatcttccacgcgaacaaatacaaaaatcaccaacgacaacgacgacgtcatttcgcgctcttcgttaccttcctaccaacgaattttcatcgacataaaatctttacccaccgaaatcgtcaaacccaacgccgaacaaaactcttcgcccacgactttaacgacttcatacaaacccgcatcttcaccaaaataacctaccgccgccatccaattaacgaaaaatttaatacgtttaatatcgccaatttatattacgacgatattaattaacgcttcaccgaccgccaaacgaacaaaaacgacgaaatccaacaacgcaaccgacgcacgctcgccaatcgccatcgcttcaccgtaataactatcgaaactaacgataataaccgcgcaattaacgaccgacacctaccacgaccccaccatctaatcgcgcgctaccataccgattacgctacgatcgccaataatcaccaaaaaaattttttcc

SEQ ID NO: 28327 - DNA, 1426 bp, Artificial Sequence
  chemically treated genomic DNA (Homo sapiens) CpG-island No: 28327
  unsure (42, 832)
ttgtaaattattggcgtatacgggttattgaataggattganttcgtttaatttttacgggtatttagtatatttcgtaagaagaaatttcggtacgcgattagggcgtggaatttttttaggttcgtgcgttcggttagtagtttatttatatgtacgtcgatagtattaaagtttgtacggtggaaagttgtcgttattttaatatgcgagtttacgttttgtttacgtagtacggtaattttcggacgtgcgttagtggtaatatacggtgttgttatattttcgttgatatcgaacgatagttttatatttaggttcggatcggcgtcgttagatttcgtttgatgtttttgatcggtatatttcgggttgttacgtaggcgttgtatttgttaggtagtttttgtttattagatacgtaacgtggtgcggttttcgttgaatatagtttgttcgttggcggtaattataaaacggttatcggaaatcgtttgttttatataatggatataattagtaagtttatgttgtgttagtacggattcgatcgttttacggttagcggtacgaatttgaattatcgtatttagtttttcgttaaataacgtcgttaggcgatcgttatttagagtggcgatattcgcgttaatgttataatgattagtaaaggttattttcgttagcgttattagtaggtcgttattagagcggtcgtgatacgttagtagtttacgttgtgtaattagcgtttgaatcgcgttatagaaagttttttagttgcgcgatatcgcgtatatttgcgggtttgtcgttaagttgacgataaatntgcgtaagcgtcgttgcgtttagcgcgttattgtttttgtttaaattaattagtagtagtgcgttattttcggtagaaagttgcggcgtgatggtgtgacgtatattttttacgcgggtaaatgtagaaattattagcgatagcggcgacgttatttcgcgtttttcgttatttttttgttagcgggtttttatcgatatggagtttttatttatcgggatcgttaggtttagcgtcggataaagtttttcgtttacggttttaacggttttatataggttcgtatttttattagggtggtttgtcgtcgttatttagttggcggaaagtttgatgcgtttgatatcgttaatttgtgttgcggcgatgttggttaacgttttatcgatcgttagacgggtagaggcggcgaaatttagtagcgtaatcggcgtacgttcgttaatcgttatcgttttatcgtagtagttgtcgaggttggcggtagtgatcgcgtagttagcgatcggtatttgttacggttttattatttgatcgcgcgttattatgtcggttacgttgcggtcgttaatggttattaggaaggtttttttt

SEQ ID NO: 28328 - DNA, 1426 bp, Artificial Sequence
  chemically treated genomic DNA (Homo sapiens) CpG-island No: 28328
  unsure (595, 1385)
aaaaaaaaccttcctaataaccattaacgaccgcaacgtaaccgacataataacgcgcgatcaaataataaaaccgtaacaaataccgatcgctaactacgcgatcactaccgccaacctcgacaactactacgataaaacgataacgattaacgaacgtacgccgattacgctactaaatttcgccgcctctacccgtctaacgatcgataaaacgttaaccaacatcgccgcaacacaaattaacgatatcaaacgcatcaaactttccgccaactaaataacgacgacaaaccaccctaataaaaatacgaacctatataaaaccgttaaaaccgtaaacgaaaaactttatccgacgctaaacctaacgatcccgataaataaaaactccatatcgataaaaacccgctaacaaaaaaataacgaaaaacgcgaaataacgtcgccgctatcgctaataatttctacatttacccgcgtaaaaaatatacgtcacaccatcacgccgcaactttctaccgaaaataacgcactactactaattaatttaaacaaaaacaataacgcgctaaacgcaacgacgcttacgcanatttatcgtcaacttaacgacaaacccgcaaatatacgcgatatcgcgcaactaaaaaactttctataacgcgattcaaacgctaattacacaacgtaaactactaacgtatcacgaccgctctaataacgacctactaataacgctaacgaaaataacctttactaatcattataacattaacgcgaatatcgccactctaaataacgatcgcctaacgacgttatttaacgaaaaactaaatacgataattcaaattcgtaccgctaaccgtaaaacgatcgaatccgtactaacacaacataaacttactaattatatccattatataaaacaaacgatttccgataaccgttttataattaccgccaacgaacaaactatattcaacgaaaaccgcaccacgttacgtatctaataaacaaaaactacctaacaaatacaacgcctacgtaacaacccgaaatataccgatcaaaaacatcaaacgaaatctaacgacgccgatccgaacctaaatataaaactatcgttcgatatcaacgaaaatataacaacaccgtatattaccactaacgcacgtccgaaaattaccgtactacgtaaacaaaacgtaaactcgcatattaaaataacgacaactttccaccgtacaaactttaatactatcgacgtacatataaataaactactaaccgaacgcacgaacctaaaaaaattccacgccctaatcgcgtaccgaaatttcttcttacgaaatatactaaatacccgtaaaaattaaacgaantcaatcctattcaataacccgtatacgccaataatttacaa

SEQ ID NO: 28329 - DNA, 750 bp, Artificial Sequence
  chemically treated genomic DNA (Homo sapiens) CpG-island No: 28329
  unsure (105, 157, 278)
tcgtatcgtcgtgtttttcggtttaagtttttatattcgggcgaattggcgtgttttattagttcggtagtatgaattattattcgttagttattttattggagnacgacgaagatcgttgtcgaagcggcgtttttatcgtttttagtatgacgtnttgtattggtttattggtgaaattcgttcgtagtgatcgtttagtgtagggttttacgattatagtagtttagtcgcgaacgtgtacgtagttttttttcgtattatagtagaattcgaantcgttagagtattatcgttgatgttttttttacgtttattttgtttgtatgtgttcgttcgatgcggtatagtaggttttcgtttaagtaatagcgtattttggcgtatgattcggtaaatacgtttggtattgatcgtaggtatattattaagttttgtttgtttgcgaagtagcgtttatattcgacgataattatacgttggtagtttttcgataatatggtgtatacggagaagtatattcgtattattagtgtgacgattgcggcggttatttatttagttatcggttcgtttgagaatgacgtgtaattgcgtacgcgatattcggagataacggttgattaagtttattttttattttcgggtaataagggcgcgtgcgttatttatttttttgttcgtttatatttaacggtttttttgaggagtttattttttatcgtttttttgtcgagtaggcgttggagt

SEQ ID NO: 28330 - DNA, 750 bp, Artificial Sequence
  chemically treated genomic DNA (Homo sapiens) CpG-island No: 28330
  unsure (473, 594, 646)
actccaacgcctactcgacaaaaaaacgataaaaaataaactcctcaaaaaaaccgttaaatataaacgaacaaaaaaataaataacgcacgcgcccttattacccgaaaataaaaaataaacttaatcaaccgttatctccgaatatcgcgtacgcaattacacgtcattctcaaacgaaccgataactaaataaataaccgccgcaatcgtcacactaataatacgaatatacttctccgtatacaccatattatcgaaaaactaccaacgtataattatcgtcgaatataaacgctacttcgcaaacaaacaaaacttaataatatacctacgatcaataccaaacgtatttaccgaatcatacgccaaaatacgctattacttaaacgaaaacctactataccgcatcgaacgaacacatacaaacaaaataaacgtaaaaaaaacatcaacgataatactctaacganttcgaattctactataatacgaaaaaaaactacgtacacgttcgcgactaaactactataatcgtaaaaccctacactaaacgatcactacgaacgaatttcaccaataaaccaatacaanacgtcatactaaaaacgataaaaacgccgcttcgacaacgatcttcgtcgtnctccaataaaataactaacgaataataattcatactaccgaactaataaaacacgccaattcgcccgaatataaaaacttaaaccgaaaaacacgacgatacga

SEQ ID NO: 28331 - DNA, 750 bp, Artificial Sequence
  chemically treated genomic DNA (Homo sapiens) CpG-island No: 28331
  unsure (473, 594, 646)
attttagcgtttgttcggtaagaaaacgatggaaaatgaattttttaaagaagtcgttgaatatggacgggtaaaaaagtggatagcgtacgcgtttttattgttcggggatggggagtaagtttagttagtcgttgttttcgggtgtcgcgtgcgtagttgtacgttatttttagacgaatcgatgattggatggatggtcgtcgtagtcgttatattgatgatacggatgtgttttttcgtatatattatgttatcggagagttgttaacgtatggttatcgtcgggtatgggcgttgtttcgtagataggtagaatttgatggtatgtttgcgattaatgttaaacgtgtttatcggattatgcgttagaatgcgttgttgtttgagcgaaaatttgttgtatcgtatcgaacgggtatatataggtagagtgggcgtgaagaaagtattagcgatggtgttttgacggnttcgagttttgttgtgatacggagagagattgcgtgtacgttcgcggttggattgttgtgatcgtaaggttttgtattgggcggttattacgggcgggttttattagtgaattagtatagnacgttatgttgggagcggtgggaacgtcgtttcggtaacgattttcgtcgtnttttagtgaagtggttgacggataatggtttatgttatcgggttaatgaaatacgttagttcgttcggatgtggggatttgaatcgaagaatacggcggtgcgg

SEQ ID NO: 28332 - DNA, 750 bp, Artificial Sequence
  chemically treated genomic DNA (Homo sapiens) CpG-island No: 28332
  unsure (105, 157, 278)
ccgcaccgccgtattcttcgattcaaatccccacatccgaacgaactaacgtatttcattaacccgataacataaaccattatccgtcaaccacttcactaaaanacgacgaaaatcgttaccgaaacgacgttcccaccgctcccaacataacgtnctatactaattcactaataaaacccgcccgtaataaccgcccaatacaaaaccttacgatcacaacaatccaaccgcgaacgtacacgcaatctctctccgtatcacaacaaaactcgaanccgtcaaaacaccatcgctaatactttcttcacgcccactctacctatatatacccgttcgatacgatacaacaaattttcgctcaaacaacaacgcattctaacgcataatccgataaacacgtttaacattaatcgcaaacataccatcaaattctacctatctacgaaacaacgcccatacccgacgataaccatacgttaacaactctccgataacataatatatacgaaaaaacacatccgtatcatcaatataacgactacgacgaccatccatccaatcatcgattcgtctaaaaataacgtacaactacgcacgcgacacccgaaaacaacgactaactaaacttactccccatccccgaacaataaaaacgcgtacgctatccacttttttacccgtccatattcaacgacttctttaaaaaattcattttccatcgttttcttaccgaacaaacgctaaaat

SEQ ID NO: 28333 - DNA, 517 bp, Artificial Sequence
  chemically treated genomic DNA (Homo sapiens) CpG-island No: 28333
  unsure (61)
acgtagttttttacgtatttgcgtatttagcgcgttaaacggtttattaagtagtagaatntgcggttttatagttagcgcgcgcgttagcgttacgcgttgtttttggtcgtcggaaagttgcgtcggataacgattcgttagatgggtaagttggattatttttagtaattttgttattttcgttttgatggttgcggtattcgggcgttcgcgacgcggtagtatcgttaggttaaaagcgatattgtcgaatatcgttatatggcggaatagcgcgtaatgttggaatacgaaatcgattttacgattacgtgcgtgtaggcggtttacgtcggtgtcgtggaagcgaatatgttcgttggtttgatgttttagttcggcgataatgcgtagtagcgtggttttttcggaatcggacggttttagtaacgcgattatttgatttgaaggaatatttagtgagatatcgtttagtatttgggtgcgattaaacgattttttaatattggtaatt

SEQ ID NO: 28334 - DNA, 517 bp, Artificial Sequence
  chemically treated genomic DNA (Homo sapiens) CpG-island No: 28334
  unsure (457)
aattaccaatattaaaaaatcgtttaatcgcacccaaatactaaacgatatctcactaaatattccttcaaatcaaataatcgcgttactaaaaccgtccgattccgaaaaaaccacgctactacgcattatcgccgaactaaaacatcaaaccaacgaacatattcgcttccacgacaccgacgtaaaccgcctacacgcacgtaatcgtaaaatcgatttcgtattccaacattacgcgctattccgccatataacgatattcgacaatatcgcttttaacctaacgatactaccgcgtcgcgaacgcccgaataccgcaaccatcaaaacgaaaataacaaaattactaaaaataatccaacttacccatctaacgaatcgttatccgacgcaactttccgacgaccaaaaacaacgcgtaacgctaacgcgcgcgctaactataaaaccgcanattctactacttaataaaccgtttaacgcgctaaatacgcaaatacgtaaaaaactacgt

SEQ ID NO: 28335 - DNA, 517 bp, Artificial Sequence
  chemically treated genomic DNA (Homo sapiens) CpG-island No: 28335
  unsure (457)
gattgttaatattaagaagtcgtttggtcgtatttaggtgttgaacgatattttattggatatttttttaggttagatggtcgcgttgttggggtcgttcggtttcgggaaaattacgttgttgcgtattatcgtcgggttggagtattaaattagcgggtatattcgtttttacggtatcgacgtgagtcgtttgtacgtacgtgatcgtaaagtcggtttcgtgttttagtattacgcgttgtttcgttatatgacggtgttcgataatatcgtttttggtttgacggtgttgtcgcgtcgcgagcgttcgaatgtcgtagttattaaagcgaaagtgataaaattgttggaaatggtttagtttgtttatttggcggatcgttattcggcgtagtttttcggcggttagaaatagcgcgtggcgttggcgcgcgcgttggttgtggaatcgtanattttgttgtttgatgaatcgtttggcgcgttggatgcgtaggtgcgtaaagagttgcgt

SEQ ID NO: 28336 - DNA, 517 bp, Artificial Sequence
  chemically treated genomic DNA (Homo sapiens) CpG-island No: 28336
  unsure (61)
acgcaactctttacgcacctacgcatccaacgcgccaaacgattcatcaaacaacaaaatntacgattccacaaccaacgcgcgcgccaacgccacgcgctatttctaaccgccgaaaaactacgccgaataacgatccgccaaataaacaaactaaaccatttccaacaattttatcactttcgctttaataactacgacattcgaacgctcgcgacgcgacaacaccgtcaaaccaaaaacgatattatcgaacaccgtcatataacgaaacaacgcgtaatactaaaacacgaaaccgactttacgatcacgtacgtacaaacgactcacgtcgataccgtaaaaacgaatatacccgctaatttaatactccaacccgacgataatacgcaacaacgtaattttcccgaaaccgaacgaccccaacaacgcgaccatctaacctaaaaaaatatccaataaaatatcgttcaacacctaaatacgaccaaacgacttcttaatattaacaatc

SEQ ID NO: 28337 - DNA, 688 bp, Artificial Sequence
  chemically treated genomic DNA (Homo sapiens) CpG-island No: 28337
taggcgcggttggtggcgtaattagacgttagcgttttgattaacggttagagcggtatcgggaaagagattttcgtttaggttatttataacgttagttcgcgtaatagtaaattatttattgttattaattgtggcgtattgttcgagtaattgttggagtcggagttgtttggttatgcgcgtggcgcgtttattggcgttgttagtaatcgcgaaggtttattttaggcggcggaaggcggaacgttatttttcgatgaaattggcgatatgtttgcgtcgttataggttaaattgttgcgcgtgttgtaggagcgtaaagtgcgttcgttgggtagtaatcgcgatattgatattaatgtgcggattatttttgttatttatcgtgatttgttaaaagcgatggcgcgcggggaatttcgcgaagatttttattatcgttttaacgttgttagtttgaaaatttcggtattggcggagcgtatagaagatatttcgttattggtaaattatttgttgcgttaggcggtagagcgatataaatcgtttgttcgcgcgttttttatcgatgcgatgaaacgtttgatgatcgcgagttggtcgggtaatgtgcgttagttggttaacgtgattgaatagtgcgtggcgttgattttatttttagtgagtagtgatacgttggtgg

SEQ ID NO: 28338 - DNA, 688 bp, Artificial Sequence
  chemically treated genomic DNA (Homo sapiens) CpG-island No: 28338
ccaccaacgtatcactactcactaaaaataaaatcaacgccacgcactattcaatcacgttaaccaactaacgcacattacccgaccaactcgcgatcatcaaacgtttcatcgcatcgataaaaaacgcgcgaacaaacgatttatatcgctctaccgcctaacgcaacaaataatttaccaataacgaaatatcttctatacgctccgccaataccgaaattttcaaactaacaacgttaaaacgataataaaaatcttcgcgaaattccccgcgcgccatcgcttttaacaaatcacgataaataacaaaaataatccgcacattaatatcaatatcgcgattactacccaacgaacgcactttacgctcctacaacacgcgcaacaatttaacctataacgacgcaaacatatcgccaatttcatcgaaaaataacgttccgccttccgccgcctaaaataaaccttcgcgattactaacaacgccaataaacgcgccacgcgcataaccaaacaactccgactccaacaattactcgaacaatacgccacaattaataacaataaataatttactattacgcgaactaacgttataaataacctaaacgaaaatctctttcccgataccgctctaaccgttaatcaaaacgctaacgtctaattacgccaccaaccgcgccta

SEQ ID NO: 28339 - DNA, 688 bp, Artificial Sequence
  chemically treated genomic DNA (Homo sapiens) CpG-island No: 28339
ttattagcgtattattatttattggagatgaggttagcgttacgtattgtttaattacgttgattaattggcgtatattattcggttagttcgcggttattaggcgttttatcgtatcggtagagaacgcgcggataaacggtttatgtcgttttgtcgtttggcgtaataggtgatttgttagtagcggaatgttttttgtgcgtttcgttagtgtcggaatttttaggttgataacgttgaggcggtaatagagattttcgcggaatttttcgcgcgttatcgtttttggtagattacggtgagtggtagaaataattcgtatattgatattaatatcgcggttattgtttagcgggcgtattttacgtttttgtaatacgcgtagtagtttgatttgtaacggcgtaggtatatcgttaattttatcgagaaatagcgtttcgtttttcgtcgtttggaataaattttcgcgattgttgatagcgttagtaaacgcgttacgcgtatgattaaatagtttcgattttagtaattgttcgggtaatgcgttatagttaatagtaataaatggtttgttgttgcgcgggttggcgttgtggatagtttgggcgaaaatttttttttcggtgtcgttttgatcgttaattaaaacgttgacgtttgattgcgttattagtcgcgtttg

SEQ ID NO: 28340 - DNA, 688 bp, Artificial Sequence
  chemically treated genomic DNA (Homo sapiens) CpG-island No: 28340
caaacgcgactaataacgcaatcaaacgtcaacgttttaattaacgatcaaaacgacaccgaaaaaaaaattttcgcccaaactatccacaacgccaacccgcgcaacaacaaaccatttattactattaactataacgcattacccgaacaattactaaaatcgaaactatttaatcatacgcgtaacgcgtttactaacgctatcaacaatcgcgaaaatttattccaaacgacgaaaaacgaaacgctatttctcgataaaattaacgatatacctacgccgttacaaatcaaactactacgcgtattacaaaaacgtaaaatacgcccgctaaacaataaccgcgatattaatatcaatatacgaattatttctaccactcaccgtaatctaccaaaaacgataacgcgcgaaaaattccgcgaaaatctctattaccgcctcaacgttatcaacctaaaaattccgacactaacgaaacgcacaaaaaacattccgctactaacaaatcacctattacgccaaacgacaaaacgacataaaccgtttatccgcgcgttctctaccgatacgataaaacgcctaataaccgcgaactaaccgaataatatacgccaattaatcaacgtaattaaacaatacgtaacgctaacctcatctccaataaataataatacgctaataa

SEQ ID NO: 28341 - DNA, 626 bp, Artificial Sequence
  chemically treated genomic DNA (Homo sapiens) CpG-island No: 28341
  unsure (605, 611, 615, 625)
gtatcgttttacggtgtagtttgtttcgcgtatattcgattagcggcgtttcgtttagttttattttcgttaggtaatcgttgttatacgttagttattttatcggcggtaggttgttcggcgtgacgcggtttgttagtttttgttcgttgtatgcgtgtttcgttttatgttgttatagtagttttttcgttttcgggttttttatcgtttggtattcgtcggttaggcggtttttatcgttatagttatagtggacggtaatacggtggttttcgttgatatggttgatgtttgttagttagtcgtggttattatattgttatcgttttgcggttttattttttacggtgcggtgcgtgaggcggtttgtttcgttatagtgttagtgggtgattagatttttattttcgttgcggataagtttgtcggttaggtcgtggtgataacgttgtgtgcggtcgttaaagtcggttttttgtattagtcggttaagtatatcgtaacggaaggtggtgtggttgtcgtttttattggttaggttgatgattcgttcggtagtatcgtattgttataatgagggttagttcgtttgtgtggtcggnttgaantcgnaatttatttnt

SEQ ID NO: 28342 - DNA, 626 bp, Artificial Sequence
  chemically treated genomic DNA (Homo sapiens) CpG-island No: 28342
  unsure (2, 12, 16, 22)
anaaataaattncganttcaanccgaccacacaaacgaactaaccctcattataacaatacgatactaccgaacgaatcatcaacctaaccaataaaaacgacaaccacaccaccttccgttacgatatacttaaccgactaatacaaaaaaccgactttaacgaccgcacacaacgttatcaccacgacctaaccgacaaacttatccgcaacgaaaataaaaatctaatcacccactaacactataacgaaacaaaccgcctcacgcaccgcaccgtaaaaaataaaaccgcaaaacgataacaatataataaccacgactaactaacaaacatcaaccatatcaacgaaaaccaccgtattaccgtccactataactataacgataaaaaccgcctaaccgacgaataccaaacgataaaaaacccgaaaacgaaaaaactactataacaacataaaacgaaacacgcatacaacgaacaaaaactaacaaaccgcgtcacgccgaacaacctaccgccgataaaataactaacgtataacaacgattacctaacgaaaataaaactaaacgaaacgccgctaatcgaatatacgcgaaacaaactacaccgtaaaacgatac

SEQ ID NO: 28343 - DNA, 626 bp, Artificial Sequence
  chemically treated genomic DNA (Homo sapiens) CpG-island No: 28343
  unsure (2, 12, 16, 22)
gnaaatgaattncgantttaantcggttatataggcgggttgatttttattatggtaatacgatgttgtcggacgggttattagtttgattagtgaaaacggtagttatattatttttcgttacgatgtatttgatcggttgatataggaaatcggttttgacggtcgtatatagcgttattattacgatttgatcggtaaatttattcgtagcgaggatgagggtttggttatttattggtattatgacgaagtagatcgttttacgtatcgtatcgtgaagggtgaaatcgtagagcggtggtagtatgatggttacggttggttgatagatattagttatattagcgaaggttatcgtgttgtcgtttattatggttatgacgataaaggtcgtttgatcggcgaatgttagacggtggagaattcggagacgggggaattgttgtggtagtatgagacgaaatacgtatataacgagtaggggttggtaaatcgcgttacgtcggatagtttgtcgtcggtggagtggttgacgtatggtagcggttatttggcgggaatgaagttgggcgggacgtcgttggtcgagtatacgcgggataggttgtatcgtgagacggtgt

SEQ ID NO: 28344 - DNA, 626 bp, Artificial Sequence
  chemically treated genomic DNA (Homo sapiens) CpG-island No: 28344
  unsure (605, 611, 615, 625)
acaccgtctcacgatacaacctatcccgcgtatactcgaccaacgacgtcccgcccaacttcattcccgccaaataaccgctaccatacgtcaaccactccaccgacgacaaactatccgacgtaacgcgatttaccaacccctactcgttatatacgtatttcgtctcatactaccacaacaattcccccgtctccgaattctccaccgtctaacattcgccgatcaaacgacctttatcgtcataaccataataaacgacaacacgataaccttcgctaatataactaatatctatcaaccaaccgtaaccatcatactaccaccgctctacgatttcacccttcacgatacgatacgtaaaacgatctacttcgtcataataccaataaataaccaaaccctcatcctcgctacgaataaatttaccgatcaaatcgtaataataacgctatatacgaccgtcaaaaccgatttcctatatcaaccgatcaaatacatcgtaacgaaaaataatataactaccgttttcactaatcaaactaataacccgtccgacaacatcgtattaccataataaaaatcaacccgcctatataaccganttaaantcgnaattcatttnc

SEQ ID NO: 28345 - DNA, 538 bp, Artificial Sequence
  chemically treated genomic DNA (Homo sapiens) CpG-island No: 28345
  unsure (401, 405)
ggtcggataaggcgtttacgtcgtattcggtaacggtgtcgattgtttgatgcgacgtttgcgcgttttattaggtttataaattttcgtatttttcgtaggtcggataaggcgtttacgtttttttcggtaatagtgttaattgtttgatgcgacgtttgcgcgttttattaggtttataaattttcgtattattcgtaggtcggataaggcgtttacgtcgtattcggtaacggtgtcgattgtttgatgcgacgtttgcgcgttttattaggtttataaattttcgtatttttcgtaggtcggataaggcgtttacgtcgtattcggtaatggtgtcgattgtttgatgcgacgtttgcgcgttttattaggtttataatttttcgtatttttcgtangttnggataaggcgttacgttcgtattcgggaatagtgtcgattgtttgatgcgacgttcgcgcgttttattaggtcgttttttatttggataaatttcgaattatatttaattggtttttttttatttgaggtaat

SEQ ID NO: 28346 - DNA, 538 bp, Artificial Sequence
  chemically treated genomic DNA (Homo sapiens) CpG-island No: 28346
  unsure (134, 138)
attacctcaaataaaaaaaaaccaattaaatataattcgaaatttatccaaataaaaaacgacctaataaaacgcgcgaacgtcgcatcaaacaatcgacactattcccgaatacgaacgtaacgccttatccnaacntacgaaaaatacgaaaaattataaacctaataaaacgcgcaaacgtcgcatcaaacaatcgacaccattaccgaatacgacgtaaacgccttatccgacctacgaaaaatacgaaaatttataaacctaataaaacgcgcaaacgtcgcatcaaacaatcgacaccgttaccgaatacgacgtaaacgccttatccgacctacgaataatacgaaaatttataaacctaataaaacgcgcaaacgtcgcatcaaacaattaacactattaccgaaaaaaacgtaaacgccttatccgacctacgaaaaatacgaaaatttataaacctaataaaacgcgcaaacgtcgcatcaaacaatcgacaccgttaccgaatacgacgtaaacgccttatccgacc

SEQ ID NO: 28347 - DNA, 538 bp, Artificial Sequence
  chemically treated genomic DNA (Homo sapiens) CpG-island No: 28347
  unsure (134, 138)
gttgttttaagtaaagagaagttagttaagtgtagttcgaaatttatttagatgagaggcggtttgataagacgcgcgagcgtcgtattaggtagtcggtattgttttcggatgcgggcgtaacgttttatttnggtntacggagggtgcggggaattgtaggtttgataagacgcgtaagcgtcgtattaggtagtcggtattattgtcggatgcggcgtaaacgttttattcggtttacggagggtgcgggaatttgtaggtttgataagacgcgtaagcgtcgtattaggtagtcggtatcgttgtcggatgcggcgtaaacgttttattcggtttacggatggtgcgggaatttgtaggtttgataagacgcgtaagcgtcgtattaggtagttggtattgttgtcggaaaaggcgtaaacgttttattcggtttacggagggtgcgggaatttgtaggtttgataagacgcgtaagcgtcgtattaggtagtcggtatcgttgtcggatgcggcgtaaacgttttattcggtt

SEQ ID NO: 28348 - DNA, 538 bp, Artificial Sequence
  chemically treated genomic DNA (Homo sapiens) CpG-island No: 28348
  unsure (401, 405)
aaccgaataaaacgtttacgccgcatccgacaacgataccgactacctaatacgacgcttacgcgtcttatcaaacctacaaattcccgcaccctccgtaaaccgaataaaacgtttacgccttttccgacaacaataccaactacctaatacgacgcttacgcgtcttatcaaacctacaaattcccgcaccatccgtaaaccgaataaaacgtttacgccgcatccgacaacgataccgactacctaatacgacgcttacgcgtcttatcaaacctacaaattcccgcaccctccgtaaaccgaataaaacgtttacgccgcatccgacaataataccgactacctaatacgacgcttacgcgtcttatcaaacctacaattccccgcaccctccgtanaccnaaataaaacgttacgcccgcatccgaaaacaataccgactacctaatacgacgctcgcgcgtcttatcaaaccgcctctcatctaaataaatttcgaactacacttaactaacttctctttacttaaaacaac

SEQ ID NO: 28349 - DNA, 900 bp, Artificial Sequence
  chemically treated genomic DNA (Homo sapiens) CpG-island No: 28349
tttaatcgtagcgggcgttacgaggtcgtttttttttttttttcgttttgcggtagagagcgtaattttttgcgttgcgaggatcggtcggtggtttttacgtatttgttgatcgcggattacgggttttcgcgttttttttattgcggcggtggcgaggttttggtcgtgtttttcgagtcggcgcgtttgttgtttttggtcgttaacgggcgtttgtattattcggcgtcggagcgtgcgggcggcgtgggtttggtgcgtttcgttttggttttcgagtttagcgtttgtttcgagtacgggttcggcgcgtttgcgttgttttcgtacgtgcgttggtagggtcgtcgtttcgtttttattatggatttggtttcgttgttgttcgcggttcggtcgttttgagcggggttaagggaaaggcgggaggtcgcgggcgtttttcgtttcgttttttcgggattttacgtttcggaaagttcgcgttattcgcgttcgcggtagtttagtgcgtttgcgcgttcggtttcgtttttattcggcgttgtttttggtgttgtcgcggttcggttttttcggatatttcgttttttacggcgcgcgtttttcgcgtattcgatttcggcgtttttcggattggtttgcgttcgagacgttaggtataggcggcgggcgcggggttttggtgcgcgtgcgcgagcgtttttcgtttttttttagttcggcgattgttcgggttcggtcgttatttgtacggcgggggagtcgttcgtcgcgggagcgttaggtgaggggacgttcgatttaaggttattaggcgtgggggcgttgggggatcggggattatttcggttttgattttggtgcgtttcgagaagggcgtgggttttggagggg

SEQ ID NO: 28350 - DNA, 900 bp, Artificial Sequence
  chemically treated genomic DNA (Homo sapiens) CpG-island No: 28350
cccctccaaaacccacgcccttctcgaaacgcaccaaaatcaaaaccgaaataatccccgatcccccaacgcccccacgcctaataaccttaaatcgaacgtcccctcacctaacgctcccgcgacgaacgactcccccgccgtacaaataacgaccgaacccgaacaatcgccgaactaaaaaaaaacgaaaaacgctcgcgcacgcgcaccaaaaccccgcgcccgccgcctatacctaacgtctcgaacgcaaaccaatccgaaaaacgccgaaatcgaatacgcgaaaaacgcgcgccgtaaaaaacgaaatatccgaaaaaaccgaaccgcgacaacaccaaaaacaacgccgaataaaaacgaaaccgaacgcgcaaacgcactaaactaccgcgaacgcgaataacgcgaactttccgaaacgtaaaatcccgaaaaaacgaaacgaaaaacgcccgcgacctcccgcctttcccttaaccccgctcaaaacgaccgaaccgcgaacaacaacgaaaccaaatccataataaaaacgaaacgacgaccctaccaacgcacgtacgaaaacaacgcaaacgcgccgaacccgtactcgaaacaaacgctaaactcgaaaaccaaaacgaaacgcaccaaacccacgccgcccgcacgctccgacgccgaataatacaaacgcccgttaacgaccaaaaacaacaaacgcgccgactcgaaaaacacgaccaaaacctcgccaccgccgcaataaaaaaaacgcgaaaacccgtaatccgcgatcaacaaatacgtaaaaaccaccgaccgatcctcgcaacgcaaaaaattacgctctctaccgcaaaacgaaaaaaaaaaaaaaacgacctcgtaacgcccgctacgattaaa

SEQ ID NO: 28351 - DNA, 900 bp, Artificial Sequence
  chemically treated genomic DNA (Homo sapiens) CpG-island No: 28351
tttttttaggatttacgtttttttcggagcgtattagggttagagtcgggatggttttcgattttttagcgtttttacgtttggtgattttgggtcgggcgtttttttatttgacgttttcgcggcgagcggttttttcgtcgtgtaggtggcggtcgggttcgagtagtcgtcgggttgggagggggcgggggacgttcgcgtacgcgtattagagtttcgcgttcgtcgtttgtgtttgacgtttcgagcgtaggttaattcggagggcgtcggagtcgggtgcgcggggggcgcgcgtcgtggggagcggggtgttcgggagggtcgggtcgcggtagtattaaggatagcgtcgggtgggggcggggtcgagcgcgtaggcgtattaggttgtcgcgagcgcgggtggcgcgggtttttcggggcgtggagtttcgggggagcggggcgagaggcgttcgcggtttttcgttttttttttggtttcgtttagggcgatcgagtcgcgagtagtagcggggttaggtttatggtgagggcgaggcggcggttttgttagcgtacgtgcgagggtagcgtaggcgcgtcgggttcgtattcgaagtaggcgttgagttcgaaggttagggcggagcgtattaggtttacgtcgttcgtacgtttcggcgtcgggtggtataggcgttcgttggcggttaggggtagtaggcgcgtcggttcgaagggtacggttagggtttcgttatcgtcgtagtaggagaggcgcggaggttcgtggttcgcggttagtaggtgcgtgaagattatcggtcggttttcgtagcgtaggaagttgcgttttttgtcgtagggcgagaggaaggggaaagcggtttcgtagcgttcgttgcggttggg

SEQ ID NO: 28352 - DNA, 900 bp, Artificial Sequence
  chemically treated genomic DNA (Homo sapiens) CpG-island No: 28352
cccaaccgcaacgaacgctacgaaaccgctttccccttcctctcgccctacgacaaaaaacgcaacttcctacgctacgaaaaccgaccgataatcttcacgcacctactaaccgcgaaccacgaacctccgcgcctctcctactacgacgataacgaaaccctaaccgtacccttcgaaccgacgcgcctactacccctaaccgccaacgaacgcctataccacccgacgccgaaacgtacgaacgacgtaaacctaatacgctccgccctaaccttcgaactcaacgcctacttcgaatacgaacccgacgcgcctacgctaccctcgcacgtacgctaacaaaaccgccgcctcgccctcaccataaacctaaccccgctactactcgcgactcgatcgccctaaacgaaaccaaaaaaaaaacgaaaaaccgcgaacgcctctcgccccgctcccccgaaactccacgccccgaaaaacccgcgccacccgcgctcgcgacaacctaatacgcctacgcgctcgaccccgcccccacccgacgctatccttaatactaccgcgacccgaccctcccgaacaccccgctccccacgacgcgcgccccccgcgcacccgactccgacgccctccgaattaacctacgctcgaaacgtcaaacacaaacgacgaacgcgaaactctaatacgcgtacgcgaacgtcccccgccccctcccaacccgacgactactcgaacccgaccgccacctacacgacgaaaaaaccgctcgccgcgaaaacgtcaaataaaaaaacgcccgacccaaaatcaccaaacgtaaaaacgctaaaaaatcgaaaaccatcccgactctaaccctaatacgctccgaaaaaaacgtaaatcctaaaaaaa

SEQ ID NO: 28353 - DNA, 798 bp, Artificial Sequence
  chemically treated genomic DNA (Homo sapiens) CpG-island No: 28353
ggatattcggtattcgatacgggtagcggtatgtttttttttagtaatattacgttggcgtacgtcggtaagtacgagtgcgaggtttttaacgtcggcggcgttgttcgcgtgttttttcggtttttggttaacgcgtttcggtagtagtcgtagtagttcgcgtaatcgtcgttttcggtcgttcgtttcgtcggtagcgagtttcggttcgaggcgggtagtatggtttttcgcgttttgggcgtggttatatagacggttattgcggcggttatcgcgttgttggcgtttacggcgttgtttttggtcgttatgatttgtcgtcggcgtcgtaggcgaaaaaaggcgcgggggttttcgggggagggagcgttgttcgttaacgattatttggacggtttttgtacgttcgtatagttagaggagtttcgcgacgagcgcggttacgagatgttcgttattaatcgttttaagtcgtttttcgtcgagggttcggcggaggcgttcgttgattgcggttcggaatagggggcggggtcgggatttcgcgtgttttcgtcggtcgtttacgagatttattgttagggtcgcgggcgcgcggatgacgtgggcgtcggagattggtcggtgcggtttcgcgtatgtttcgttagtaaaggtggaagtcgcgtagtgtgcgttgagtcgtgtgtggggcgcgagtcgggaacgttgtattcgggaattttggggtagtaatggaaggtggtcggggaggttttaatattttttttgaagttttttcgaaaagatatt

SEQ ID NO: 28354 - DNA, 798 bp, Artificial Sequence
  chemically treated genomic DNA (Homo sapiens) CpG-island No: 28354
aatatcttttcgaaaaaacttcaaaaaaaatattaaaacctccccgaccaccttccattactaccccaaaattcccgaatacaacgttcccgactcgcgccccacacacgactcaacgcacactacgcgacttccacctttactaacgaaacatacgcgaaaccgcaccgaccaatctccgacgcccacgtcatccgcgcgcccgcgaccctaacaataaatctcgtaaacgaccgacgaaaacacgcgaaatcccgaccccgccccctattccgaaccgcaatcaacgaacgcctccgccgaaccctcgacgaaaaacgacttaaaacgattaataacgaacatctcgtaaccgcgctcgtcgcgaaactcctctaactatacgaacgtacaaaaaccgtccaaataatcgttaacgaacaacgctccctcccccgaaaacccccgcgccttttttcgcctacgacgccgacgacaaatcataacgaccaaaaacaacgccgtaaacgccaacaacgcgataaccgccgcaataaccgtctatataaccacgcccaaaacgcgaaaaaccatactacccgcctcgaaccgaaactcgctaccgacgaaacgaacgaccgaaaacgacgattacgcgaactactacgactactaccgaaacgcgttaaccaaaaaccgaaaaaacacgcgaacaacgccgccgacgttaaaaacctcgcactcgtacttaccgacgtacgccaacgtaatattactaaaaaaaaacataccgctacccgtatcgaataccgaatatcc

SEQ ID NO: 28355 - DNA, 798 bp, Artificial Sequence
  chemically treated genomic DNA (Homo sapiens) CpG-island No: 28355
gatgttttttcggaagagttttaagggaggtgttggggttttttcggttattttttattgttattttaggattttcgagtgtaacgttttcggttcgcgttttatatacggtttagcgtatattgcgcggtttttatttttattgacggagtatgcgcgaggtcgtatcggttaattttcggcgtttacgttattcgcgcgttcgcggttttagtagtggatttcgtaggcgatcggcgggggtacgcggagtttcggtttcgttttttgtttcgggtcgtagttagcgggcgttttcgtcggattttcggcgaagagcggtttggagcggttgatgacgaatatttcgtggtcgcgttcgtcgcggagtttttttagttgtgcgaacgtataggggtcgtttaagtagtcgttgacgaatagcgttttttttttcggaggttttcgcgttttttttcgtttgcggcgtcggcgatagattatggcgattaggagtagcgtcgtgagcgttagtagcgcgatggtcgtcgtaatggtcgtttgtgtggttacgtttagggcgcggaaggttatgttgttcgtttcgggtcggggttcgttgtcggcggggcgggcggtcggaggcggcggttgcgcgggttgttgcggttgttgtcgggacgcgttgattaggagtcggaagggtacgcgggtagcgtcgtcggcgttggaggtttcgtattcgtatttatcggcgtgcgttagcgtgatgttgttgaggaagagtatgtcgttgttcgtgtcggatgtcgagtgttt

SEQ ID NO: 28356 - DNA, 798 bp, Artificial Sequence
  chemically treated genomic DNA (Homo sapiens) CpG-island No: 28356
aaacactcgacatccgacacgaacaacgacatactcttcctcaacaacatcacgctaacgcacgccgataaatacgaatacgaaacctccaacgccgacgacgctacccgcgtacccttccgactcctaatcaacgcgtcccgacaacaaccgcaacaacccgcgcaaccgccgcctccgaccgcccgccccgccgacaacgaaccccgacccgaaacgaacaacataaccttccgcgccctaaacgtaaccacacaaacgaccattacgacgaccatcgcgctactaacgctcacgacgctactcctaatcgccataatctatcgccgacgccgcaaacgaaaaaaaacgcgaaaacctccgaaaaaaaaaacgctattcgtcaacgactacttaaacgacccctatacgttcgcacaactaaaaaaactccgcgacgaacgcgaccacgaaatattcgtcatcaaccgctccaaaccgctcttcgccgaaaatccgacgaaaacgcccgctaactacgacccgaaacaaaaaacgaaaccgaaactccgcgtacccccgccgatcgcctacgaaatccactactaaaaccgcgaacgcgcgaataacgtaaacgccgaaaattaaccgatacgacctcgcgcatactccgtcaataaaaataaaaaccgcgcaatatacgctaaaccgtatataaaacgcgaaccgaaaacgttacactcgaaaatcctaaaataacaataaaaaataaccgaaaaaaccccaacacctcccttaaaactcttccgaaaaaacatc

SEQ ID NO: 28357 - DNA, 773 bp, Artificial Sequence
  chemically treated genomic DNA (Homo sapiens) CpG-island No: 28357
  unsure (194)
cgtgcgtcgtttcgtttagatattttttcggtcgttcgcgtttatcggtttcgtaatcgtagttatcgtttttagtttcgtttagatcgttcgtcgtttttcgttcggcgtcgcggcgtttcgcgatgacgttgacgttttttattggttgtttgttcgaggttcgacggattggttgtttaggggcggtggtntcgttttcggttcgtcgcgtattcgtattggttgtcggttttcgcgacggttgcgcgggagattcgttggacgatcgtaagcgcggaggtcgggcgggcgcgcgcgttatggagcggttgcgggacgtgcgggagcggttgtaggcgtgggagcgcgcgtttcgacggtagcgcgggcggcgatcgagttaggtgcgggttgtttaggggtcgaggggttgagggcgcggttcgcggttgacgcgtttttaaataggacgacgtggaggcggcgtcggaggagattcgcggtgagcgcgcggcggggcggcgggggcgagaagatatcgggtcggtaggggtttaggttttattttgatttcgtttttcgttcgtttacgtagcgttttatcgggagtatcgtattttgaagcgtattacgggttaggtcggcggcgggtttcgtagtttcgagtcgtttttcgcggcggtcgaagaggtatttaggtttcgtcgttttagtttttttttatttttttgtttggcggagtggcgggagttacggagtcgcggttaggttttcgtggggtatagaatttg

SEQ ID NO: 28358 - DNA, 773 bp, Artificial Sequence
  chemically treated genomic DNA (Homo sapiens) CpG-island No: 28358
  unsure (580)
caaattctataccccacgaaaacctaaccgcgactccgtaactcccgccactccgccaaacaaaaaaataaaaaaaaactaaaacgacgaaacctaaatacctcttcgaccgccgcgaaaaacgactcgaaactacgaaacccgccgccgacctaacccgtaatacgcttcaaaatacgatactcccgataaaacgctacgtaaacgaacgaaaaacgaaatcaaaataaaacctaaacccctaccgacccgatatcttctcgcccccgccgccccgccgcgcgctcaccgcgaatctcctccgacgccgcctccacgtcgtcctatttaaaaacgcgtcaaccgcgaaccgcgccctcaacccctcgacccctaaacaacccgcacctaactcgatcgccgcccgcgctaccgtcgaaacgcgcgctcccacgcctacaaccgctcccgcacgtcccgcaaccgctccataacgcgcgcgcccgcccgacctccgcgcttacgatcgtccaacgaatctcccgcgcaaccgtcgcgaaaaccgacaaccaatacgaatacgcgacgaaccgaaaacganaccaccgcccctaaacaaccaatccgtcgaacctcgaacaaacaaccaataaaaaacgtcaacgtcatcgcgaaacgccgcgacgccgaacgaaaaacgacgaacgatctaaacgaaactaaaaacgataactacgattacgaaaccgataaacgcgaacgaccgaaaaaatatctaaacgaaacgacgcacg

SEQ ID NO: 28359 - DNA, 773 bp, Artificial Sequence
  chemically treated genomic DNA (Homo sapiens) CpG-island No: 28359
  unsure (580)
taagttttgtgttttacggaggtttggtcgcgatttcgtggttttcgttatttcgttaaatagggaagtgggaggaggttggggcggcggggtttgggtattttttcggtcgtcgcggggagcgattcggagttgcggagttcgtcgtcggtttggttcgtggtacgttttagagtgcggtattttcggtagagcgttgcgtgggcgagcgggaggcggggttagggtggggtttgggtttttgtcgattcggtgttttttcgttttcgtcgtttcgtcgcgcgtttatcgcgggtttttttcggcgtcgtttttacgtcgttttgtttgggaacgcgttagtcgcgggtcgcgtttttagtttttcggtttttgggtagttcgtatttggttcggtcgtcgttcgcgttgtcgtcggaacgcgcgtttttacgtttgtagtcgttttcgtacgtttcgtagtcgttttatggcgcgcgcgttcgttcggttttcgcgtttgcgatcgtttagcgaatttttcgcgtagtcgtcgcgggggtcgatagttaatgcggatgcgcggcgggtcgggggcggngttatcgtttttgggtagttagttcgtcgggtttcggataagtagttaatgggaggcgttaacgttatcgcggggcgtcgcggcgtcgggcggggagcggcggacggtttaggcggggttggaggcggtggttgcggttgcgggatcggtgagcgcgggcggtcgggggggtgtttgagcggggcggcgtacg

SEQ ID NO: 28360 - DNA, 773 bp, Artificial Sequence
  chemically treated genomic DNA (Homo sapiens) CpG-island No: 28360
  unsure (194)
cgtacgccgccccgctcaaacacccccccgaccgcccgcgctcaccgatcccgcaaccgcaaccaccgcctccaaccccgcctaaaccgtccgccgctccccgcccgacgccgcgacgccccgcgataacgttaacgcctcccattaactacttatccgaaacccgacgaactaactacccaaaaacgataacnccgcccccgacccgccgcgcatccgcattaactatcgacccccgcgacgactacgcgaaaaattcgctaaacgatcgcaaacgcgaaaaccgaacgaacgcgcgcgccataaaacgactacgaaacgtacgaaaacgactacaaacgtaaaaacgcgcgttccgacgacaacgcgaacgacgaccgaaccaaatacgaactacccaaaaaccgaaaaactaaaaacgcgacccgcgactaacgcgttcccaaacaaaacgacgtaaaaacgacgccgaaaaaaacccgcgataaacgcgcgacgaaacgacgaaaacgaaaaaacaccgaatcgacaaaaacccaaaccccaccctaaccccgcctcccgctcgcccacgcaacgctctaccgaaaataccgcactctaaaacgtaccacgaaccaaaccgacgacgaactccgcaactccgaatcgctccccgcgacgaccgaaaaaatacccaaaccccgccgccccaacctcctcccacttccctatttaacgaaataacgaaaaccacgaaatcgcgaccaaacctccgtaaaacacaaaactta

SEQ ID NO: 28361 - DNA, 586 bp, Artificial Sequence
  chemically treated genomic DNA (Homo sapiens) CpG-island No: 28361
gttttcgaggaatttacggcgaagttcgcgttttaggtttatgttcggatcgtcgcgggattcggatttttcgcgttgcgtcgcggtttcgtttttcgtcgtcgatacgtaggtttcgtttttcgtcgtcgatacgtaggtttcgtttttcgacggcggcggcgggcgcggggtatttcgggaagtacggtcggttcgttcgcggtattttcggagttttcgtgcgggaggagttggggcggggtggcggcgataattggggcgttttattttaggggtcgttttttcggacgtcgggttggttcgcgcgtggagttttttgttcggttcggggagtgtttggtggggatttcgttttttttcgtaggcggcggggacgcgggaggtcgggggttcggagttagttcgttcggggtcgtagcgcgttttgggtggggttttttgggttgtagttttcgtgtcgttcgcgttatttatggtggacgagttgtgtcgtcgttttaatttttttcgaaatttatatatatagtttgtttataggcgtaattattaaaaacgaacgtagtgtttagatagattgacgata

SEQ ID NO: 28362 - DNA, 586 bp, Artificial Sequence
  chemically treated genomic DNA (Homo sapiens) CpG-island No: 28362
tatcgtcaatctatctaaacactacgttcgtttttaataattacgcctataaacaaactatatatataaatttcgaaaaaaattaaaacgacgacacaactcgtccaccataaataacgcgaacgacacgaaaactacaacccaaaaaaccccacccaaaacgcgctacgaccccgaacgaactaactccgaacccccgacctcccgcgtccccgccgcctacgaaaaaaaacgaaatccccaccaaacactccccgaaccgaacaaaaaactccacgcgcgaaccaacccgacgtccgaaaaaacgacccctaaaataaaacgccccaattatcgccgccaccccgccccaactcctcccgcacgaaaactccgaaaataccgcgaacgaaccgaccgtacttcccgaaataccccgcgcccgccgccgccgtcgaaaaacgaaacctacgtatcgacgacgaaaaacgaaacctacgtatcgacgacgaaaaacgaaaccgcgacgcaacgcgaaaaatccgaatcccgcgacgatccgaacataaacctaaaacgcgaacttcgccgtaaattcctcgaaaac

SEQ ID NO: 28363 - DNA, 586 bp, Artificial Sequence
  chemically treated genomic DNA (Homo sapiens) CpG-island No: 28363
tatcgttagtttatttggatattacgttcgtttttaatagttgcgtttgtgagtaggttgtgtgtgtgaatttcgggaggaattggggcggcggtatagttcgtttattatgagtagcgcgggcggtacgggggttgtagtttagaagattttatttagggcgcgttgcgatttcggacgggttggtttcgggttttcggtttttcgcgttttcgtcgtttacgaggaggaacggggtttttattaggtatttttcgggtcgggtagagggttttacgcgcgggttaattcggcgttcgggaagacggtttttagggtgggacgttttagttgtcgtcgttatttcgttttagtttttttcgtacgagaatttcgaggatgtcgcgggcgggtcgatcgtatttttcggaatgtttcgcgttcgtcgtcgtcgtcgaggggcggggtttgcgtgtcggcggcgaggggcggggtttgcgtgtcggcggcgaggggcggggtcgcggcgtagcgcgggaagttcggatttcgcggcgattcgagtatgagtttggagcgcgagtttcgtcgtaagtttttcggggat

SEQ ID NO: 28364 - DNA, 586 bp, Artificial Sequence
  chemically treated genomic DNA (Homo sapiens) CpG-island No: 28364
atccccgaaaaacttacgacgaaactcgcgctccaaactcatactcgaatcgccgcgaaatccgaacttcccgcgctacgccgcgaccccgcccctcgccgccgacacgcaaaccccgcccctcgccgccgacacgcaaaccccgcccctcgacgacgacgacgaacgcgaaacattccgaaaaatacgatcgacccgcccgcgacatcctcgaaattctcgtacgaaaaaaactaaaacgaaataacgacgacaactaaaacgtcccaccctaaaaaccgtcttcccgaacgccgaattaacccgcgcgtaaaaccctctacccgacccgaaaaatacctaataaaaaccccgttcctcctcgtaaacgacgaaaacgcgaaaaaccgaaaacccgaaaccaacccgtccgaaatcgcaacgcgccctaaataaaatcttctaaactacaacccccgtaccgcccgcgctactcataataaacgaactataccgccgccccaattcctcccgaaattcacacacacaacctactcacaaacgcaactattaaaaacgaacgtaatatccaaataaactaacgata

SEQ ID NO: 28365 - DNA, 650 bp, Artificial Sequence
  chemically treated genomic DNA (Homo sapiens) CpG-island No: 28365
gagatttttttcggtttcgtttttcgagtaatagttttgttttcgtttatttggttttggtggtttacgtagtagaaatattcgcgggttcggggtttcggattttggttttgcgtgtaggaaacgtttttattttcgttgtaggttcgggtttttcgcgatcgcgttaaggttagggttcggagcgtttcgtaaggcggttatatttttttttcgcgtcggaagcgattagtaggttacgtcgggggcggtgttgcgcgaattcgcgtttgttcgtagtagtttcgcgtttcgcgtttcggcggcgttcgttttcgcgattcgggttcggcgtttttttttttttttcgggtttcgggggttcgttcgttttggtttttcgagaggcgtgtgtcggcgacgtttttttcggttcgtttcgcgttttttttcgttttcggtcgcgtttataaggaacgggaggacgcgtagggtttatgtgtattttatttattcgtgtcgtcgtttttcgggtttatgcgtttgggcgagcgttttagtcgggcgggatcgtaaaggtttcgggattattcgattgaggacgtcgtttaggtttcggtagggttggggtttttgtttttaataaataaaaacggaattttaaaaaatat

SEQ ID NO: 28366 - DNA, 650 bp, Artificial Sequence
  chemically treated genomic DNA (Homo sapiens) CpG-island No: 28366
atattttttaaaattccgtttttatttattaaaaacaaaaaccccaaccctaccgaaacctaaacgacgtcctcaatcgaataatcccgaaacctttacgatcccgcccgactaaaacgctcgcccaaacgcataaacccgaaaaacgacgacacgaataaataaaatacacataaaccctacgcgtcctcccgttccttataaacgcgaccgaaaacgaaaaaaaacgcgaaacgaaccgaaaaaaacgtcgccgacacacgcctctcgaaaaaccaaaacgaacgaacccccgaaacccgaaaaaaaaaaaaaaacgccgaacccgaatcgcgaaaacgaacgccgccgaaacgcgaaacgcgaaactactacgaacaaacgcgaattcgcgcaacaccgcccccgacgtaacctactaatcgcttccgacgcgaaaaaaaaatataaccgccttacgaaacgctccgaaccctaaccttaacgcgatcgcgaaaaacccgaacctacaacgaaaataaaaacgtttcctacacgcaaaaccaaaatccgaaaccccgaacccgcgaatatttctactacgtaaaccaccaaaaccaaataaacgaaaacaaaactattactcgaaaaacgaaaccgaaaaaaatctc

SEQ ID NO: 28367 - DNA, 650 bp, Artificial Sequence
  chemically treated genomic DNA (Homo sapiens) CpG-island No: 28367
atattttttagagtttcgtttttatttattaaaaataaaagttttagttttgtcgaggtttgggcggcgtttttagtcgggtggtttcggggtttttgcggtttcgttcggttgagacgttcgtttagacgtatggattcgagaggcgacgatacgagtgaataaagtgtatatggattttgcgcgttttttcgttttttgtgggcgcggtcgggggcgggaagagacgcggggcggatcggaaggggcgtcgtcggtatacgtttttcggaaggttagggcgggcgagttttcgaggttcgagggagagggaagagcgtcgggttcgggtcgcggaggcgggcgtcgtcggaacgcgaagcgcggggttattgcgggtaggcgcgagttcgcgtagtatcgttttcggcgtgatttgttggtcgttttcggcgcgggaggagaatgtggtcgttttgcgggacgtttcggattttggttttggcgcggtcgcggggagttcgggtttgtagcggggatgggggcgttttttatacgtagggttagagttcggagtttcggattcgcgagtatttttattacgtggattattagggttaggtgggcgggggtagggttgttgttcgagaggcggggtcgggagaggtttt

SEQ ID NO: 28368 - DNA, 650 bp, Artificial Sequence
  chemically treated genomic DNA (Homo sapiens) CpG-island No: 28368
aaaacctctcccgaccccgcctctcgaacaacaaccctacccccgcccacctaaccctaataatccacgtaataaaaatactcgcgaatccgaaactccgaactctaaccctacgtataaaaaacgcccccatccccgctacaaacccgaactccccgcgaccgcgccaaaaccaaaatccgaaacgtcccgcaaaacgaccacattctcctcccgcgccgaaaacgaccaacaaatcacgccgaaaacgatactacgcgaactcgcgcctacccgcaataaccccgcgcttcgcgttccgacgacgcccgcctccgcgacccgaacccgacgctcttccctctccctcgaacctcgaaaactcgcccgccctaaccttccgaaaaacgtataccgacgacgccccttccgatccgccccgcgtctcttcccgcccccgaccgcgcccacaaaaaacgaaaaaacgcgcaaaatccatatacactttattcactcgtatcgtcgcctctcgaatccatacgtctaaacgaacgtctcaaccgaacgaaaccgcaaaaaccccgaaaccacccgactaaaaacgccgcccaaacctcgacaaaactaaaacttttatttttaataaataaaaacgaaactctaaaaaatat

SEQ ID NO: 28369 - DNA, 753 bp, Artificial Sequence
  chemically treated genomic DNA (Homo sapiens) CpG-island No: 28369
tcggggtcgagtcgagggttttcggtacggtttcgtcgtttcgcgtttcgtgttcgttttcgtttcgggaatttcggcgtgggggtggggtaggcggcgggagacgacgggttgtacggttagtttcgtttatttgggcggggttttcgggtttcgcggtcgtcgcggcgttattatttttgcggaagaggttgtagaagatgtagatgagtaacgagtaaaaggcgtatatgggagcgcggggcggtagagggtttcgtttcgcgtcgtttcgcgttttcgcgtttagattcggcgttcgttcgtcgtagtgtcggtgcgtatgttcgcgacggtcgtttttacggttcggtttttacggttggaaggcgagcgcggggacgggggtattagaaataggtgttcgcggtcgtatttggagattcgtcgttttttacggcgtcgttcggcgcgttttaatttttatatcgcggatatcgggttgagagcgtttacggttttcgcgatttttttttcggaattttttttatttttcgcgtagttttttatcgtttcggtttcgcggagtttttaatacgtcggggtttttttttttttttttatagtttcgtttattttagtttcgtttagatttttttttttcgtagtttcgtttaaatttcgttttttgtagtttcgtttaggttttttttttttcggttttttttagtttcgtttagatttttttttttggagttatcgtttagggtttcg

SEQ ID NO: 28370 - DNA, 753 bp, Artificial Sequence
  chemically treated genomic DNA (Homo sapiens) CpG-island No: 28370
cgaaaccctaaacgataactccaaaaaaaaaaatctaaacgaaactaaaaaaaaccgaaaaaaaaaaaacctaaacgaaactacaaaaaacgaaatttaaacgaaactacgaaaaaaaaaaatctaaacgaaactaaaataaacgaaactataaaaaaaaaaaaaaaaaccccgacgtattaaaaactccgcgaaaccgaaacgataaaaaactacgcgaaaaataaaaaaaattccgaaaaaaaaatcgcgaaaaccgtaaacgctctcaacccgatatccgcgatataaaaattaaaacgcgccgaacgacgccgtaaaaaacgacgaatctccaaatacgaccgcgaacacctatttctaatacccccgtccccgcgctcgccttccaaccgtaaaaaccgaaccgtaaaaacgaccgtcgcgaacatacgcaccgacactacgacgaacgaacgccgaatctaaacgcgaaaacgcgaaacgacgcgaaacgaaaccctctaccgccccgcgctcccatatacgccttttactcgttactcatctacatcttctacaacctcttccgcaaaaataataacgccgcgacgaccgcgaaacccgaaaaccccgcccaaataaacgaaactaaccgtacaacccgtcgtctcccgccgcctaccccacccccacgccgaaattcccgaaacgaaaacgaacacgaaacgcgaaacgacgaaaccgtaccgaaaaccctcgactcgaccccga

SEQ ID NO: 28371 - DNA, 753 bp, Artificial Sequence
  chemically treated genomic DNA (Homo sapiens) CpG-island No: 28371
cggggttttgggcggtggttttaagaaaaggggtttgggcgagattgagagggatcgagaggggaggagtttgggcgaggttgtaaggaacggggtttgggcggggttgcgaggagggggggtttgggcggggttgagatgggcggggttgtagggagaggaaggagaatttcggcgtgttgaaggtttcgcgaaatcggagcggtgggggattacgcggagggtgggagggatttcgagaggagggtcgcgggagtcgtgggcgtttttagttcggtgttcgcggtgtaggggttggggcgcgtcgggcggcgtcgtgagaaacggcgggtttttaggtgcggtcgcgggtatttgtttttagtattttcgttttcgcgttcgttttttagtcgtgggagtcgggtcgtgggggcggtcgtcgcgagtatgcgtatcggtattgcggcgggcgggcgtcgagtttgggcgcggggacgcggggcggcgcgaagcggggttttttgtcgtttcgcgtttttatgtacgttttttattcgttgtttatttatattttttatagtttttttcgtagggatggtggcgtcgcggcggtcgcggagttcggggatttcgtttaggtgagcggggttggtcgtgtagttcgtcgtttttcgtcgtttgttttatttttacgtcgaggttttcggggcgggggcgggtacggggcgcggggcgacggggtcgtgtcgaggattttcggttcggtttcga

SEQ ID NO: 28372 - DNA, 753 bp, Artificial Sequence
  chemically treated genomic DNA (Homo sapiens) CpG-island No: 28372
tcgaaaccgaaccgaaaatcctcgacacgaccccgtcgccccgcgccccgtacccgcccccgccccgaaaacctcgacgtaaaaataaaacaaacgacgaaaaacgacgaactacacgaccaaccccgctcacctaaacgaaatccccgaactccgcgaccgccgcgacgccaccatccctacgaaaaaaactataaaaaatataaataaacaacgaataaaaaacgtacataaaaacgcgaaacgacaaaaaaccccgcttcgcgccgccccgcgtccccgcgcccaaactcgacgcccgcccgccgcaataccgatacgcatactcgcgacgaccgcccccacgacccgactcccacgactaaaaaacgaacgcgaaaacgaaaatactaaaaacaaatacccgcgaccgcacctaaaaacccgccgtttctcacgacgccgcccgacgcgccccaacccctacaccgcgaacaccgaactaaaaacgcccacgactcccgcgaccctcctctcgaaatccctcccaccctccgcgtaatcccccaccgctccgatttcgcgaaaccttcaacacgccgaaattctccttcctctccctacaaccccgcccatctcaaccccgcccaaaccccccctcctcgcaaccccgcccaaaccccgttccttacaacctcgcccaaactcctcccctctcgatccctctcaatctcgcccaaaccccttttcttaaaaccaccgcccaaaaccccg

SEQ ID NO: 28373 - DNA, 546 bp, Artificial Sequence
  chemically treated genomic DNA (Homo sapiens) CpG-island No: 28373
ttttcggtcgtcgggttcgcggtcgttttttgtttggagcgcgcggggtagaagttggagtttttcgtttattgcgtgttcgttatttagcggatttagtttagcgtcgagttcgtcgtcgagaacgatacggatatcgatagcggttacggcggcgaagtcgaggttcggtcggatcgcgagaaaggtaaaggcgcgggggcgagtcgcgttattattaagtaggagtttttcggggaggattcgtcggcgtttaagaggatgaagttggattttcgcggcggcggtagcggcggcggttcggggggcggcgcggcggcggcggtagtcgcgtttttggggttcgattttgtcgtcgcggtcgcgttgttgagattcgacgtcgttttgtttagttcgttggtggcgttcggcggaggcggaggcgcgtttttttcgtagttcgcggtcgtcgcggtttttttttgtttgtttttttgttttttttcgttttttgtagttgtcgtttacgtgtagttttttttggataagagcggtttggagaag

SEQ ID NO: 28374 - DNA, 546 bp, Artificial Sequence
  chemically treated genomic DNA (Homo sapiens) CpG-island No: 28374
cttctccaaaccgctcttatccaaaaaaaactacacgtaaacgacaactacaaaaaacgaaaaaaaacaaaaaaacaaacaaaaaaaaaccgcgacgaccgcgaactacgaaaaaaacgcgcctccgcctccgccgaacgccaccaacgaactaaacaaaacgacgtcgaatctcaacaacgcgaccgcgacgacaaaatcgaaccccaaaaacgcgactaccgccgccgccgcgccgccccccgaaccgccgccgctaccgccgccgcgaaaatccaacttcatcctcttaaacgccgacgaatcctccccgaaaaactcctacttaataataacgcgactcgcccccgcgcctttacctttctcgcgatccgaccgaacctcgacttcgccgccgtaaccgctatcgatatccgtatcgttctcgacgacgaactcgacgctaaactaaatccgctaaataacgaacacgcaataaacgaaaaactccaacttctaccccgcgcgctccaaacaaaaaacgaccgcgaacccgacgaccgaaaa

SEQ ID NO: 28375 - DNA, 546 bp, Artificial Sequence
  chemically treated genomic DNA (Homo sapiens) CpG-island No: 28375
tttttttaggtcgtttttgtttaggaagggttgtacgtaggcggtagttgtagaaggcgagaggaagtagaagggtaggtagaagggggtcgcggcggtcgcgggttgcgggaagggcgcgttttcgttttcgtcgaacgttattagcgagttgagtagggcggcgtcgggttttagtagcgcggtcgcggcggtagggtcgggttttagaagcgcggttgtcgtcgtcgtcgcgtcgtttttcgggtcgtcgtcgttgtcgtcgtcgcgggaatttagttttatttttttgggcgtcggcgagtttttttcgggaggtttttgtttgatggtgacgcggttcgttttcgcgtttttgtttttttcgcggttcggtcgggtttcggtttcgtcgtcgtagtcgttgtcggtgttcgtgtcgttttcggcggcgagttcggcgttgggttgagttcgttggatgacgggtacgtagtaggcgaggggttttagtttttgtttcgcgcgttttaggtagggggcggtcgcggattcggcggtcgaggg

SEQ ID NO: 28376 - DNA, 546 bp, Artificial Sequence
  chemically treated genomic DNA (Homo sapiens) CpG-island No: 28376
ccctcgaccgccgaatccgcgaccgccccctacctaaaacgcgcgaaacaaaaactaaaacccctcgcctactacgtacccgtcatccaacgaactcaacccaacgccgaactcgccgccgaaaacgacacgaacaccgacaacgactacgacgacgaaaccgaaacccgaccgaaccgcgaaaaaaacaaaaacgcgaaaacgaaccgcgtcaccatcaaacaaaaacctcccgaaaaaaactcgccgacgcccaaaaaaataaaactaaattcccgcgacgacgacaacgacgacgacccgaaaaacgacgcgacgacgacgacaaccgcgcttctaaaacccgaccctaccgccgcgaccgcgctactaaaacccgacgccgccctactcaactcgctaataacgttcgacgaaaacgaaaacgcgcccttcccgcaacccgcgaccgccgcgacccccttctacctacccttctacttcctctcgccttctacaactaccgcctacgtacaacccttcctaaacaaaaacgacctaaaaaaa

SEQ ID NO: 28377 - DNA, 669 bp, Artificial Sequence
  chemically treated genomic DNA (Homo sapiens) CpG-island No: 28377
gtcgtgcggtttgtgcggtcgtcgtacgtttcgtcgggtttcgtgtttttatcgtcgttttacgtgtttcgggagcgtcgcggtcgtttcgtcgtttttcggaggcgcggggttgggggagttgtaggaatcgttttttttttttgattttttagtttcgtttcgttatcgtcgtcgcggaattttagtttcgttcggagtttcgggcggttttcgtcggtgggaaggacgtttatggttttcggcgcgcggttgttcggttttcgttgtttttttcgtttcgcggcgtcggttagtttcgggaggaggcgcggtttcgttttcgtcggtggtgttttttcgggcgcggcgttagcgggttttggattttcgaggtgttcgggtttttttcgagtcggtatttgagtcgttttttttcgtttcggatcgggcgagaaggagattgttacgttattgagttatttggggttatttgttgttcgggttcggtttttatttagagcgttttttcgtgcgcgagaaggcgtaggacgtggttaaatattcgtgggaaagagttaataatatcgagggggaaggcgtttaagtcgttcgtattttatttttaattaagtacgtgatttaatttaaaaagagggtgatttttgttttttatttagtcggtaggtt

SEQ ID NO: 28378 - DNA, 669 bp, Artificial Sequence
  chemically treated genomic DNA (Homo sapiens) CpG-island No: 28378
aacctaccgactaaataaaaaacaaaaatcaccctctttttaaattaaatcacgtacttaattaaaaataaaatacgaacgacttaaacgccttccccctcgatattattaactctttcccacgaatatttaaccacgtcctacgccttctcgcgcacgaaaaaacgctctaaataaaaaccgaacccgaacaacaaataaccccaaataactcaataacgtaacaatctccttctcgcccgatccgaaacgaaaaaaaacgactcaaataccgactcgaaaaaaacccgaacacctcgaaaatccaaaacccgctaacgccgcgcccgaaaaaacaccaccgacgaaaacgaaaccgcgcctcctcccgaaactaaccgacgccgcgaaacgaaaaaaacaacgaaaaccgaacaaccgcgcgccgaaaaccataaacgtccttcccaccgacgaaaaccgcccgaaactccgaacgaaactaaaattccgcgacgacgataacgaaacgaaactaaaaaatcaaaaaaaaaaaacgattcctacaactcccccaaccccgcgcctccgaaaaacgacgaaacgaccgcgacgctcccgaaacacgtaaaacgacgataaaaacacgaaacccgacgaaacgtacgacgaccgcacaaaccgcacgac

SEQ ID NO: 28379 - DNA, 669 bp, Artificial Sequence
  chemically treated genomic DNA (Homo sapiens) CpG-island No: 28379
agtttgtcggttgaataagaggtaagagttattttttttttgagttaaattacgtgtttaattaaaagtgaggtgcgggcggtttaggcgttttttttttcggtgttgttggtttttttttacgggtgtttggttacgttttgcgttttttcgcgtacgggagagcgttttgggtagaggtcgggttcgggtagtaggtggttttaggtagtttagtggcgtggtagtttttttttcgttcggttcggagcggaggggagcggtttaggtgtcggttcgggggaggttcgggtatttcggggatttagagttcgttggcgtcgcgttcgggagggtattatcggcgaggacgaagtcgcgttttttttcggaattggtcggcgtcgcgaggcgggaggagtagcgggagtcgggtagtcgcgcgtcggggattatggacgttttttttatcggcgggggtcgttcggggtttcggacggagttggaatttcgcggcggcggtggcgaggcgaggttggagagttaggaggaagaaacgatttttgtagtttttttagtttcgcgttttcggggagcggcggagcggtcgcggcgttttcgggatacgtgggacggcgatgaggatacggagttcggcgaggcgtgcggcggtcgtataagtcgtacggt

SEQ ID NO: 28380 - DNA, 669 bp, Artificial Sequence
  chemically treated genomic DNA (Homo sapiens) CpG-island No: 28380
accgtacgacttatacgaccgccgcacgcctcgccgaactccgtatcctcatcgccgtcccacgtatcccgaaaacgccgcgaccgctccgccgctccccgaaaacgcgaaactaaaaaaactacaaaaatcgtttcttcctcctaactctccaacctcgcctcgccaccgccgccgcgaaattccaactccgtccgaaaccccgaacgacccccgccgataaaaaaaacgtccataatccccgacgcgcgactacccgactcccgctactcctcccgcctcgcgacgccgaccaattccgaaaaaaaacgcgacttcgtcctcgccgataataccctcccgaacgcgacgccaacgaactctaaatccccgaaatacccgaacctcccccgaaccgacacctaaaccgctcccctccgctccgaaccgaacgaaaaaaaaactaccacgccactaaactacctaaaaccacctactacccgaacccgacctctacccaaaacgctctcccgtacgcgaaaaaacgcaaaacgtaaccaaacacccgtaaaaaaaaaccaacaacaccgaaaaaaaaaacgcctaaaccgcccgcacctcacttttaattaaacacgtaatttaactcaaaaaaaaaataactcttacctcttattcaaccgacaaact

SEQ ID NO: 28381 - DNA, 723 bp, Artificial Sequence
  chemically treated genomic DNA (Homo sapiens) CpG-island No: 28381
gattattggaatatgattatattacgcgtatgagttacgaatacgcgattatttacgtaaaacgttgttatgttcgagaaaacggtagtaaattcgatttaacgggtatatacgagaataatgatatttcggttaaagttcgttattgtcgattcgttcgcgattcgcgggaatacgtttttatttgttttttacgacggaaatcgcgttaacgcggttttatatgttgcgacgcgcgtattttatgcgtgttttcgttggatatattttcggtttatcgcgaaatagttatcgatattcgattaaagatggatcgatgtaggtcgtatattaggcgtatattcgcgttatatacgtcgcggattatatttttattcgttggtttattgtcgcgtataaattcgggatatttttcgcgcgattcgacggggattatcggggataattattcgtagcgatgagtagtaaagattgataatttatcgcgtatataatttttcgtatttttacggcgttgttttatgagttattttatttatatatcgatacggaacgacgcggagaacgacgttatgatgatttcgttgacgtcgcgaggagatacgtttaatatttgtttgcgtatttgcgggagtatattatcgatttaatcgcgtaatatgcgtattttatatcgttcgtatgtatttgtagttatattcggtatatatgagtgtttataat

SEQ ID NO: 28382 - DNA, 723 bp, Artificial Sequence
  chemically treated genomic DNA (Homo sapiens) CpG-island No: 28382
attataaacactcatatataccgaatataactacaaatacatacgaacgatataaaatacgcatattacgcgattaaatcgataatatactcccgcaaatacgcaaacaaatattaaacgtatctcctcgcgacgtcaacgaaatcatcataacgtcgttctccgcgtcgttccgtatcgatatataaataaaataactcataaaacaacgccgtaaaaatacgaaaaattatatacgcgataaattatcaatctttactactcatcgctacgaataattatccccgataatccccgtcgaatcgcgcgaaaaatatcccgaatttatacgcgacaataaaccaacgaataaaaatataatccgcgacgtatataacgcgaatatacgcctaatatacgacctacatcgatccatctttaatcgaatatcgataactatttcgcgataaaccgaaaatatatccaacgaaaacacgcataaaatacgcgcgtcgcaacatataaaaccgcgttaacgcgatttccgtcgtaaaaaacaaataaaaacgtattcccgcgaatcgcgaacgaatcgacaataacgaactttaaccgaaatatcattattctcgtatatacccgttaaatcgaatttactaccgttttctcgaacataacaacgttttacgtaaataatcgcgtattcgtaactcatacgcgtaatataatcatattccaataatc

SEQ ID NO: 28383 - DNA, 723 bp, Artificial Sequence
  chemically treated genomic DNA (Homo sapiens) CpG-island No: 28383
gttgtaggtatttatatgtgtcgggtatagttgtaggtgtatgcgagcgatatagggtgcgtatgttgcgcggttagatcggtggtgtgttttcgtagatacgtagatagatgttgagcgtgttttttcgcggcgttagcgaggttattatggcgtcgtttttcgcgtcgtttcgtgtcgatgtgtgggtagagtagtttatggagtagcgtcgtagagatgcgagggattgtgtgcgcggtgagttgttagtttttgttgtttatcgttgcgggtggttgttttcgatgattttcgtcgggtcgcgcgggggatgtttcggatttgtgcgcggtagtaggttagcgagtgagggtgtgattcgcggcgtgtgtggcgcgaatatgcgtttgatatgcggtttgtatcgatttatttttgatcggatgtcggtggttatttcgcgataggtcgggggtatgtttagcggggatacgtatgagatgcgcgcgtcgtagtatgtgaggtcgcgttggcgcggttttcgtcgtgagaggtagatggaggcgtgttttcgcgaatcgcgggcgagtcggtagtggcgaattttgatcgggatgttattgttttcgtatgtgttcgttgagtcgagtttgttgtcgttttttcgggtatagtagcgttttgcgtgagtgatcgcgtgttcgtggtttatgcgcgtggtatggttatattttagtggtt

SEQ ID NO: 28384 - DNA, 723 bp, Artificial Sequence
  chemically treated genomic DNA (Homo sapiens) CpG-island No: 28384
aaccactaaaatataaccataccacgcgcataaaccacgaacacgcgatcactcacgcaaaacgctactatacccgaaaaaacgacaacaaactcgactcaacgaacacatacgaaaacaataacatcccgatcaaaattcgccactaccgactcgcccgcgattcgcgaaaacacgcctccatctacctctcacgacgaaaaccgcgccaacgcgacctcacatactacgacgcgcgcatctcatacgtatccccgctaaacatacccccgacctatcgcgaaataaccaccgacatccgatcaaaaataaatcgatacaaaccgcatatcaaacgcatattcgcgccacacacgccgcgaatcacaccctcactcgctaacctactaccgcgcacaaatccgaaacatcccccgcgcgacccgacgaaaatcatcgaaaacaaccacccgcaacgataaacaacaaaaactaacaactcaccgcgcacacaatccctcgcatctctacgacgctactccataaactactctacccacacatcgacacgaaacgacgcgaaaaacgacgccataataacctcgctaacgccgcgaaaaaacacgctcaacatctatctacgtatctacgaaaacacaccaccgatctaaccgcgcaacatacgcaccctatatcgctcgcatacacctacaactatacccgacacatataaatacctacaac

SEQ ID NO: 28385 - DNA, 681 bp, Artificial Sequence
  chemically treated genomic DNA (Homo sapiens) CpG-island No: 28385
  unsure (68, 235, 463, 570, 654)
gggtcgtcgggcggtcgcgcgcgcgggtcgcgtagcgggcgcgcgcggcggcgggtcgtcgtcggagncggtcgtcgtcgtttcggttttttttcgtcgcggtcgcggcgcgcgcgtcgcgggcggggggtcgggcgcgcggtcggtttcggcgcgcggcgcgttcggtcgcgtcggtcgcgcgcggcggacgcgcgtttcgttttcggtcgtcgatcgggcgcgtcgtacgttncgtcggtcgcggcgtcgttcgttcgtcggcgtcgtcgcgcggggcgcgtcgtcgcgagtcgcgacgcgcgcgtgcgtcgcggcgggcggaggcggcggggagacgatcgcgcgtcgcgttcgacggcgcgacgcggggcggcgttcgaatcgggtcggtcgcgatttcgcgggcgagttcggtcgcggcgggcgggcgcgcgggggcgcgcggcgcgttgtttcgggntagcggcggcgtcgcggcgcggcgggcgtcgtcgtcgggcgacggggtcgggttcgtcgtttcgcggtttgttgcgcgttatttttttgcgttcgtttagttcgttngtcgggcgcgcgggcgtgcgggtcgcgttcgcgttgttcgcggttcgtttgtttatggacgttttaataggttttattttcgtntgttcgatcgcggagtttttcgttttt

SEQ ID NO: 28386 - DNA, 681 bp, Artificial Sequence
  chemically treated genomic DNA (Homo sapiens) CpG-island No: 28386
  unsure (28, 112, 219, 447, 614)
aaaaacgaaaaactccgcgatcgaacanacgaaaataaaacctattaaaacgtccataaacaaacgaaccgcgaacaacgcgaacgcgacccgcacgcccgcgcgcccgacnaacgaactaaacgaacgcaaaaaaataacgcgcaacaaaccgcgaaacgacgaacccgaccccgtcgcccgacgacgacgcccgccgcgccgcgacgccgccgctancccgaaacaacgcgccgcgcgcccccgcgcgcccgcccgccgcgaccgaactcgcccgcgaaatcgcgaccgacccgattcgaacgccgccccgcgtcgcgccgtcgaacgcgacgcgcgatcgtctccccgccgcctccgcccgccgcgacgcacgcgcgcgtcgcgactcgcgacgacgcgccccgcgcgacgacgccgacgaacgaacgacgccgcgaccgacgnaacgtacgacgcgcccgatcgacgaccgaaaacgaaacgcgcgtccgccgcgcgcgaccgacgcgaccgaacgcgccgcgcgccgaaaccgaccgcgcgcccgaccccccgcccgcgacgcgcgcgccgcgaccgcgacgaaaaaaaaccgaaacgacgacgaccgnctccgacgacgacccgccgccgcgcgcgcccgctacgcgacccgcgcgcgcgaccgcccgacgaccc

SEQ ID NO: 28387 - DNA, 681 bp, Artificial Sequence
  chemically treated genomic DNA (Homo sapiens) CpG-island No: 28387
  unsure (28, 112, 219, 447, 614)
ggagacgagggatttcgcggtcgagtanacggggatagaatttattgagacgtttatagataggcggatcgcgaatagcgcgggcgcgattcgtacgttcgcgcgttcggtnaacgagttgaacgagcgtaggaaggtagcgcgtagtagatcgcgggacgacggattcgatttcgtcgttcggcggcggcgttcgtcgcgtcgcggcgtcgtcgttgnttcggggtagcgcgtcgcgcgttttcgcgcgttcgttcgtcgcggtcgggttcgttcgcggggtcgcggtcggttcggttcgagcgtcgtttcgcgtcgcgtcgtcgggcgcggcgcgcggtcgttttttcgtcgttttcgttcgtcgcggcgtacgcgcgcgtcgcggttcgcggcggcgcgtttcgcgcgacggcgtcggcgggcgggcggcgtcgcggtcggcgnggcgtgcggcgcgttcggtcggcggtcgggggcggggcgcgcgttcgtcgcgcgcggtcggcgcggtcgggcgcgtcgcgcgtcggggtcggtcgcgcgttcggtttttcgttcgcggcgcgcgcgtcgcggtcgcggcgggggggggtcggggcggcggcggtcgntttcggcggcggttcgtcgtcgcgcgcgttcgttgcgcggttcgcgcgcgcggtcgttcggcggttt

SEQ ID NO: 28388 - DNA, 681 bp, Artificial Sequence
  chemically treated genomic DNA (Homo sapiens) CpG-island No: 28388
  unsure (68, 235, 463, 570, 654)
aaaccgccgaacgaccgcgcgcgcgaaccgcgcaacgaacgcgcgcgacgacgaaccgccgccgaaancgaccgccgccgccccgacccccccccgccgcgaccgcgacgcgcgcgccgcgaacgaaaaaccgaacgcgcgaccgaccccgacgcgcgacgcgcccgaccgcgccgaccgcgcgcgacgaacgcgcgccccgcccccgaccgccgaccgaacgcgccgcacgccncgccgaccgcgacgccgcccgcccgccgacgccgtcgcgcgaaacgcgccgccgcgaaccgcgacgcgcgcgtacgccgcgacgaacgaaaacgacgaaaaaacgaccgcgcgccgcgcccgacgacgcgacgcgaaacgacgctcgaaccgaaccgaccgcgaccccgcgaacgaacccgaccgcgacgaacgaacgcgcgaaaacgcgcgacgcgctaccccgaancaacgacgacgccgcgacgcgacgaacgccgccgccgaacgacgaaatcgaatccgtcgtcccgcgatctactacgcgctaccttcctacgctcgttcaactcgttnaccgaacgcgcgaacgtacgaatcgcgcccgcgctattcgcgatccgcctatctataaacgtctcaataaattctatccccgtntactcgaccgcgaaatccctcgtctcc

SEQ ID NO: 28389 - DNA, 908 bp, Artificial Sequence
  chemically treated genomic DNA (Homo sapiens) CpG-island No: 28389
cgttcgttggggttaagttatttttttttttagttttgtttttcgttttcgttttttttaataattttagttacgttttttattgtttcgtttcgtttcgcggcgacgttattttcggtcgattagtttttttaattttttttggttttcgttttcgttcgttttcggtcgtcgtcgtcgtcgttgttgtcgttgttgttgtttttgaggttgttggttgaggtcggaggatcgagcggcggcggcggcggcggttgagagggcggcggcgggagcggagcgggacgagggaacgggaggaagcgagcgaggagcgcgtagagcgcgttttttcgttcgtttgaggagtcgaagtagtttcggtttcgtcgtcgtcgtttgttcgtcggataaagtcgagagttcgcgtttatagttatgttttcgttagtcggtagcggttattagtttagttagagtcgcgttatttttattcgtatcgtggttattagcgacgtcgcgtagttattttatgattattgtattacgttcggggggacgtttttttttattatatcgggaggtgagcgtcggttagtcgttcgtcgcgttcggtgtttcgtcgcggttttttaatttttcggcgtttcggtgttcggtcgtttcgttttcgtttttagttttatcgaagtttcggggacgttgtttttgggttcgttcgagcgttcgggattttttatttcgtgttcgtttttgttcgtagttcgagtcggcgcgcgttttattcgggaatgtggttgttttgtcgcgaaaaagagtttttgttttcgtttcgtggtaggtttacgtattcgatttagtttttttttttttttttgtttttttttcgggcggatttggttttatttggttttgtattatagtttgta

SEQ ID NO: 28390 - DNA, 908 bp, Artificial Sequence
  chemically treated genomic DNA (Homo sapiens) CpG-island No: 28390
tacaaactataatacaaaaccaaataaaaccaaatccgcccgaaaaaaaaacaaaaaaaaaaaaaaaaactaaatcgaatacgtaaacctaccacgaaacgaaaacaaaaactctttttcgcgacaaaacaaccacattcccgaataaaacgcgcgccgactcgaactacgaacaaaaacgaacacgaaataaaaaatcccgaacgctcgaacgaacccaaaaacaacgtccccgaaacttcgataaaactaaaaacgaaaacgaaacgaccgaacaccgaaacgccgaaaaattaaaaaaccgcgacgaaacaccgaacgcgacgaacgactaaccgacgctcacctcccgatataataaaaaaaaacgtccccccgaacgtaatacaataatcataaaataactacgcgacgtcgctaataaccacgatacgaataaaaataacgcgactctaactaaactaataaccgctaccgactaacgaaaacataactataaacgcgaactctcgactttatccgacgaacaaacgacgacgacgaaaccgaaactacttcgactcctcaaacgaacgaaaaaacgcgctctacgcgctcctcgctcgcttcctcccgttccctcgtcccgctccgctcccgccgccgccctctcaaccgccgccgccgccgccgctcgatcctccgacctcaaccaacaacctcaaaaacaacaacaacgacaacaacgacgacgacgacgaccgaaaacgaacgaaaacgaaaaccaaaaaaaattaaaaaaactaatcgaccgaaaataacgtcgccgcgaaacgaaacgaaacaataaaaaacgtaactaaaattattaaaaaaaacgaaaacgaaaaacaaaactaaaaaaaaaaataacttaaccccaacgaacg

SEQ ID NO: 28391 - DNA, 908 bp, Artificial Sequence
  chemically treated genomic DNA (Homo sapiens) CpG-island No: 28391
tgtagattgtaatgtaaggttaagtggagttaaattcgttcgggaaggaggtagagaggagagagagaattgggtcgaatgcgtaagtttgttacgaagcggaaataagagttttttttcgcgataggatagttatattttcgagtggggcgcgcgtcgattcgagttgcgggtaagagcgaatacgaagtaaagggtttcgaacgttcgggcgggtttaagggtagcgttttcggggtttcggtggagttgggggcgggggcgaagcggtcgggtatcgaggcgtcgaggagttagaggatcgcggcgggatatcgggcgcggcggacggttggtcggcgtttatttttcggtgtggtggagaagagcgttttttcgggcgtggtgtaatagttatgaggtagttgcgcggcgtcgttgatggttacggtgcgggtggggatggcgcggttttggttgggttggtggtcgttgtcggttgacgaggatatggttgtgggcgcgggttttcggttttgttcggcgggtaggcggcggcggcggggtcggggttgtttcggttttttaggcggacggaaaagcgcgttttgcgcgtttttcgttcgttttttttcgttttttcgtttcgtttcgttttcgtcgtcgtttttttagtcgtcgtcgtcgtcgtcgttcgatttttcggttttagttagtagttttaggagtaatagtagcggtagtagcggcgacgacgacgatcggaagcgggcgaaggcgggagttagagggagttggggaagttggtcggtcggaggtgacgtcgtcgcggggcggggcgaggtagtgaggggcgtggttgaagttgttgaagggggcggggacgaggggtagggttgaggaagagagtggtttaattttagcgagcg

SEQ ID NO: 28392 - DNA, 908 bp, Artificial Sequence
  chemically treated genomic DNA (Homo sapiens) CpG-island No: 28392
cgctcgctaaaattaaaccactctcttcctcaaccctacccctcgtccccgcccccttcaacaacttcaaccacgcccctcactacctcgccccgccccgcgacgacgtcacctccgaccgaccaacttccccaactccctctaactcccgccttcgcccgcttccgatcgtcgtcgtcgccgctactaccgctactattactcctaaaactactaactaaaaccgaaaaatcgaacgacgacgacgacgacgactaaaaaaacgacgacgaaaacgaaacgaaacgaaaaaacgaaaaaaaacgaacgaaaaacgcgcaaaacgcgcttttccgtccgcctaaaaaaccgaaacaaccccgaccccgccgccgccgcctacccgccgaacaaaaccgaaaacccgcgcccacaaccatatcctcgtcaaccgacaacgaccaccaacccaaccaaaaccgcgccatccccacccgcaccgtaaccatcaacgacgccgcgcaactacctcataactattacaccacgcccgaaaaaacgctcttctccaccacaccgaaaaataaacgccgaccaaccgtccgccgcgcccgatatcccgccgcgatcctctaactcctcgacgcctcgatacccgaccgcttcgcccccgcccccaactccaccgaaaccccgaaaacgctacccttaaacccgcccgaacgttcgaaaccctttacttcgtattcgctcttacccgcaactcgaatcgacgcgcgccccactcgaaaatataactatcctatcgcgaaaaaaaactcttatttccgcttcgtaacaaacttacgcattcgacccaattctctctctcctctctacctccttcccgaacgaatttaactccacttaaccttacattacaatctaca

SEQ ID NO: 28393 - DNA, 914 bp, Artificial Sequence
  chemically treated genomic DNA (Homo sapiens) CpG-island No: 28393
tattacgcggtatttattttttattaggtcgggtcgtatattacgtaataggtttattttttattaggttggatttatatattatacgataggtttattttttattaggtcggatcgtatattacgcggtaggtttatattttattaggtagggtttatacgttgtatgataggtttatattttattaagtcgggttatatattacgcggtaggtttattttttattaggtcgggtttatacgttgtacgataggtttatattttattaggtcgggtttatacgttacgcgataggtttatattttattaggtcgggtttatacgttgtatgataggtttatattttattaagtcgggtcgtatattacgtagtatttattttttattagggcgggtcgtattttacgcgataggtttattttttattaggtcgggtttatacgttgtacgataggtttatattttattaggtcgggtttatacgttacgcgataggtttatattttattaggtcgggtttatacgttgtacgataggtttatattttattaggttgggtttatatattacgtgataggtttattttttattaggtcgggtttatacgttgtacgataggtttatattttattaggtcgggtttatacgttgtacgataggtttatattttattaggttgggtttatatattacgtgataggtttattttttattaggtcgggtttatacgttgcgcgagaggtttatattttattaggtcgggtttatacgttgtacgataggtttacgttttattaggttgggtttatatattacgtgataggtttattttttattaggtcgggttgtatattacgcgataggtttattttgtattaggtcgggttataatttttgtttttttattgtgttt

SEQ ID NO: 28394 - DNA, 914 bp, Artificial Sequence
  chemically treated genomic DNA (Homo sapiens) CpG-island No: 28394
aaacacaataaaaaaacaaaaattataacccgacctaatacaaaataaacctatcgcgtaatatacaacccgacctaataaaaaataaacctatcacgtaatatataaacccaacctaataaaacgtaaacctatcgtacaacgtataaacccgacctaataaaatataaacctctcgcgcaacgtataaacccgacctaataaaaaataaacctatcacgtaatatataaacccaacctaataaaatataaacctatcgtacaacgtataaacccgacctaataaaatataaacctatcgtacaacgtataaacccgacctaataaaaaataaacctatcacgtaatatataaacccaacctaataaaatataaacctatcgtacaacgtataaacccgacctaataaaatataaacctatcgcgtaacgtataaacccgacctaataaaatataaacctatcgtacaacgtataaacccgacctaataaaaaataaacctatcgcgtaaaatacgacccgccctaataaaaaataaatactacgtaatatacgacccgacttaataaaatataaacctatcatacaacgtataaacccgacctaataaaatataaacctatcgcgtaacgtataaacccgacctaataaaatataaacctatcgtacaacgtataaacccgacctaataaaaaataaacctaccgcgtaatatataacccgacttaataaaatataaacctatcatacaacgtataaaccctacctaataaaatataaacctaccgcgtaatatacgatccgacctaataaaaaataaacctatcgtataatatataaatccaacctaataaaaaataaacctattacgtaatatacgacccgacctaataaaaaataaataccgcgtaata

SEQ ID NO: 28395 - DNA, 914 bp, Artificial Sequence
  chemically treated genomic DNA (Homo sapiens) CpG-island No: 28395
aaatataataggaaggtaagaattgtggttcggtttagtataaggtaggtttgtcgcgtaatgtgtagttcggtttagtagaaggtaggtttgttacgtaatgtgtggatttagtttagtagaacgtaagtttgtcgtgtaacgtgtggattcggtttagtagaatgtaagtttttcgcgtaacgtgtggattcggtttagtagaaggtaggtttgttacgtaatgtgtggatttagtttagtagaatgtaggtttgtcgtgtaacgtgtggattcggtttagtagaatgtaagtttgtcgtgtaacgtgtggattcggtttagtagaaggtaggtttgttacgtaatgtgtggatttagtttagtagaatgtaggtttgtcgtgtaacgtgtggattcggtttagtagaatgtaagtttgtcgcgtaacgtgtggattcggtttagtagaatgtaagtttgtcgtgtaacgtgtggattcggtttagtagaaggtaggtttgtcgcgtaaggtgcggttcgttttagtagaaggtaggtgttgcgtaatgtgcggttcggtttagtagaatgtaggtttattatgtaacgtgtggattcggtttagtagaatgtaagtttgtcgcgtaacgtgtggattcggtttagtagaatgtaagtttgtcgtgtaacgtgtggattcggtttagtagaaggtaggtttgtcgcgtaatgtgtggttcggtttagtagaatgtaggtttattatgtaacgtgtggattttgtttagtagaatgtaggtttgtcgcgtaatgtgcggttcggtttagtagaaggtaggtttgtcgtgtaatgtgtggatttagtttagtagaaggtaggtttgttgcgtaatgtgcggttcggtttagtagaaggtaggtgtcgcgtaatg

SEQ ID NO: 28396 - DNA, 914 bp, Artificial Sequence
  chemically treated genomic DNA (Homo sapiens) CpG-island No: 28396
cattacgcgacacctaccttctactaaaccgaaccgcacattacgcaacaaacctaccttctactaaactaaatccacacattacacgacaaacctaccttctactaaaccgaaccgcacattacgcgacaaacctacattctactaaacaaaatccacacgttacataataaacctacattctactaaaccgaaccacacattacgcgacaaacctaccttctactaaaccgaatccacacgttacacgacaaacttacattctactaaaccgaatccacacgttacgcgacaaacttacattctactaaaccgaatccacacgttacataataaacctacattctactaaaccgaaccgcacattacgcaacacctaccttctactaaaacgaaccgcaccttacgcgacaaacctaccttctactaaaccgaatccacacgttacacgacaaacttacattctactaaaccgaatccacacgttacgcgacaaacttacattctactaaaccgaatccacacgttacacgacaaacctacattctactaaactaaatccacacattacgtaacaaacctaccttctactaaaccgaatccacacgttacacgacaaacttacattctactaaaccgaatccacacgttacacgacaaacctacattctactaaactaaatccacacattacgtaacaaacctaccttctactaaaccgaatccacacgttacgcgaaaaacttacattctactaaaccgaatccacacgttacacgacaaacttacgttctactaaactaaatccacacattacgtaacaaacctaccttctactaaaccgaactacacattacgcgacaaacctaccttatactaaaccgaaccacaattcttaccttcctattatattt

SEQ ID NO: 28397 - DNA, 545 bp, Artificial Sequence
  chemically treated genomic DNA (Homo sapiens) CpG-island No: 28397
agttttcgcgttttttttaaaattcgggcgtttttttttttgtattttcgtttttggggtttttatacgtttttcgtggttgatttttaagtcgggcgggtgcgttgtgcgacgcggaaagcgtcgtagagtacgtagaatacgattggttgagttttcggaagtgacgtattttaatcgttcgatagtggaagttttatttgcgttcgacggcggaagtttcgggagtgttaagtattcgcgtgtatacggttgtcggtatggtatattataattttaagaaaattacggtggtgtcgttcgttaaggtaggcggtttcgggagggttattgtaattttcgcgttttttttagttgggttttcggggagggttcgggtttgtagtcgtgggagagcggtcgtttttcgttcgtttatttttcgtttttgggtttgatcgtttggtcgcgtattcgggattatttttttttttttagtagaattcggggtttattagagatcggattttttagagatcggggtttatttaagatcgtggtttatt

SEQ ID NO: 28398 - DNA, 545 bp, Artificial Sequence
  chemically treated genomic DNA (Homo sapiens) CpG-island No: 28398
aataaaccacgatcttaaataaaccccgatctctaaaaaatccgatctctaataaaccccgaattctactaaaaaaaaaaaaataatcccgaatacgcgaccaaacgatcaaacccaaaaacgaaaaataaacgaacgaaaaacgaccgctctcccacgactacaaacccgaaccctccccgaaaacccaactaaaaaaaacgcgaaaattacaataaccctcccgaaaccgcctaccttaacgaacgacaccaccgtaattttcttaaaattataatataccataccgacaaccgtatacacgcgaatacttaacactcccgaaacttccgccgtcgaacgcaaataaaacttccactatcgaacgattaaaatacgtcacttccgaaaactcaaccaatcgtattctacgtactctacgacgctttccgcgtcgcacaacgcacccgcccgacttaaaaatcaaccacgaaaaacgtataaaaaccccaaaaacgaaaatacaaaaaaaaaaacgcccgaattttaaaaaaaacgcgaaaact

SEQ ID NO: 28399 - DNA, 545 bp, Artificial Sequence
  chemically treated genomic DNA (Homo sapiens) CpG-island No: 28399
ggtggattacggttttaggtggatttcggtttttgggggattcgatttttggtggatttcggattttgttgggggaggggaaatgatttcgagtacgcggttagacggttaggtttaggagcgggggatgggcgagcggaaggcgatcgtttttttacggttataggttcggatttttttcggggatttagttgaggagaacgcgaaagttgtagtggttttttcggggtcgtttattttggcggacggtattatcgtaatttttttgaagttgtaatgtgttatgtcggtagtcgtatgtacgcgggtatttggtattttcggaattttcgtcgtcgggcgtaggtgggatttttattgtcgggcggttgaggtacgttattttcgggagtttagttaatcgtgttttgcgtgttttacggcgtttttcgcgtcgtatagcgtattcgttcggtttggaggttagttacggagggcgtgtgagggttttaggagcgagggtatagaggagaggacgttcgggttttagggggagcgcggagatt

SEQ ID NO: 28400 - DNA, 545 bp, Artificial Sequence
  chemically treated genomic DNA (Homo sapiens) CpG-island No: 28400
aatctccgcgctccccctaaaacccgaacgtcctctcctctataccctcgctcctaaaaccctcacacgccctccgtaactaacctccaaaccgaacgaatacgctatacgacgcgaaaaacgccgtaaaacacgcaaaacacgattaactaaactcccgaaaataacgtacctcaaccgcccgacaataaaaatcccacctacgcccgacgacgaaaattccgaaaataccaaatacccgcgtacatacgactaccgacataacacattacaacttcaaaaaaattacgataataccgtccgccaaaataaacgaccccgaaaaaaccactacaactttcgcgttctcctcaactaaatccccgaaaaaaatccgaacctataaccgtaaaaaaacgatcgccttccgctcgcccatcccccgctcctaaacctaaccgtctaaccgcgtactcgaaatcatttcccctcccccaacaaaatccgaaatccaccaaaaatcgaatcccccaaaaaccgaaatccacctaaaaccgtaatccacc

SEQ ID NO: 28401 - DNA, 697 bp, Artificial Sequence
  chemically treated genomic DNA (Homo sapiens) CpG-island No: 28401
attgatcgcgtcgttttcgttaggttttcgcgcggtcggtatcgcggttttgagcgtaggcggtttcgggttttaggttttaggcggatcgcgtttcgggttcgtagttttttcgtttcggttgtcgggttacggggtagatggattcggagcgtttcgtcggtgagtagttacgattttcgaggttatttttcgcgaatcgttcggcggtaggagtacgtgattaagggtgggggcgttggtttagtagtcgaaggggtttttagcgcgtttagatttttcggggttgcggggcggaagtcggggcgtgattttcggcgtcgtcgggtgtggggcggaggtgtggggcggttttcggagaatttagcggcgcgggattggggcgggattttcggcgatatcggaagtgtattagcgttaggttggggttgtggggtcgcgttagtgcggagatagcggtgttttgcgcgttttcgggttagtacggggggtcgcgtcgtagggatttattggcggtgcgcgatttgggttggtttcgggggtggcgggcgtagttgttgtgataggtgagtgtcgttatttttttatttgttaggcgtcgagtcgtttttcggatgtttcgaagaggagtcgggatattgtagggtttaagggggtgtaggggtagtcggggtatagtggcggatggggtgtaggt

SEQ ID NO: 28402 - DNA, 697 bp, Artificial Sequence
  chemically treated genomic DNA (Homo sapiens) CpG-island No: 28402
acctacaccccatccgccactataccccgactacccctacacccccttaaaccctacaatatcccgactcctcttcgaaacatccgaaaaacgactcgacgcctaacaaataaaaaaataacgacactcacctatcacaacaactacgcccgccacccccgaaaccaacccaaatcgcgcaccgccaataaatccctacgacgcgaccccccgtactaacccgaaaacgcgcaaaacaccgctatctccgcactaacgcgaccccacaaccccaacctaacgctaatacacttccgatatcgccgaaaatcccgccccaatcccgcgccgctaaattctccgaaaaccgccccacacctccgccccacacccgacgacgccgaaaatcacgccccgacttccgccccgcaaccccgaaaaatctaaacgcgctaaaaaccccttcgactactaaaccaacgcccccacccttaatcacgtactcctaccgccgaacgattcgcgaaaaataacctcgaaaatcgtaactactcaccgacgaaacgctccgaatccatctaccccgtaacccgacaaccgaaacgaaaaaactacgaacccgaaacgcgatccgcctaaaacctaaaacccgaaaccgcctacgctcaaaaccgcgataccgaccgcgcgaaaacctaacgaaaacgacgcgatcaat

SEQ ID NO: 28403 - DNA, 697 bp, Artificial Sequence
  chemically treated genomic DNA (Homo sapiens) CpG-island No: 28403
atttgtattttattcgttattatgtttcgattgtttttgtatttttttgagttttgtagtgtttcgattttttttcggggtattcggggaacgattcggcgtttgataggtaggaagatggcggtatttatttgttatagtagttgcgttcgttattttcggagttagtttaggtcgcgtatcgttagtgagtttttacgacgcggtttttcgtattgattcgaagacgcgtaggatatcgttgttttcgtattgacgcgattttataattttaatttggcgttaatgtattttcggtgtcgtcggaagtttcgttttagtttcgcgtcgttgggtttttcggaagtcgttttatattttcgttttatattcggcggcgtcggaagttacgtttcggttttcgtttcgtagtttcgaggggtttgggcgcgttgaagattttttcggttgttgggttaacgtttttatttttggttacgtatttttgtcgtcgagcggttcgcgggaggtggtttcgggggtcgtagttatttatcggcggggcgtttcgagtttatttgtttcgtagttcggtagtcggggcgggagggttgcgagttcggggcgcggttcgtttgaggtttgagattcggggtcgtttgcgtttagggtcgcggtgtcggtcgcgcgggagtttggcggggacggcgcggttagt

SEQ ID NO: 28404 - DNA, 697 bp, Artificial Sequence
  chemically treated genomic DNA (Homo sapiens) CpG-island No: 28404
actaaccgcgccgtccccgccaaactcccgcgcgaccgacaccgcgaccctaaacgcaaacgaccccgaatctcaaacctcaaacgaaccgcgccccgaactcgcaaccctcccgccccgactaccgaactacgaaacaaataaactcgaaacgccccgccgataaataactacgacccccgaaaccacctcccgcgaaccgctcgacgacaaaaatacgtaaccaaaaataaaaacgttaacccaacaaccgaaaaaatcttcaacgcgcccaaacccctcgaaactacgaaacgaaaaccgaaacgtaacttccgacgccgccgaatataaaacgaaaatataaaacgacttccgaaaaacccaacgacgcgaaactaaaacgaaacttccgacgacaccgaaaatacattaacgccaaattaaaattataaaatcgcgtcaatacgaaaacaacgatatcctacgcgtcttcgaatcaatacgaaaaaccgcgtcgtaaaaactcactaacgatacgcgacctaaactaactccgaaaataacgaacgcaactactataacaaataaataccgccatcttcctacctatcaaacgccgaatcgttccccgaataccccgaaaaaaaatcgaaacactacaaaactcaaaaaaatacaaaaacaatcgaaacataataacgaataaaatacaaat

SEQ ID NO: 28405 - DNA, 646 bp, Artificial Sequence
  chemically treated genomic DNA (Homo sapiens) CpG-island No: 28405
attgtgcgtagacgacgatttttttcgttgataaagaatggtaacgtttttgacgtttcgatttacgttttcgttttttacggggcgcgggcgtttattatagttcgggaaggttcggtttttttttagttcgggagattaacgtcgttatttttagttgtttaggttttcgcgtcgagattttacgggtggtttagatttcgggtttttttttcgtttcgtttcgtagtttttcgatgtcgttttgtttttgtttttcgaatttcgtcgttcgtttatagtatttgattagttttcggttatagataatcgtcggtttcggatggcgttcgttttgagtatagtttgcggcgcgtatcgtttattggtttcgttttcgggtcgcgtagttaatcgttcgcgttagcgttagtttacgttatatcgttcggttaattggcgttcgtacgcgtttgacgatataatttcgttaagtttcgtttggtggtgttatttttttggtttgtgataacggtagacgcgcgaagtatcgggaatttgagtcgtgatcgcgggttttggcgtttttaagggggttaatacgttttatttttagtttcgtagaggtagcgtttcgcgattgggcggtgttcgagattatagacgt

SEQ ID NO: 28406 - DNA, 646 bp, Artificial Sequence
  chemically treated genomic DNA (Homo sapiens) CpG-island No: 28406
acgtctataatctcgaacaccgcccaatcgcgaaacgctacctctacgaaactaaaaataaaacgtattaacccccttaaaaacgccaaaacccgcgatcacgactcaaattcccgatacttcgcgcgtctaccgttatcacaaaccaaaaaaataacaccaccaaacgaaacttaacgaaattatatcgtcaaacgcgtacgaacgccaattaaccgaacgatataacgtaaactaacgctaacgcgaacgattaactacgcgacccgaaaacgaaaccaataaacgatacgcgccgcaaactatactcaaaacgaacgccatccgaaaccgacgattatctataaccgaaaactaatcaaatactataaacgaacgacgaaattcgaaaaacaaaaacaaaacgacatcgaaaaactacgaaacgaaacgaaaaaaaaacccgaaatctaaaccacccgtaaaatctcgacgcgaaaacctaaacaactaaaaataacgacgttaatctcccgaactaaaaaaaaaccgaaccttcccgaactataataaacgcccgcgccccgtaaaaaacgaaaacgtaaatcgaaacgtcaaaaacgttaccattctttatcaacgaaaaaaatcgtcgtctacgcacaat

SEQ ID NO: 28407 - DNA, 646 bp, Artificial Sequence
  chemically treated genomic DNA (Homo sapiens) CpG-island No: 28407
gcgtttgtggtttcgggtatcgtttagtcgcgggacgttgtttttgcggaattgggggtggggcgtgttgatttttttaaaggcgttagagttcgcggttacggtttaggttttcggtgtttcgcgcgtttgtcgttgttataggttagggaggtggtattattaggcgaagtttggcgagattgtgtcgttaagcgcgtacgggcgttaattggtcgggcgatgtggcgtggattggcgttggcgcgagcgattggttgcgcggttcgggggcggggttagtgggcggtgcgcgtcgtagattgtgtttaaagcgggcgttattcgggatcggcggttgtttgtggtcggaggttgattaggtattgtggacgggcggcggagttcgggagataggggtagggcggtatcggggagttgcgggacggggcggggaggaggttcgaggtttgagttattcgtgaggtttcggcgcggaggtttggatagttgggggtggcggcgttggtttttcgaattggagggaggtcgggttttttcgggttgtggtgggcgttcgcgtttcgtggaaggcggaggcgtgagtcggggcgttagagacgttgttattttttgttagcggaaaagatcgtcgtttgcgtatagt

SEQ ID NO: 28408 - DNA, 646 bp, Artificial Sequence
  chemically treated genomic DNA (Homo sapiens) CpG-island No: 28408
actatacgcaaacgacgatcttttccgctaacaaaaaataacaacgtctctaacgccccgactcacgcctccgccttccacgaaacgcgaacgcccaccacaacccgaaaaaacccgacctccctccaattcgaaaaaccaacgccgccacccccaactatccaaacctccgcgccgaaacctcacgaataactcaaacctcgaacctcctccccgccccgtcccgcaactccccgataccgccctacccctatctcccgaactccgccgcccgtccacaatacctaatcaacctccgaccacaaacaaccgccgatcccgaataacgcccgctttaaacacaatctacgacgcgcaccgcccactaaccccgcccccgaaccgcgcaaccaatcgctcgcgccaacgccaatccacgccacatcgcccgaccaattaacgcccgtacgcgcttaacgacacaatctcgccaaacttcgcctaataataccacctccctaacctataacaacgacaaacgcgcgaaacaccgaaaacctaaaccgtaaccgcgaactctaacgcctttaaaaaaatcaacacgccccacccccaattccgcaaaaacaacgtcccgcgactaaacgatacccgaaaccacaaacgc

SEQ ID NO: 28409 - DNA, 739 bp, Artificial Sequence
  chemically treated genomic DNA (Homo sapiens) CpG-island No: 28409
gatttcggcgtttcgttttatatttcgtttatttacgcgttagttagcgtcgtatagtttcgttatcgtttttcggagttttttttcggttcgtatttttatcgtttttattacggtaggtagatcgtcgtttgagtcgcgttgttatattgcggttcgttaatttttatttattatacgtttagcgtttttacgtgagtatatacgtcgcgtcgttatatagtgttatgtatatacgtacgttagcgtcgtagcgcgtttcgggtttagtatagtcggtgtttatttttagtttttacgggtatcgtttcgttttttcgtgtcggtttatcgttttcgcgttatttttaatcggagcggcgcgatatcgttacgtcgttatattttcgaattatcggggttaagacgtttattagtatataaaagtcgtatatacgatatttaataattttcgtattatattttttttttcgatatttttttcgtaacgtttagatttttagaagatcgtcgattttagacgtatattgacgcgtttcggtagtattcgttattttcgcgtcgtttttattttatttttcgtattagttattttttcgattattattcgtttttatcgttcggtttgcgtttttttttgcgggagtcgattcggttttttaatatatttttagtttttcggtagggtcgttagacgattcgggattgagttatttggcggtcgtagtcgtacgatcgt

SEQ ID NO: 28410 - DNA, 739 bp, Artificial Sequence
  chemically treated genomic DNA (Homo sapiens) CpG-island No: 28410
acgatcgtacgactacgaccgccaaataactcaatcccgaatcgtctaacgaccctaccgaaaaactaaaaatatattaaaaaaccgaatcgactcccgcaaaaaaaaacgcaaaccgaacgataaaaacgaataataatcgaaaaaataactaatacgaaaaataaaataaaaacgacgcgaaaataacgaatactaccgaaacgcgtcaatatacgtctaaaatcgacgatcttctaaaaatctaaacgttacgaaaaaaatatcgaaaaaaaaaatataatacgaaaattattaaatatcgtatatacgacttttatatactaataaacgtcttaaccccgataattcgaaaatataacgacgtaacgatatcgcgccgctccgattaaaaataacgcgaaaacgataaaccgacacgaaaaaacgaaacgatacccgtaaaaactaaaaataaacaccgactatactaaacccgaaacgcgctacgacgctaacgtacgtatatacataacactatataacgacgcgacgtatatactcacgtaaaaacgctaaacgtataataaataaaaattaacgaaccgcaatataacaacgcgactcaaacgacgatctacctaccgtaataaaaacgataaaaatacgaaccgaaaaaaaactccgaaaaacgataacgaaactatacgacgctaactaacgcgtaaataaacgaaatataaaacgaaacgccgaaatc

SEQ ID NO: 28411 - DNA, 739 bp, Artificial Sequence
  chemically treated genomic DNA (Homo sapiens) CpG-island No: 28411
gcgatcgtgcggttacgatcgttagatgatttagtttcgggtcgtttagcgattttgtcgggagattaggggtgtgttggggggtcgggtcggttttcgtaggggggggcgtaggtcggacggtgggggcggatagtggtcgggggggtggttggtgcggagggtgaggtgggggcggcgcgggggtgacgggtgttgtcggagcgcgttagtgtgcgtttggggtcggcggttttttgggggtttgggcgttgcggaggaggtgtcgggggggggggtgtggtgcgggggttgttgggtgtcgtgtgtgcggtttttgtgtgttagtgggcgttttggtttcggtggttcgggggtgtggcggcgtggcggtgtcgcgtcgtttcggttgggggtggcgcggggacggtgggtcggtacggggaggcggggcggtgttcgtgggagttgagggtgggtatcggttgtgttgggttcgaggcgcgttgcggcgttagcgtgcgtgtgtgtatggtattgtgtggcggcgcggcgtgtgtgtttacgtgggagcgttgagcgtgtggtgagtgagggttggcgggtcgtagtgtggtagcgcggtttaagcggcggtttgtttgtcgtggtggaggcggtgggggtgcgggtcgagggggggtttcgggggacggtggcggggttgtgcggcgttggttggcgcgtgggtgggcggagtgtggagcggggcgtcggggtt

SEQ ID NO: 28412 - DNA, 739 bp, Artificial Sequence
  chemically treated genomic DNA (Homo sapiens) CpG-island No: 28412
aaccccgacgccccgctccacactccgcccacccacgcgccaaccaacgccgcacaaccccgccaccgtcccccgaaaccccccctcgacccgcacccccaccgcctccaccacgacaaacaaaccgccgcttaaaccgcgctaccacactacgacccgccaaccctcactcaccacacgctcaacgctcccacgtaaacacacacgccgcgccgccacacaataccatacacacacgcacgctaacgccgcaacgcgcctcgaacccaacacaaccgatacccaccctcaactcccacgaacaccgccccgcctccccgtaccgacccaccgtccccgcgccacccccaaccgaaacgacgcgacaccgccacgccgccacacccccgaaccaccgaaaccaaaacgcccactaacacacaaaaaccgcacacacgacacccaacaacccccgcaccacacccccccccccgacacctcctccgcaacgcccaaacccccaaaaaaccgccgaccccaaacgcacactaacgcgctccgacaacacccgtcacccccgcgccgcccccacctcaccctccgcaccaaccacccccccgaccactatccgcccccaccgtccgacctacgcccccccctacgaaaaccgacccgaccccccaacacacccctaatctcccgacaaaatcgctaaacgacccgaaactaaatcatctaacgatcgtaaccgcacgatcgc

SEQ ID NO: 28413 - DNA, 684 bp, Artificial Sequence
  chemically treated genomic DNA (Homo sapiens) CpG-island No: 28413
gaaaaagagtgcgttaaacgcggtgatgattattaggagatttttgtttagtaggttcgggaaattatggagcgtcgtgttgcgggtttgaaattatcggtatgggtcgttgtagtttttgaggtcggagtgaaaaaattaaacgaggaggagtaagatggcgtacgagttgcgtaatttttcgtatattgttagtatggtttttaatgagtcgttgatgtttgaattcgtttatgcgcgggtttttttttgcgcgttggttggttagttgggtattattcggttgatagatatcgtttttggtattacgtttgatgtcggataaatagtcgaatcgttggcgttgtttggtgaggatgatgatatggattttcgtttattacgtattattagggtaaatggtatcgcggtttgtcggtttcgtacgttggttagtaaaattcgtgcgttttagttttatttcgatgacggttataacggattatgtcgtttgttagtaatcggattcgcgttgacgatttttgattgtcgcggggagggtcggttgatgttattattcgtgttaaaatatggttgtcgcgacgcgcgatattagtgtgagggttaagtaacggcggtaggtattgtgtaaggggttttgacggggttataggttatttttagtttttgcgtttagggtataat

SEQ ID NO: 28414 - DNA, 684 bp, Artificial Sequence
  chemically treated genomic DNA (Homo sapiens) CpG-island No: 28414
attataccctaaacgcaaaaactaaaaataacctataaccccgtcaaaaccccttacacaatacctaccgccgttacttaaccctcacactaatatcgcgcgtcgcgacaaccatattttaacacgaataataacatcaaccgaccctccccgcgacaatcaaaaatcgtcaacgcgaatccgattactaacaaacgacataatccgttataaccgtcatcgaaataaaactaaaacgcacgaattttactaaccaacgtacgaaaccgacaaaccgcgataccatttaccctaataatacgtaataaacgaaaatccatatcatcatcctcaccaaacaacgccaacgattcgactatttatccgacatcaaacgtaataccaaaaacgatatctatcaaccgaataatacccaactaaccaaccaacgcgcaaaaaaaaacccgcgcataaacgaattcaaacatcaacgactcattaaaaaccatactaacaatatacgaaaaattacgcaactcgtacgccatcttactcctcctcgtttaattttttcactccgacctcaaaaactacaacgacccataccgataatttcaaacccgcaacacgacgctccataatttcccgaacctactaaacaaaaatctcctaataatcatcaccgcgtttaacgcactctttttc

SEQ ID NO: 28415 - DNA, 684 bp, Artificial Sequence
  chemically treated genomic DNA (Homo sapiens) CpG-island No: 28415
attatattttaggcgtaaagattaggagtaatttgtagtttcgttaaggttttttgtataatgtttatcgtcgttgtttggtttttatattgatatcgcgcgtcgcggtagttatgttttggtacggatagtggtattagtcgatttttttcgcgataattaaagatcgttaacgcgggttcgattgttggtaggcgatatgattcgttgtaatcgttatcggaataaggttgaagcgtacgggttttattgattagcgtgcggaatcggtaagtcgcgatattatttgttttgatagtgcgtgatggacggggatttatgttattatttttattaaatagcgttagcggttcggttatttgttcggtattaagcgtgatgttagagacggtatttgttagtcgggtgatgtttaattggttagttagcgcgtaaaagaaaattcgcgtataggcgggtttaagtattagcggtttattaaaggttatattggtaatatgcggaagattacgtagttcgtgcgttattttgttttttttcgtttgatttttttatttcggttttaaaagttgtagcggtttatgtcggtggttttagattcgtagtacgacgttttatggtttttcggatttgttgggtaaaaattttttgataattattatcgcgtttggcgtattttttttt

SEQ ID NO: 28416 - DNA, 684 bp, Artificial Sequence
  chemically treated genomic DNA (Homo sapiens) CpG-island No: 28416
aaaaaaaaatacgccaaacgcgataataattatcaaaaaatttttacccaacaaatccgaaaaaccataaaacgtcgtactacgaatctaaaaccaccgacataaaccgctacaacttttaaaaccgaaataaaaaaatcaaacgaaaaaaaacaaaataacgcacgaactacgtaatcttccgcatattaccaatataacctttaataaaccgctaatacttaaacccgcctatacgcgaattttcttttacgcgctaactaaccaattaaacatcacccgactaacaaataccgtctctaacatcacgcttaataccgaacaaataaccgaaccgctaacgctatttaataaaaataataacataaatccccgtccatcacgcactatcaaaacaaataatatcgcgacttaccgattccgcacgctaatcaataaaacccgtacgcttcaaccttattccgataacgattacaacgaatcatatcgcctaccaacaatcgaacccgcgttaacgatctttaattatcgcgaaaaaaatcgactaataccactatccgtaccaaaacataactaccgcgacgcgcgatatcaatataaaaaccaaacaacgacgataaacattatacaaaaaaccttaacgaaactacaaattactcctaatctttacgcctaaaatataat

SEQ ID NO: 28417 - DNA, 931 bp, Artificial Sequence
  chemically treated genomic DNA (Homo sapiens) CpG-island No: 28417
  unsure (580)
aggcgatttgtcggggattttttatttcgtagttttttgggagtcgtaaagagagttaggaaaggtcgtgtagtagcgtcgtagtcgggttggtaacggtagaggaatcggtagtgaggtttttttttatattttgttagtttaattgtcgtcgtcgtcgtcgtcgttatcgcgggttcgggtattggttcgagggcggcgtagggcggggcgggggttgttgggatgtaggtttgagaggttggcgcgcgcgatacggggcgggtttcggcggcggcgcgcgcgtgttttgtcggtttgtgcggcgttgcggcgacgaggttatggtagtggggagggggcgaatgtagtgttgcgcggggtaggcgggaggtgatcgagagaggtagggatgggggcgtcggagtggagcggttgcggcggtttgggttgttgattgcgtatttggaatagtagtaggcggcggcgcggaacgttaggtaggtgagtgcggcggtcgggattcggatgcggcgcggttgaggggcggttgggtcgcggcgtcggttgcggtttttcgggcgtgttggcggtgcgtttntagttatcgttatttgcggcgttggcgatttttgtggttgtatcgcgttttttgttagtttggaggaaaattcgtatcggtcggtgggggcgtttggtttggttgcggttcgttttgggttttttaaggtgagtggcgtttttcggtttttgggcggtagagacgttgtcgggcgtttcgggttattgtcgttttgggtttcgtttttgaggggcgtttttgtggagagacggcgtattggtttcgcgtttatgcggatattttcggaatttttcgatttttaggtgtttttttgcgtagaagtgtattttagaggcgtggatttagggttattaggttatggatatgttt

SEQ ID NO: 28418 - DNA, 931 bp, Artificial Sequence
  chemically treated genomic DNA (Homo sapiens) CpG-island No: 28418
  unsure (352)
aaacatatccataacctaataaccctaaatccacgcctctaaaatacacttctacgcaaaaaaacacctaaaaatcgaaaaattccgaaaatatccgcataaacgcgaaaccaatacgccgtctctccacaaaaacgcccctcaaaaacgaaacccaaaacgacaataacccgaaacgcccgacaacgtctctaccgcccaaaaaccgaaaaacgccactcaccttaaaaaacccaaaacgaaccgcaaccaaaccaaacgcccccaccgaccgatacgaattttcctccaaactaacaaaaaacgcgatacaaccacaaaaatcgccaacgccgcaaataacgataactanaaacgcaccgccaacacgcccgaaaaaccgcaaccgacgccgcgacccaaccgcccctcaaccgcgccgcatccgaatcccgaccgccgcactcacctacctaacgttccgcgccgccgcctactactattccaaatacgcaatcaacaacccaaaccgccgcaaccgctccactccgacgcccccatccctacctctctcgatcacctcccgcctaccccgcgcaacactacattcgccccctccccactaccataacctcgtcgccgcaacgccgcacaaaccgacaaaacacgcgcgcgccgccgccgaaacccgccccgtatcgcgcgcgccaacctctcaaacctacatcccaacaacccccgccccgccctacgccgccctcgaaccaatacccgaacccgcgataacgacgacgacgacgacgacaattaaactaacaaaatataaaaaaaaacctcactaccgattcctctaccgttaccaacccgactacgacgctactacacgacctttcctaactctctttacgactcccaaaaaactacgaaataaaaaatccccgacaaatcgcct

SEQ ID NO: 28419 - DNA, 931 bp, Artificial Sequence
  chemically treated genomic DNA (Homo sapiens) CpG-island No: 28419
  unsure (352)
aaatatgtttataatttaataattttgggtttacgtttttgaaatatatttttgcgtaaaaaggtatttgagggtcgggaagtttcggaggtgttcgtatagacgcggggttagtacgtcgtttttttatagaaacgttttttaggaacgggatttaaagcgatagtgattcgggacgttcggtagcgtttttgtcgtttaggggtcggggggcgttatttattttggagagtttagggcgggtcgtaattaagttagacgtttttatcggtcggtacgggtttttttttaagttggtaggaagcgcggtgtaattataagagtcgttagcgtcgtaggtagcgatagttangaacgtatcgttagtacgttcgggggatcgtagtcggcgtcgcgatttagtcgttttttagtcgcgtcgtattcgggtttcggtcgtcgtatttatttgtttggcgtttcgcgtcgtcgtttgttattattttaagtgcgtagttagtagtttaggtcgtcgtaatcgttttatttcggcgtttttatttttgtttttttcgattatttttcgtttgtttcgcgtagtattatattcgttttttttttattgttatggtttcgtcgtcgtagcgtcgtataggtcgatagagtacgcgcgcgtcgtcgtcgagattcgtttcgtgtcgcgcgcgttagttttttaggtttgtattttagtagttttcgtttcgttttgcgtcgttttcgggttaatgttcgggttcgcggtggcggcggcggcggcggcggtagttgggttggtagggtgtggggagaggttttattgtcgatttttttatcgttgttagttcggttgcgacgttgttgtacggttttttttaattttttttgcgatttttagaggattgcggaatagggaattttcggtaagtcgttt

SEQ ID NO: 28420 - DNA, 931 bp, Artificial Sequence
  chemically treated genomic DNA (Homo sapiens) CpG-island No: 28420
  unsure (580)
aaacgacttaccgaaaattccctattccgcaatcctctaaaaatcgcaaaaaaaattaaaaaaaaccgtacaacaacgtcgcaaccgaactaacaacgataaaaaaatcgacaataaaacctctccccacaccctaccaacccaactaccgccgccgccgccgccgccaccgcgaacccgaacattaacccgaaaacgacgcaaaacgaaacgaaaactactaaaatacaaacctaaaaaactaacgcgcgcgacacgaaacgaatctcgacgacgacgcgcgcgtactctatcgacctatacgacgctacgacgacgaaaccataacaataaaaaaaaaacgaatataatactacgcgaaacaaacgaaaaataatcgaaaaaaacaaaaataaaaacgccgaaataaaacgattacgacgacctaaactactaactacgcacttaaaataataacaaacgacgacgcgaaacgccaaacaaataaatacgacgaccgaaacccgaatacgacgcgactaaaaaacgactaaatcgcgacgccgactacgatcccccgaacgtactaacgatacgttcntaactatcgctacctacgacgctaacgactcttataattacaccgcgcttcctaccaacttaaaaaaaaacccgtaccgaccgataaaaacgtctaacttaattacgacccgccctaaactctccaaaataaataacgccccccgacccctaaacgacaaaaacgctaccgaacgtcccgaatcactatcgctttaaatcccgttcctaaaaaacgtttctataaaaaaacgacgtactaaccccgcgtctatacgaacacctccgaaacttcccgaccctcaaatacctttttacgcaaaaatatatttcaaaaacgtaaacccaaaattattaaattataaacatattt

SEQ ID NO: 28421 - DNA, 553 bp, Artificial Sequence
  chemically treated genomic DNA (Homo sapiens) CpG-island No: 28421
  unsure (350)
cggttcggtcgtttcgtacgggcgtatatacgcgtgtagagtattgcgttgtttttcggcgtagtgaattcgtataatggtttgggagttcgtcggtcgtattttcgttttcgtcgtatttttattcgtattcgtacgtatattattttgtatcgggtcgtcgtatcgtcgtttgttttatcgtattacggggtcgtcgcgtcgtcgtcgggttagtttagttttgttagtttagttattcgtcgttttcggcgtcggtttattagtgcgtcgggtttgtagttcgtttgtgttcggtagttcgagttcgttatgatgtattgtttttattgggattacgatagtaagantcggcgttgattcgcgtttcgatttttgagagtttatcgtatgtcggtgtagacggatgcgaggatgtagggacgcgcgacgtcggtttcggtcgtagtcgacgacgtcgtcgttagtttgattttatattttttgggttcgtttttggagttagcgtttagggtttttttgtgttttttcgtttttttaagtttttgtcgtt

SEQ ID NO: 28422 - DNA, 553 bp, Artificial Sequence
  chemically treated genomic DNA (Homo sapiens) CpG-island No: 28422
  unsure (204)
aacgacaaaaacttaaaaaaacgaaaaaacacaaaaaaaccctaaacgctaactccaaaaacgaacccaaaaaatataaaatcaaactaacgacgacgtcgtcgactacgaccgaaaccgacgtcgcgcgtccctacatcctcgcatccgtctacaccgacatacgataaactctcaaaaatcgaaacgcgaatcaacgccgantcttactatcgtaatcccaataaaaacaatacatcataacgaactcgaactaccgaacacaaacgaactacaaacccgacgcactaataaaccgacgccgaaaacgacgaataactaaactaacaaaactaaactaacccgacgacgacgcgacgaccccgtaatacgataaaacaaacgacgatacgacgacccgatacaaaataatatacgtacgaatacgaataaaaatacgacgaaaacgaaaatacgaccgacgaactcccaaaccattatacgaattcactacgccgaaaaacaacgcaatactctacacgcgtatatacgcccgtacgaaacgaccgaaccg

SEQ ID NO: 28423 - DNA, 553 bp, Artificial Sequence
  chemically treated genomic DNA (Homo sapiens) CpG-island No: 28423
  unsure (204)
agcgataggagtttaggaaagcgaaaaagtatagagggattttgggcgttggttttagaggcgggtttagagggtgtgaggttaggttggcggcggcgtcgtcggttgcgatcggggtcggcgtcgcgcgtttttgtattttcgtattcgtttgtatcggtatgcggtgggtttttagagatcgaggcgcgaattagcgtcggnttttgttgtcgtggttttagtaagagtaatgtattatggcgagttcgggttgtcgggtataagcgaattgtaggttcggcgtattggtgggtcggcgtcgggggcggcggatggttgggttggtagggttgagttggttcggcggcggcgcggcggtttcgtggtgcggtggggtaggcggcggtgcggcggttcgatgtagaatggtgtgcgtgcggatgcgggtgggggtgcggcggaggcgggggtgcggtcggcgggtttttaggttattgtacgagtttattacgtcggggggtagcgtaatgttttgtacgcgtgtgtacgttcgtacgaggcggtcgggtcg

SEQ ID NO: 28424 - DNA, 553 bp, Artificial Sequence
  chemically treated genomic DNA (Homo sapiens) CpG-island No: 28424
  unsure (350)
cgacccgaccgcctcgtacgaacgtacacacgcgtacaaaacattacgctaccccccgacgtaataaactcgtacaataacctaaaaacccgccgaccgcacccccgcctccgccgcacccccacccgcatccgcacgcacaccattctacatcgaaccgccgcaccgccgcctaccccaccgcaccacgaaaccgccgcgccgccgccgaaccaactcaaccctaccaacccaaccatccgccgcccccgacgccgacccaccaatacgccgaacctacaattcgcttatacccgacaacccgaactcgccataatacattactcttactaaaaccacgacaacaaaanccgacgctaattcgcgcctcgatctctaaaaacccaccgcataccgatacaaacgaatacgaaaatacaaaaacgcgcgacgccgaccccgatcgcaaccgacgacgccgccgccaacctaacctcacaccctctaaacccgcctctaaaaccaacgcccaaaatccctctatactttttcgctttcctaaactcctatcgct

SEQ ID NO: 28425 - DNA, 559 bp, Artificial Sequence
  chemically treated genomic DNA (Homo sapiens) CpG-island No: 28425
acggcgtacggtatttatagtgataggtttttagtacggcgtacggtatttatagtgataggtttttagtacggcgtacggtatttagagtgttaggtttttagtacggcgtacggtatttatagtgttaggtttttagtacggcgtacggtatttatagtgttaggtttttagtacggcgtacggtatttatagtgttaggtttttagtacggcgtacggtatttatagtgataggtttttagtacggcgtacggtatttatagtgataggtttttagtacggcgtacggtatttatagtgttaggtttttagtacggcgtacggtttttatagtgttaggtttttagtacggcgtacggtatttatagtgttaggtttttagtacggcgtacggtttttatagtgataggtttttagtacggcgtacggtttttatagtgataggtttttagtacggcgtacggtttttatagtgataggtttttagtacggcgttcggtttttatagtgataggtttttagtacggcgtacggtatttatagtgataggtttttag

SEQ ID NO: 28426 - DNA, 559 bp, Artificial Sequence
  chemically treated genomic DNA (Homo sapiens) CpG-island No: 28426
ctaaaaacctatcactataaataccgtacgccgtactaaaaacctatcactataaaaaccgaacgccgtactaaaaacctatcactataaaaaccgtacgccgtactaaaaacctatcactataaaaaccgtacgccgtactaaaaacctatcactataaaaaccgtacgccgtactaaaaacctaacactataaataccgtacgccgtactaaaaacctaacactataaaaaccgtacgccgtactaaaaacctaacactataaataccgtacgccgtactaaaaacctatcactataaataccgtacgccgtactaaaaacctatcactataaataccgtacgccgtactaaaaacctaacactataaataccgtacgccgtactaaaaacctaacactataaataccgtacgccgtactaaaaacctaacactataaataccgtacgccgtactaaaaacctaacactctaaataccgtacgccgtactaaaaacctatcactataaataccgtacgccgtactaaaaacctatcactataaataccgtacgccgt

SEQ ID NO: 28427 - DNA, 559 bp, Artificial Sequence
  chemically treated genomic DNA (Homo sapiens) CpG-island No: 28427
ttgggagtttgttattgtgagtgtcgtgcgtcgtgttgggagtttgttattgtgagggtcgagcgtcgtgttgggagtttgttattgtgagggtcgtgcgtcgtgttgggagtttgttattgtgagggtcgtgcgtcgtgttgggagtttgttattgtgagggtcgtgcgtcgtgttgggagtttggtattgtgagtgtcgtgcgtcgtgttgggagtttggtattgtgagggtcgtgcgtcgtgttgggagtttggtattgtgagtgtcgtgcgtcgtgttgggagtttgttattgtgagtgtcgtgcgtcgtgttgggagtttgttattgtgagtgtcgtgcgtcgtgttgggagtttggtattgtgagtgtcgtgcgtcgtgttgggagtttggtattgtgagtgtcgtgcgtcgtgttgggagtttggtattgtgagtgtcgtgcgtcgtgttgggagtttggtattttgagtgtcgtgcgtcgtgttgggagtttgttattgtgagtgtcgtgcgtcgtgttgggagtttgttattgtgagtgtcgtgcgtcgt

SEQ ID NO: 28428 - DNA, 559 bp, Artificial Sequence
  chemically treated genomic DNA (Homo sapiens) CpG-island No: 28428
acgacgcacgacactcacaataacaaactcccaacacgacgcacgacactcacaataacaaactcccaacacgacgcacgacactcaaaataccaaactcccaacacgacgcacgacactcacaataccaaactcccaacacgacgcacgacactcacaataccaaactcccaacacgacgcacgacactcacaataccaaactcccaacacgacgcacgacactcacaataacaaactcccaacacgacgcacgacactcacaataacaaactcccaacacgacgcacgacactcacaataccaaactcccaacacgacgcacgaccctcacaataccaaactcccaacacgacgcacgacactcacaataccaaactcccaacacgacgcacgaccctcacaataacaaactcccaacacgacgcacgaccctcacaataacaaactcccaacacgacgcacgaccctcacaataacaaactcccaacacgacgctcgaccctcacaataacaaactcccaacacgacgcacgacactcacaataacaaactcccaa

SEQ ID NO: 28429 - DNA, 1290 bp, Artificial Sequence
  chemically treated genomic DNA (Homo sapiens) CpG-island No: 28429
gcggagaggaggcgcggggttgggtttatatcggcggcggcggcggttttatttttttcgcgtttatttttttattatgcggggtcgcggtttatggtgagttttagtagttagtattatcggttggagacgaagaagaagaagaagaggaggcggcgagcgcgggggaaggcgaaaaagaaaaagaaagaaggggagagggttttcggtagtattaggatcgacgcgcgtattagtttcggagtttagttcgcgcgcgtttgtggggtcgtttgatttcggggttaaagcggcggcggcggtagcgggcgcggcggttcgggttgcgtatcggcgcgggattaaggagcgcgggatgtatttcggtgtagcggtcgtcggcgaggacgatttttttttgtataagagtttgagcgtttttatttttaagcgtttggaagcggtttttcgttttacgttttcgggtatggatttgtttttggcgtcgtcgtttcgggaacgttcggcgttttttttttcgtcgtttttgggttgtttcgagtcggttgatttcgagggggtagggttgttgttgtcgtcgtttggaggaggcggcggcggtagcgcgggaagtggcggcggcggcggcggcggggtggggtatttcgggttgttagtaggtttagtcggcgttgggggcgattatagtataagtagtttgtcggtcggggtcgttttttgttttaagtacggcgaaagcgcgagtcggggttcggtggtcgagagtagcggcggcgagtagagtttcgacgacgatagcgacggtcgttgcgagttcgtgttgcgggtcggagtagtcgattagcgggttttttcgggagcgggaggtggtggcgcgaaggtagtcgagggttgttttaatgtttatttttacggcggcgttagcgttttttcggggggtttgggcggcggcggcggcgggggtagtagtagcggtagtagtggcggcggtggcggtagcggtagcggtagcggcggtagtagtagtagtagtagtagtagtagtaagaaatttaaagagtaaaaggcgttgcggtttaatattaatgttcgagagcgtcggcggatgtacgatttgaacgacgcgttggacgagttgcgcgcggtgattttttacgcgtatagtttttcggtgcgaaagttttttaagatcgttacgatgttgttcgttaagaaatatatttttatgtaggcgtaggttttggaggagatgcggcgtatagttgtttattttaattagggttaggttat

SEQ ID NO: 28430 - DNA, 1290 bp, Artificial Sequence
  chemically treated genomic DNA (Homo sapiens) CpG-island No: 28430
ataacctaaccctaattaaaataaacaactatacgccgcatctcctccaaaacctacgcctacataaaaatatatttcttaacgaacaacatcgtaacgatcttaaaaaactttcgcaccgaaaaactatacgcgtaaaaaatcaccgcgcgcaactcgtccaacgcgtcgttcaaatcgtacatccgccgacgctctcgaacattaatattaaaccgcaacgccttttactctttaaatttcttactactactactactactactactactaccgccgctaccgctaccgctaccgccaccgccgccactactaccgctactactacccccgccgccgccgccgcccaaaccccccgaaaaaacgctaacgccgccgtaaaaataaacattaaaacaaccctcgactaccttcgcgccaccacctcccgctcccgaaaaaacccgctaatcgactactccgacccgcaacacgaactcgcaacgaccgtcgctatcgtcgtcgaaactctactcgccgccgctactctcgaccaccgaaccccgactcgcgctttcgccgtacttaaaacaaaaaacgaccccgaccgacaaactacttatactataatcgcccccaacgccgactaaacctactaacaacccgaaataccccaccccgccgccgccgccgccgccacttcccgcgctaccgccgccgcctcctccaaacgacgacaacaacaaccctaccccctcgaaatcaaccgactcgaaacaacccaaaaacgacgaaaaaaaaaacgccgaacgttcccgaaacgacgacgccaaaaacaaatccatacccgaaaacgtaaaacgaaaaaccgcttccaaacgcttaaaaataaaaacgctcaaactcttatacaaaaaaaaatcgtcctcgccgacgaccgctacaccgaaatacatcccgcgctccttaatcccgcgccgatacgcaacccgaaccgccgcgcccgctaccgccgccgccgctttaaccccgaaatcaaacgaccccacaaacgcgcgcgaactaaactccgaaactaatacgcgcgtcgatcctaatactaccgaaaaccctctccccttctttctttttctttttcgccttcccccgcgctcgccgcctcctcttcttcttcttcttcgtctccaaccgataatactaactactaaaactcaccataaaccgcgaccccgcataataaaaaaataaacgcgaaaaaaataaaaccgccgccgccgccgatataaacccaaccccgcgcctcctctccgc

SEQ ID NO: 28431 - DNA, 1290 bp, Artificial Sequence
  chemically treated genomic DNA (Homo sapiens) CpG-island No: 28431
atggtttggttttggttgaggtaggtaattatgcgtcgtattttttttagggtttgcgtttgtatgaggatgtattttttggcgagtagtatcgtggcgattttggagagttttcgtatcgaggggttgtgcgcgtaggggattatcgcgcgtagttcgtttagcgcgtcgtttaggtcgtgtattcgtcggcgttttcgggtattgatgttaagtcgtagcgttttttgttttttggattttttgttgttgttgttgttgttgttgttgttgtcgtcgttgtcgttatcgttatcgttatcgtcgttattgttatcgttgttgttattttcgtcgtcgtcgtcgtttaggtttttcggggggacgttggcgtcgtcgtggaggtgggtattggagtagttttcggttgttttcgcgttattatttttcgttttcggggaggttcgttggtcggttatttcggttcgtagtacgagttcgtagcgatcgtcgttgtcgtcgtcggggttttgttcgtcgtcgttgttttcggttatcgagtttcggttcgcgttttcgtcgtatttgaggtaaagggcggtttcggtcggtaggttgtttatgttatggtcgtttttaacgtcggttgaatttattagtagttcggggtattttatttcgtcgtcgtcgtcgtcgttatttttcgcgttgtcgtcgtcgttttttttaggcggcggtaatagtagttttgttttttcggggttagtcggttcgaagtagtttaggggcgacgaggaggaggacgtcgggcgttttcgaggcggcggcgttagggataggtttatgttcgggggcgtggagcggaaagtcgtttttaagcgtttggaggtggaggcgtttaggtttttgtgtaggaagaggtcgttttcgtcggcggtcgttgtatcgaggtgtatttcgcgttttttggtttcgcgtcggtgcgtagttcgggtcgtcgcgttcgttgtcgtcgtcgtcgttttggtttcggagttaggcggttttatagacgcgcgcgagttgggtttcggagttggtgcgcgcgtcggttttggtgttgtcgggagttttttttttttttttttttttttttttcgttttttttcgcgttcgtcgtttttttttttttttttttttcgtttttagtcgatggtgttggttgttggggtttattatgggtcgcggtttcgtatggtgggagggtgggcgcggagggagtggagtcgtcgtcgtcgtcgatatgagtttagtttcgcgtttttttttcgt

SEQ ID NO: 28432 - DNA, 1290 bp, Artificial Sequence
  chemically treated genomic DNA (Homo sapiens) CpG-island No: 28432
acgaaaaaaaaacgcgaaactaaactcatatcgacgacgacgacgactccactccctccgcgcccaccctcccaccatacgaaaccgcgacccataataaaccccaacaaccaacaccatcgactaaaaacgaaaaaaaaaaaaaaaaaaaaacgacgaacgcgaaaaaaaacgaaaaaaaaaaaaaaaaaaaaaaaaaaaactcccgacaacaccaaaaccgacgcgcgcaccaactccgaaacccaactcgcgcgcgtctataaaaccgcctaactccgaaaccaaaacgacgacgacgacaacgaacgcgacgacccgaactacgcaccgacgcgaaaccaaaaaacgcgaaatacacctcgatacaacgaccgccgacgaaaacgacctcttcctacacaaaaacctaaacgcctccacctccaaacgcttaaaaacgactttccgctccacgcccccgaacataaacctatccctaacgccgccgcctcgaaaacgcccgacgtcctcctcctcgtcgcccctaaactacttcgaaccgactaaccccgaaaaaacaaaactactattaccgccgcctaaaaaaaacgacgacgacaacgcgaaaaataacgacgacgacgacgacgaaataaaataccccgaactactaataaattcaaccgacgttaaaaacgaccataacataaacaacctaccgaccgaaaccgccctttacctcaaatacgacgaaaacgcgaaccgaaactcgataaccgaaaacaacgacgacgaacaaaaccccgacgacgacaacgacgatcgctacgaactcgtactacgaaccgaaataaccgaccaacgaacctccccgaaaacgaaaaataataacgcgaaaacaaccgaaaactactccaatacccacctccacgacgacgccaacgtccccccgaaaaacctaaacgacgacgacgacgaaaataacaacaacgataacaataacgacgataacgataacgataacgacaacgacgacaacaacaacaacaacaacaacaacaacaaaaaatccaaaaaacaaaaaacgctacgacttaacatcaatacccgaaaacgccgacgaatacacgacctaaacgacgcgctaaacgaactacgcgcgataatcccctacgcgcacaacccctcgatacgaaaactctccaaaatcgccacgatactactcgccaaaaaatacatcctcatacaaacgcaaaccctaaaaaaaatacgacgcataattacctacctcaaccaaaaccaaaccat

SEQ ID NO: 28433 - DNA, 651 bp, Artificial Sequence
  chemically treated genomic DNA (Homo sapiens) CpG-island No: 28433
aggtttcgcggttcgggggcgttcgtagtgtcgttggatcggcggtagcgttggttacgtcgtgggatgggattggttcggaacgcgggtggcggttcggtttcggagattcgcgtagtagtcggagtattttcgtgtttcgtttattatttttttttttttcgcgttcggcggagggtttcggcgcgcggggtaggtttggagcgtcgtgagtaggtcggatgcgggatacgttagtgattattagagttagattcggagcgcgttgtcggcggtgacggttaggttgggtttttgtttttgggtcgagttgtcgagttttttcggggatttgaaggtgaagggagaggcgtcggtcggggtcgcgggtcgagttaagggcgagtttcgtattcggcgttttttaggtggggcgaagttcgagggttagaggttggcgaaggattttcgtttagtttgaaatttagttgcgtttaacgtcgggggaggcggagcgaggggaattcgggcgtcgggaatttcggaagtgggagggatgggtttttgcgcggggagacgtcgggtttggcgaatatttttaagaatcggtcggtggttttattttcgaaaattttttcgtgtttagcgatttttatatttagtgtttttttt

SEQ ID NO: 28434 - DNA, 651 bp, Artificial Sequence
  chemically treated genomic DNA (Homo sapiens) CpG-island No: 28434
aaaaaaaacactaaatataaaaatcgctaaacacgaaaaaattttcgaaaataaaaccaccgaccgattcttaaaaatattcgccaaacccgacgtctccccgcgcaaaaacccatccctcccacttccgaaattcccgacgcccgaattcccctcgctccgcctcccccgacgttaaacgcaactaaatttcaaactaaacgaaaatccttcgccaacctctaaccctcgaacttcgccccacctaaaaaacgccgaatacgaaactcgcccttaactcgacccgcgaccccgaccgacgcctctcccttcaccttcaaatccccgaaaaaactcgacaactcgacccaaaaacaaaaacccaacctaaccgtcaccgccgacaacgcgctccgaatctaactctaataatcactaacgtatcccgcatccgacctactcacgacgctccaaacctaccccgcgcgccgaaaccctccgccgaacgcgaaaaaaaaaaaaataataaacgaaacacgaaaatactccgactactacgcgaatctccgaaaccgaaccgccacccgcgttccgaaccaatcccatcccacgacgtaaccaacgctaccgccgatccaacgacactacgaacgcccccgaaccgcgaaacct

SEQ ID NO: 28435 - DNA, 651 bp, Artificial Sequence
  chemically treated genomic DNA (Homo sapiens) CpG-island No: 28435
aagggaaatattaaatatgagaatcgttaaatacgaaagagttttcggaggtagagttatcgatcggtttttgaggatgttcgttaagttcggcgttttttcgcgtagaagtttattttttttattttcggggttttcggcgttcgggtttttttcgtttcgtttttttcggcgttgggcgtagttgggttttaagttgggcgggggtttttcgttagtttttggttttcgaatttcgttttatttggaaggcgtcggatgcgagattcgtttttggttcggttcgcggtttcggtcggcgtttttttttttatttttaagttttcgagggagttcggtaattcggtttaaggataggggtttagtttagtcgttatcgtcggtagcgcgtttcgggtttggttttggtaattattggcgtatttcgtattcggtttgtttacggcgttttaggtttgtttcgcgcgtcgaaatttttcgtcggacgcggaggaaaagaaggtggtgagcgaagtacggagatgtttcgattgttgcgcgggttttcgaagtcgaatcgttattcgcgtttcgggttagttttattttacggcgtggttagcgttgtcgtcggtttagcgatattgcgggcgttttcgggtcgcggggttt

SEQ ID NO: 28436 - DNA, 651 bp, Artificial Sequence
  chemically treated genomic DNA (Homo sapiens) CpG-island No: 28436
aaaccccgcgacccgaaaacgcccgcaatatcgctaaaccgacgacaacgctaaccacgccgtaaaataaaactaacccgaaacgcgaataacgattcgacttcgaaaacccgcgcaacaatcgaaacatctccgtacttcgctcaccaccttcttttcctccgcgtccgacgaaaaatttcgacgcgcgaaacaaacctaaaacgccgtaaacaaaccgaatacgaaatacgccaataattaccaaaaccaaacccgaaacgcgctaccgacgataacgactaaactaaacccctatccttaaaccgaattaccgaactccctcgaaaacttaaaaataaaaaaaaaaacgccgaccgaaaccgcgaaccgaaccaaaaacgaatctcgcatccgacgccttccaaataaaacgaaattcgaaaaccaaaaactaacgaaaaacccccgcccaacttaaaacccaactacgcccaacgccgaaaaaaacgaaacgaaaaaaacccgaacgccgaaaaccccgaaaataaaaaaaataaacttctacgcgaaaaaacgccgaacttaacgaacatcctcaaaaaccgatcgataactctacctccgaaaactctttcgtatttaacgattctcatatttaatatttccctt

SEQ ID NO: 28437 - DNA, 571 bp, Artificial Sequence
  chemically treated genomic DNA (Homo sapiens) CpG-island No: 28437
gcggcgtatcgcggggattttgcgggattaggttaaagattaggatcgttttttaatcgttcgcggtcgcgtagttttgggcggtttgggtttgttttttttcgcgtagggtttttttttttgtcggtcgttgtttcgtatatggttttggtcgtattttcgttttattgttattattgtttacgttttgcgttttcgtttgatcgcgtggagtcggaattcgtttttttcgtttcgcgttgttttaggtttgtttcgtattagtagttaagcgtaggtttttattgtaagttcgtaatttttttatcgttgggtttattggcgattttcggcgttatgcgcgtgaaatgtgggcgacgggttcgtttttggcgggcggcgcgcgcggtttttagatgtagtcgtcgcgtcggggtagttgacgtcgtttttaaagacgcgttttgttggacggcgttgattttacgtagttagcggagttttttgggaatagtttaggcgtcggtgtcgattttaatttttttgtttaggttttttgagttgcgttattagtttattatgtattattaag

SEQ ID NO: 28438 - DNA, 571 bp, Artificial Sequence
  chemically treated genomic DNA (Homo sapiens) CpG-island No: 28438
cttaataatacataataaactaataacgcaactcaaaaaacctaaacaaaaaaattaaaatcgacaccgacgcctaaactattcccaaaaaactccgctaactacgtaaaatcaacgccgtccaacaaaacgcgtctttaaaaacgacgtcaactaccccgacgcgacgactacatctaaaaaccgcgcgcgccgcccgccaaaaacgaacccgtcgcccacatttcacgcgcataacgccgaaaatcgccaataaacccaacgataaaaaaattacgaacttacaataaaaacctacgcttaactactaatacgaaacaaacctaaaacaacgcgaaacgaaaaaaacgaattccgactccacgcgatcaaacgaaaacgcaaaacgtaaacaataataacaataaaacgaaaatacgaccaaaaccatatacgaaacaacgaccgacaaaaaaaaaaaccctacgcgaaaaaaaacaaacccaaaccgcccaaaactacgcgaccgcgaacgattaaaaaacgatcctaatctttaacctaatcccgcaaaatccccgcgatacgccgc

SEQ ID NO: 28439 - DNA, 571 bp, Artificial Sequence
  chemically treated genomic DNA (Homo sapiens) CpG-island No: 28439
tttagtaatatatggtaagttggtaacgtaatttaagaagtttgagtagagaggttgaagtcggtatcggcgtttgggttgtttttaggagatttcgttggttgcgtggggttagcgtcgtttagtagggcgcgtttttggaggcggcgttagttgtttcggcgcggcggttgtatttggaaatcgcgcgcgtcgttcgttaagggcgagttcgtcgtttatattttacgcgtatggcgtcgggggtcgttagtaggtttagcgatgagggggttgcgggtttgtagtagagatttgcgtttagttgttggtgcggggtaggtttggggtagcgcggggcgaggaaggcgggtttcggttttacgcggttaaacggggacgtagggcgtgggtagtggtggtagtggagcgggagtacgattagagttatgtgcggggtagcgatcggtaggagggaaagttttgcgcggggaagggtaggtttaggtcgtttagggttacgcggtcgcgaacggttgggggacggttttggtttttggtttggtttcgtaagattttcgcgatgcgtcgt

SEQ ID NO: 28440 - DNA, 571 bp, Artificial Sequence
  chemically treated genomic DNA (Homo sapiens) CpG-island No: 28440
acgacgcatcgcgaaaatcttacgaaaccaaaccaaaaaccaaaaccgtcccccaaccgttcgcgaccgcgtaaccctaaacgacctaaacctacccttccccgcgcaaaactttccctcctaccgatcgctaccccgcacataactctaatcgtactcccgctccactaccaccactacccacgccctacgtccccgtttaaccgcgtaaaaccgaaacccgccttcctcgccccgcgctaccccaaacctaccccgcaccaacaactaaacgcaaatctctactacaaacccgcaaccccctcatcgctaaacctactaacgacccccgacgccatacgcgtaaaatataaacgacgaactcgcccttaacgaacgacgcgcgcgatttccaaatacaaccgccgcgccgaaacaactaacgccgcctccaaaaacgcgccctactaaacgacgctaaccccacgcaaccaacgaaatctcctaaaaacaacccaaacgccgataccgacttcaacctctctactcaaacttcttaaattacgttaccaacttaccatatattactaaa

SEQ ID NO: 28441 - DNA, 660 bp, Artificial Sequence
  chemically treated genomic DNA (Homo sapiens) CpG-island No: 28441
gcggttgcgcgtgtagtatatgtaggattattttaattataagtatcggtcgcggcggcgtaagtaggtgaagcggttgaagcgggtggagggcggttttatgtacggtatggatgagtcgtaggcggtcgcgatgggtttcgagggcggtcgcgtggttatggacggtttgggtttttagtttttcgagtagggttttttcgtcggttcgtcgttgttgttttcgtatatgggcggttattatcgcgattgttagagtttgggcgcgttttcgttcgacggttattcgttgtttacgttcgatacgttttcgatggacggcgtggatttcgattcggtttttttcgtcgtttcgatgttcggggattgttcggcggtcggtatttatagttacgcgtaggtttcggattacgttggtttttcggagtttttcgtcggttttatgtattttcgattaggtttagagttcgcgggtttttcgatttcgggttttttggcgttatttagcgttttttacgtgtattacggcgcgatgggttcgttcggggcgggcggcgggcgcggtttttagatgtagtcgtaatattagtattagtattagtattagtattatttttcgggtttcggatagtcgtcgtttttttcggaggtattgttttg

SEQ ID NO: 28442 - DNA, 660 bp, Artificial Sequence
  chemically treated genomic DNA (Homo sapiens) CpG-island No: 28442
caaaacaatacctccgaaaaaaacgacgactatccgaaacccgaaaaataatactaatactaatactaatactaatattacgactacatctaaaaaccgcgcccgccgcccgccccgaacgaacccatcgcgccgtaatacacgtaaaaaacgctaaataacgccaaaaaacccgaaatcgaaaaacccgcgaactctaaacctaatcgaaaatacataaaaccgacgaaaaactccgaaaaaccaacgtaatccgaaacctacgcgtaactataaataccgaccgccgaacaatccccgaacatcgaaacgacgaaaaaaaccgaatcgaaatccacgccgtccatcgaaaacgtatcgaacgtaaacaacgaataaccgtcgaacgaaaacgcgcccaaactctaacaatcgcgataataaccgcccatatacgaaaacaacaacgacgaaccgacgaaaaaaccctactcgaaaaactaaaaacccaaaccgtccataaccacgcgaccgccctcgaaacccatcgcgaccgcctacgactcatccataccgtacataaaaccgccctccacccgcttcaaccgcttcacctacttacgccgccgcgaccgatacttataattaaaataatcctacatatactacacgcgcaaccgc

SEQ ID NO: 28443 - DNA, 660 bp, Artificial Sequence
  chemically treated genomic DNA (Homo sapiens) CpG-island No: 28443
tagggtagtgttttcggagggggcgacggttgttcggggttcggggggtggtgttggtgttggtgttggtgttggtgttgcggttgtatttggaaatcgcgttcgtcgttcgtttcgggcgagtttatcgcgtcgtagtatacgtgaagggcgttgggtggcgttaggaggttcggaatcgagggattcgcgggttttgggtttagtcgggggtgtatgggatcggcgggaggtttcggggggttagcgtagttcgagatttgcgcgtagttgtaggtgtcggtcgtcgggtagttttcgggtatcggggcggcgaagaaagtcgggtcggggtttacgtcgtttatcggggacgtgtcgggcgtgggtaacgggtagtcgtcgagcggaggcgcgtttagattttggtagtcgcggtagtggtcgtttatgtgcggaggtagtagcggcgggtcggcggggaagttttgttcggggaattggaggtttaggtcgtttatggttacgcggtcgttttcggggtttatcgcggtcgtttgcggtttatttatgtcgtgtatgaagtcgttttttattcgttttagtcgttttatttgtttgcgtcgtcgcggtcggtatttgtagttggggtggttttgtatgtgttgtacgcgtagtcgt

SEQ ID NO: 28444 - DNA, 660 bp, Artificial Sequence
  chemically treated genomic DNA (Homo sapiens) CpG-island No: 28444
acgactacgcgtacaacacatacaaaaccaccccaactacaaataccgaccgcgacgacgcaaacaaataaaacgactaaaacgaataaaaaacgacttcatacacgacataaataaaccgcaaacgaccgcgataaaccccgaaaacgaccgcgtaaccataaacgacctaaacctccaattccccgaacaaaacttccccgccgacccgccgctactacctccgcacataaacgaccactaccgcgactaccaaaatctaaacgcgcctccgctcgacgactacccgttacccacgcccgacacgtccccgataaacgacgtaaaccccgacccgactttcttcgccgccccgatacccgaaaactacccgacgaccgacacctacaactacgcgcaaatctcgaactacgctaaccccccgaaacctcccgccgatcccatacacccccgactaaacccaaaacccgcgaatccctcgattccgaacctcctaacgccacccaacgcccttcacgtatactacgacgcgataaactcgcccgaaacgaacgacgaacgcgatttccaaatacaaccgcaacaccaacaccaacaccaacaccaacaccaccccccgaaccccgaacaaccgtcgccccctccgaaaacactacccta

SEQ ID NO: 28445 - DNA, 619 bp, Artificial Sequence
  chemically treated genomic DNA (Homo sapiens) CpG-island No: 28445
gtttgaaggtgatgcgggatgtcgttttttcgcgcgtgaggttgcggttttgacggtgagtggggggcgcgtgttgtcgtcggttaggatttttttttattacggatatcggagtcggtgcgttttttatacgaatcgtggattatttttcgcgagtacgtattgttttttgcgtttacgttggttttttttttttacggacgcgcggcggtattttttttagggttaaggtcgcgttttttttttcgttcggggtttttattatttttttcgttcggttttggatttttttaggttttttcgtattttcgttcgtatcggacggtttcggtttttttttcgtttatatttttttgggtttcgttagatcggcgttttttttattttggatttttttagattttcggtttttttttttttcgtgttttttcgcgcgttttttatcgggcgtcgtgtttagggttaggatggtcggagttttaggggcgtagtcgggattttcgggtcgttttttttgtcgcgtttttcggggtttcgcgttttttgggatgggttcggaaaggggtggggagtttttttaaaatataaaaatggaggttttttttgtttgatgtatatt

SEQ ID NO: 28446 - DNA, 619 bp, Artificial Sequence
  chemically treated genomic DNA (Homo sapiens) CpG-island No: 28446
aatatacatcaaacaaaaaaaacctccatttttatattttaaaaaaactccccacccctttccgaacccatcccaaaaaacgcgaaaccccgaaaaacgcgacaaaaaaaacgacccgaaaatcccgactacgcccctaaaactccgaccatcctaaccctaaacacgacgcccgataaaaaacgcgcgaaaaaacacgaaaaaaaaaaaaaccgaaaatctaaaaaaatccaaaataaaaaaaacgccgatctaacgaaacccaaaaaaatataaacgaaaaaaaaaccgaaaccgtccgatacgaacgaaaatacgaaaaaacctaaaaaaatccaaaaccgaacgaaaaaaataataaaaaccccgaacgaaaaaaaaaacgcgaccttaaccctaaaaaaaataccgccgcgcgtccgtaaaaaaaaaaaaccaacgtaaacgcaaaaaacaatacgtactcgcgaaaaataatccacgattcgtataaaaaacgcaccgactccgatatccgtaataaaaaaaaatcctaaccgacgacaacacgcgccccccactcaccgtcaaaaccgcaacctcacgcgcgaaaaaacgacatcccgcatcaccttcaaac

SEQ ID NO: 28447 - DNA, 619 bp, Artificial Sequence
  chemically treated genomic DNA (Homo sapiens) CpG-island No: 28447
gatgtgtattaaataaaaaaaatttttatttttatattttggggaagttttttattttttttcgggtttattttaggggacgcgagatttcgaggaacgcggtaagaagagcggttcgggggtttcgattgcgtttttaggatttcggttattttggttttaggtacggcgttcggtagaaagcgcgcgggagggtacgagggggaggaaagtcggagatttgaggagatttaaggtgggagggacgtcggtttgacggggtttaagggggtatgggcggggaaaggatcgaggtcgttcgatgcggacgggggtgcgggagggtttgagggggtttaaggtcgggcgaggggaatggtgggaatttcgaacgggggagagggcgcggttttggttttggggaggatgtcgtcgcgcgttcgtgaggggaggggattagcgtaaacgtaggaggtagtgcgtgttcgcggggaatagtttacgattcgtgtggaggacgtatcggtttcggtgttcgtgatgggagagggttttggtcggcgataatacgcgttttttatttatcgttagagtcgtagttttacgcgcgaaggaacggtatttcgtattatttttagat

SEQ ID NO: 28448 - DNA, 619 bp, Artificial Sequence
  chemically treated genomic DNA (Homo sapiens) CpG-island No: 28448
atctaaaaataatacgaaataccgttccttcgcgcgtaaaactacgactctaacgataaataaaaaacgcgtattatcgccgaccaaaaccctctcccatcacgaacaccgaaaccgatacgtcctccacacgaatcgtaaactattccccgcgaacacgcactacctcctacgtttacgctaatcccctcccctcacgaacgcgcgacgacatcctccccaaaaccaaaaccgcgccctctcccccgttcgaaattcccaccattcccctcgcccgaccttaaaccccctcaaaccctcccgcacccccgtccgcatcgaacgacctcgatcctttccccgcccatacccccttaaaccccgtcaaaccgacgtccctcccaccttaaatctcctcaaatctccgactttcctccccctcgtaccctcccgcgcgctttctaccgaacgccgtacctaaaaccaaaataaccgaaatcctaaaaacgcaatcgaaacccccgaaccgctcttcttaccgcgttcctcgaaatctcgcgtcccctaaaataaacccgaaaaaaaataaaaaacttccccaaaatataaaaataaaaattttttttatttaatacacatc

SEQ ID NO: 28449 - DNA, 818 bp, Artificial Sequence
  chemically treated genomic DNA (Homo sapiens) CpG-island No: 28449
  unsure (800)
ggagtcgcgagggagaggagggtttagagttcggagtgggcggtgtttgagtaggggcggggcggggtcggggtttggagttggggacgcgggtcggggtcgggagttgcggattcgttggcgggtgggaggagcggagtcggggcgacgttggcggagatttaggggatcgttcggttggggtttgcgtttttcggattattagtttcgggcgttggtttttatcgaggttgtttaggcgtcgttttttcgcgttattgttataggaggcgtttgttgggcgcgttatggatttcgtttcgcggaaacgtttggttcgggttttgtttttagtgagcggttggagcggtcgcggggtcgtaaaatttttaggatttcgaggaaaggcgtttttcggagttgttcgaggtcgggttcggcgtttatttattattcgtttcgtttttttttagtttcgtattattttttatttcgtttttttcgggttttttttacgtttagtaaaatttgtatatttttttcggacggttatcgattcgtagtttcggcgaggaagttgtttgcgtttcgattgtttggattttttcgcgtggttttcggcgaattttagtagtcggaaggtgttaggttcgtttgacgcgttttttttttggggaagaaacgggcgggggtttaggagggattttggtcgggttttttcggcgtgttgattcgaaatcgcgcgggaaaatttgcgttaattataggagggaagattttggtagtttttagttttttagggaggtttaagtgaaaaatanacgttggtttcgtttcgg

SEQ ID NO: 28450 - DNA, 818 bp, Artificial Sequence
  chemically treated genomic DNA (Homo sapiens) CpG-island No: 28450
  unsure (19)
ccgaaacgaaaccaacgtntatttttcacttaaacctccctaaaaaactaaaaactaccaaaatcttccctcctataattaacgcaaattttcccgcgcgatttcgaatcaacacgccgaaaaaacccgaccaaaatccctcctaaacccccgcccgtttcttccccaaaaaaaaaacgcgtcaaacgaacctaacaccttccgactactaaaattcgccgaaaaccacgcgaaaaaatccaaacaatcgaaacgcaaacaacttcctcgccgaaactacgaatcgataaccgtccgaaaaaaatatacaaattttactaaacgtaaaaaaaacccgaaaaaaacgaaataaaaaataatacgaaactaaaaaaaaacgaaacgaataataaataaacgccgaacccgacctcgaacaactccgaaaaacgcctttcctcgaaatcctaaaaattttacgaccccgcgaccgctccaaccgctcactaaaaacaaaacccgaaccaaacgtttccgcgaaacgaaatccataacgcgcccaacaaacgcctcctataacaataacgcgaaaaaacgacgcctaaacaacctcgataaaaaccaacgcccgaaactaataatccgaaaaacgcaaaccccaaccgaacgatcccctaaatctccgccaacgtcgccccgactccgctcctcccacccgccaacgaatccgcaactcccgaccccgacccgcgtccccaactccaaaccccgaccccgccccgcccctactcaaacaccgcccactccgaactctaaaccctcctctccctcgcgactcc

SEQ ID NO: 28451 - DNA, 818 bp, Artificial Sequence
  chemically treated genomic DNA (Homo sapiens) CpG-island No: 28451
  unsure (19)
tcgaggcgaggttagcgtntgttttttatttgggtttttttggggggttgggggttgttagaatttttttttttgtggttggcgtaagttttttcgcgcggtttcggattaatacgtcgggggagttcggttaaagttttttttggattttcgttcgttttttttttaggggaggggcgcgttaggcggatttggtatttttcggttgttggggttcgtcgggagttacgcggggaggtttaggtagtcgggacgtaggtagttttttcgtcgaggttgcgagtcggtggtcgttcgggggaggtgtgtaggttttgttggacgtagaaggaattcgaaggaggcggggtggagggtggtgcggggttggggaggggcgaggcgagtggtgagtggacgtcgggttcggtttcgggtaatttcgaggggcgttttttttcggggttttggaggttttgcgatttcgcggtcgttttagtcgtttattggggataaggttcgagttaggcgttttcgcgaggcggggtttatagcgcgtttagtaggcgttttttgtggtagtgacgcgggggagcggcgtttgaatagtttcggtgggaattagcgttcgaagttggtgattcggggggcgtaggttttaatcgggcgattttttggattttcgttagcgtcgtttcgatttcgttttttttattcgttagcgagttcgtaattttcggtttcggttcgcgtttttagttttaggtttcggtttcgtttcgtttttgtttaggtatcgtttatttcgggttttgggtttttttttttttcgcggtttt

SEQ ID NO: 28452 - DNA, 818 bp, Artificial Sequence
  chemically treated genomic DNA (Homo sapiens) CpG-island No: 28452
  unsure (800)
aaaaccgcgaaaaaaaaaaaaacccaaaacccgaaataaacgatacctaaacaaaaacgaaacgaaaccgaaacctaaaactaaaaacgcgaaccgaaaccgaaaattacgaactcgctaacgaataaaaaaaacgaaatcgaaacgacgctaacgaaaatccaaaaaatcgcccgattaaaacctacgccccccgaatcaccaacttcgaacgctaattcccaccgaaactattcaaacgccgctcccccgcgtcactaccacaaaaaacgcctactaaacgcgctataaaccccgcctcgcgaaaacgcctaactcgaaccttatccccaataaacgactaaaacgaccgcgaaatcgcaaaacctccaaaaccccgaaaaaaaacgcccctcgaaattacccgaaaccgaacccgacgtccactcaccactcgcctcgcccctccccaaccccgcaccaccctccaccccgcctccttcgaattccttctacgtccaacaaaacctacacacctcccccgaacgaccaccgactcgcaacctcgacgaaaaaactacctacgtcccgactacctaaacctccccgcgtaactcccgacgaaccccaacaaccgaaaaataccaaatccgcctaacgcgcccctcccctaaaaaaaaaacgaacgaaaatccaaaaaaaactttaaccgaactcccccgacgtattaatccgaaaccgcgcgaaaaaacttacgccaaccacaaaaaaaaaaattctaacaacccccaaccccccaaaaaaacccaaataaaaaacanacgctaacctcgcctcga

SEQ ID NO: 28453 - DNA, 1291 bp, Artificial Sequence
  chemically treated genomic DNA (Homo sapiens) CpG-island No: 28453
tcgtggcgattttggagagttttcgtatcgaggggttgtgcgcgtaggggattatcgcgcgtagttcgtttagcgcgtcgtttaggtcgtgtattcgtcggcgttttcgggtattgatgttaagtcgtagcgttttttgttttttggattttttgttgttgttgttgttgttgttgttgttgtcgtcgttgtcgttatcgttatcgttatcgtcgttattgttatcgttgttgttattttcgtcgtcgtcgtcgtttaggtttttcggggggacgttggcgtcgtcgtggaggtgggtattggagtagttttcggttgttttcgcgttattatttttcgttttcggggaggttcgttggtcggttatttcggttcgtagtacgagttcgtagcgatcgtcgttgtcgtcgtcggggttttgttcgtcgtcgttgttttcggttatcgagtttcggttcgcgttttcgtcgtatttgaggtaaagggcggtttcggtcggtaggttgtttatgttatggtcgtttttaacgtcggttgaatttattagtagttcggggtattttatttcgtcgtcgtcgtcgtcgttatttttcgcgttgtcgtcgtcgttttttttaggcggcggtaatagtagttttgttttttcggggttagtcggttcgaagtagtttaggggcgacgaggaggaggacgtcgggcgttttcgaggcggcggcgttagggataggtttatgttcgggggcgtggagcggaaagtcgtttttaagcgtttggaggtggaggcgtttaggtttttgtgtaggaagaggtcgttttcgtcggcggtcgttgtatcgaggtgtatttcgcgttttttggtttcgcgtcggtgcgtagttcgggtcgtcgcgttcgttgtcgtcgtcgtcgttttggtttcggagttaggcggttttatagacgcgcgcgagttgggtttcggagttggtgcgcgcgtcggttttggtgttgtcgggagttttttttttttttttttttttttttttcgttttttttcgcgttcgtcgtttttttttttttttttttttcgtttttagtcgatggtgttggttgttggggtttattatgggtcgcggtttcgtatggtgggagggtgggcgcggagggagtggagtcgtcgtcgtcgtcgatatgagtttagtttcgcgtttttttttcgtatcgtttattttgtttggatttatttttaagagattttcggatttattaaatagtcgtcgttatagacgggggagttttttatattattatt

SEQ ID NO: 28454 - DNA, 1291 bp, Artificial Sequence
  chemically treated genomic DNA (Homo sapiens) CpG-island No: 28454
aataataatataaaaaactcccccgtctataacgacgactatttaataaatccgaaaatctcttaaaaataaatccaaacaaaataaacgatacgaaaaaaaaacgcgaaactaaactcatatcgacgacgacgacgactccactccctccgcgcccaccctcccaccatacgaaaccgcgacccataataaaccccaacaaccaacaccatcgactaaaaacgaaaaaaaaaaaaaaaaaaaaacgacgaacgcgaaaaaaaacgaaaaaaaaaaaaaaaaaaaaaaaaaaaactcccgacaacaccaaaaccgacgcgcgcaccaactccgaaacccaactcgcgcgcgtctataaaaccgcctaactccgaaaccaaaacgacgacgacgacaacgaacgcgacgacccgaactacgcaccgacgcgaaaccaaaaaacgcgaaatacacctcgatacaacgaccgccgacgaaaacgacctcttcctacacaaaaacctaaacgcctccacctccaaacgcttaaaaacgactttccgctccacgcccccgaacataaacctatccctaacgccgccgcctcgaaaacgcccgacgtcctcctcctcgtcgcccctaaactacttcgaaccgactaaccccgaaaaaacaaaactactattaccgccgcctaaaaaaaacgacgacgacaacgcgaaaaataacgacgacgacgacgacgaaataaaataccccgaactactaataaattcaaccgacgttaaaaacgaccataacataaacaacctaccgaccgaaaccgccctttacctcaaatacgacgaaaacgcgaaccgaaactcgataaccgaaaacaacgacgacgaacaaaaccccgacgacgacaacgacgatcgctacgaactcgtactacgaaccgaaataaccgaccaacgaacctccccgaaaacgaaaaataataacgcgaaaacaaccgaaaactactccaatacccacctccacgacgacgccaacgtccccccgaaaaacctaaacgacgacgacgacgaaaataacaacaacgataacaataacgacgataacgataacgataacgacaacgacgacaacaacaacaacaacaacaacaacaacaaaaaatccaaaaaacaaaaaacgctacgacttaacatcaatacccgaaaacgccgacgaatacacgacctaaacgacgcgctaaacgaactacgcgcgataatcccctacgcgcacaacccctcgatacgaaaactctccaaaatcgccacga

SEQ ID NO: 28455 - DNA, 1291 bp, Artificial Sequence
  chemically treated genomic DNA (Homo sapiens) CpG-island No: 28455
gataatgatgtaaaagattttttcgtttgtggcggcggttgtttgatgggttcggaaattttttgaaggtgaatttaagtaagataaacggtgcggagaggaggcgcggggttgggtttatatcggcggcggcggcggttttatttttttcgcgtttatttttttattatgcggggtcgcggtttatggtgagttttagtagttagtattatcggttggagacgaagaagaagaagaagaggaggcggcgagcgcgggggaaggcgaaaaagaaaaagaaagaaggggagagggttttcggtagtattaggatcgacgcgcgtattagtttcggagtttagttcgcgcgcgtttgtggggtcgtttgatttcggggttaaagcggcggcggcggtagcgggcgcggcggttcgggttgcgtatcggcgcgggattaaggagcgcgggatgtatttcggtgtagcggtcgtcggcgaggacgatttttttttgtataagagtttgagcgtttttatttttaagcgtttggaagcggtttttcgttttacgttttcgggtatggatttgtttttggcgtcgtcgtttcgggaacgttcggcgttttttttttcgtcgtttttgggttgtttcgagtcggttgatttcgagggggtagggttgttgttgtcgtcgtttggaggaggcggcggcggtagcgcgggaagtggcggcggcggcggcggcggggtggggtatttcgggttgttagtaggtttagtcggcgttgggggcgattatagtataagtagtttgtcggtcggggtcgttttttgttttaagtacggcgaaagcgcgagtcggggttcggtggtcgagagtagcggcggcgagtagagtttcgacgacgatagcgacggtcgttgcgagttcgtgttgcgggtcggagtagtcgattagcgggttttttcgggagcgggaggtggtggcgcgaaggtagtcgagggttgttttaatgtttatttttacggcggcgttagcgttttttcggggggtttgggcggcggcggcggcgggggtagtagtagcggtagtagtggcggcggtggcggtagcggtagcggtagcggcggtagtagtagtagtagtagtagtagtagtaagaaatttaaagagtaaaaggcgttgcggtttaatattaatgttcgagagcgtcggcggatgtacgatttgaacgacgcgttggacgagttgcgcgcggtgattttttacgcgtatagtttttcggtgcgaaagttttttaagatcgttacga

SEQ ID NO: 28456 - DNA, 1291 bp, Artificial Sequence
  chemically treated genomic DNA (Homo sapiens) CpG-island No: 28456
tcgtaacgatcttaaaaaactttcgcaccgaaaaactatacgcgtaaaaaatcaccgcgcgcaactcgtccaacgcgtcgttcaaatcgtacatccgccgacgctctcgaacattaatattaaaccgcaacgccttttactctttaaatttcttactactactactactactactactactaccgccgctaccgctaccgctaccgccaccgccgccactactaccgctactactacccccgccgccgccgccgcccaaaccccccgaaaaaacgctaacgccgccgtaaaaataaacattaaaacaaccctcgactaccttcgcgccaccacctcccgctcccgaaaaaacccgctaatcgactactccgacccgcaacacgaactcgcaacgaccgtcgctatcgtcgtcgaaactctactcgccgccgctactctcgaccaccgaaccccgactcgcgctttcgccgtacttaaaacaaaaaacgaccccgaccgacaaactacttatactataatcgcccccaacgccgactaaacctactaacaacccgaaataccccaccccgccgccgccgccgccgccacttcccgcgctaccgccgccgcctcctccaaacgacgacaacaacaaccctaccccctcgaaatcaaccgactcgaaacaacccaaaaacgacgaaaaaaaaaacgccgaacgttcccgaaacgacgacgccaaaaacaaatccatacccgaaaacgtaaaacgaaaaaccgcttccaaacgcttaaaaataaaaacgctcaaactcttatacaaaaaaaaatcgtcctcgccgacgaccgctacaccgaaatacatcccgcgctccttaatcccgcgccgatacgcaacccgaaccgccgcgcccgctaccgccgccgccgctttaaccccgaaatcaaacgaccccacaaacgcgcgcgaactaaactccgaaactaatacgcgcgtcgatcctaatactaccgaaaaccctctccccttctttctttttctttttcgccttcccccgcgctcgccgcctcctcttcttcttcttcttcgtctccaaccgataatactaactactaaaactcaccataaaccgcgaccccgcataataaaaaaataaacgcgaaaaaaataaaaccgccgccgccgccgatataaacccaaccccgcgcctcctctccgcaccgtttatcttacttaaattcaccttcaaaaaatttccgaacccatcaaacaaccgccgccacaaacgaaaaaatcttttacatcattatc

SEQ ID NO: 28457 - DNA, 1187 bp, Artificial Sequence
  chemically treated genomic DNA (Homo sapiens) CpG-island No: 28457
attcgaggtgggtaggtttcgcgcggggcgtgacgttacgcgggcggtttcgttagtcgtgaggttatttggtgggcgcggttaggtcgaatttttagtgtcgttacgggagggggcgggtttagagcgtgttagtgtagtcgaattaaaataagtcggagattcgtttttttttttcggttcgggagcgtttcgtttgcgtttcgggttcgcggcgttcgcgcggttgcgagtttcgggtggtcgcgtgtcggttttaggaagtcggagagggcgcggcggttaggatggcgcggtacgggtcgtgcggttagacgggagtcgagggaatcgtcggttcgcgtttttcgttttttttcggagtcggttttacgtagggtcgggaacggtcgtgtttttgggattcgttttcgttgacgtcgggtatttatttggacgcgagcgagcgagatgtttaattttaaaaatagtaaaggcggtcgtaaaaataagcgcgttaatagtagcggcgacgagtaggaaaatggagtcggggttttggtagcggcgggcgcggcgggagcggcggtcgggggggttttggcggcggcggtcggttgcggggcggcggcggcgggcgcgtcgggcgtcggaggcgcggcgggcgtcggaggcgcggggattggcgtcgcgaacgttgcggtcgtcgcgggggttgcggtcgcgggcgatgttaaaaacggtaagacggggttggcggggcgagcgttaatttttttttcgacggggacggcgcggtggcggggttttgggtggcgcgggcggtgcgtggataatgcgagagttaggaagtgtttatttcgttttttcgtttcgtcgcggttgttttttcgcggtttttacgtttggcggcggggatagatttgcggtttttgttcggtgttcgcgcggggggtagttcgcgttttatattttgaggggttttcggttgcggtagcgttgttttcgggtttagtttgttgttcgcgttggtattgtttcgtcgtgtgtgtcgggtcgaagggaggaaggaagggaggaaagagtcgtttaagttgagaagaatgattcgattgaaaatttaggtatcggttaatttttttcggtgttttaaggttattcgtaattttcggaatgaaggagagagagttttaatttttagtatattt

SEQ ID NO: 28458 - DNA, 1187 bp, Artificial Sequence
  chemically treated genomic DNA (Homo sapiens) CpG-island No: 28458
aaatatactaaaaattaaaactctctctccttcattccgaaaattacgaataaccttaaaacaccgaaaaaaattaaccgatacctaaattttcaatcgaatcattcttctcaacttaaacgactctttcctcccttccttcctcccttcgacccgacacacacgacgaaacaataccaacgcgaacaacaaactaaacccgaaaacaacgctaccgcaaccgaaaacccctcaaaatataaaacgcgaactaccccccgcgcgaacaccgaacaaaaaccgcaaatctatccccgccgccaaacgtaaaaaccgcgaaaaaacaaccgcgacgaaacgaaaaaacgaaataaacacttcctaactctcgcattatccacgcaccgcccgcgccacccaaaaccccgccaccgcgccgtccccgtcgaaaaaaaaattaacgctcgccccgccaaccccgtcttaccgtttttaacatcgcccgcgaccgcaacccccgcgacgaccgcaacgttcgcgacgccaatccccgcgcctccgacgcccgccgcgcctccgacgcccgacgcgcccgccgccgccgccccgcaaccgaccgccgccgccaaaacccccccgaccgccgctcccgccgcgcccgccgctaccaaaaccccgactccattttcctactcgtcgccgctactattaacgcgcttatttttacgaccgcctttactatttttaaaattaaacatctcgctcgctcgcgtccaaataaatacccgacgtcaacgaaaacgaatcccaaaaacacgaccgttcccgaccctacgtaaaaccgactccgaaaaaaaacgaaaaacgcgaaccgacgattccctcgactcccgtctaaccgcacgacccgtaccgcgccatcctaaccgccgcgccctctccgacttcctaaaaccgacacgcgaccacccgaaactcgcaaccgcgcgaacgccgcgaacccgaaacgcaaacgaaacgctcccgaaccgaaaaaaaaaaacgaatctccgacttattttaattcgactacactaacacgctctaaacccgccccctcccgtaacgacactaaaaattcgacctaaccgcgcccaccaaataacctcacgactaacgaaaccgcccgcgtaacgtcacgccccgcgcgaaacctacccacctcgaat

SEQ ID NO: 28459 - DNA, 1187 bp, Artificial Sequence
  chemically treated genomic DNA (Homo sapiens) CpG-island No: 28459
gggtgtgttaagaattgaggtttttttttttttatttcgggggttacgggtggttttggagtatcgggaagaattaatcggtgtttaagtttttaatcggattattttttttaatttgggcggttttttttttttttttttttttttttcggttcggtatatacggcggggtagtgttagcgcgggtagtaggttgggttcgagggtagcgttgtcgtagtcgggagttttttagagtgtggggcgcgggttgtttttcgcgcggatatcgggtaggggtcgtagatttgttttcgtcgttaggcgtggggatcgcgaaggggtagtcgcggcggggcggaggggcggggtgagtattttttgattttcgtattgtttacgtatcgttcgcgttatttagggtttcgttatcgcgtcgttttcgtcggggaggaagttggcgttcgtttcgttagtttcgttttatcgtttttggtatcgttcgcggtcgtagttttcgcggcggtcgtagcgttcgcggcgttagttttcgcgttttcggcgttcgtcgcgttttcggcgttcggcgcgttcgtcgtcgtcgtttcgtaatcggtcgtcgtcgttagggttttttcggtcgtcgttttcgtcgcgttcgtcgttgttagggtttcggttttatttttttgttcgtcgtcgttgttgttggcgcgtttgtttttgcggtcgtttttgttgtttttggggttgggtatttcgttcgttcgcgtttaggtaggtgttcggcgttagcgaaggcggattttagaggtacggtcgttttcggttttgcgtgaagtcggtttcgggaaagaacggagggcgcgagtcggcggttttttcggttttcgtttagtcgtacggttcgtgtcgcgttattttggtcgtcgcgtttttttcggttttttggagtcggtacgcggttattcgaggttcgtagtcgcgcgggcgtcgcgggttcggggcgtaagcgagacgttttcgagtcggagggaaaaggcgggttttcggtttgttttgattcggttgtattgatacgttttgggttcgttttttttcgtgacgatattggggattcggtttggtcgcgtttattaggtgattttacggttgacgggatcgttcgcgtgacgttacgtttcgcgcggggtttgtttatttcgagt

SEQ ID NO: 28460 - DNA, 1187 bp, Artificial Sequence
  chemically treated genomic DNA (Homo sapiens) CpG-island No: 28460
actcgaaataaacaaaccccgcgcgaaacgtaacgtcacgcgaacgatcccgtcaaccgtaaaatcacctaataaacgcgaccaaaccgaatccccaatatcgtcacgaaaaaaaacgaacccaaaacgtatcaatacaaccgaatcaaaacaaaccgaaaacccgccttttccctccgactcgaaaacgtctcgcttacgccccgaacccgcgacgcccgcgcgactacgaacctcgaataaccgcgtaccgactccaaaaaaccgaaaaaaacgcgacgaccaaaataacgcgacacgaaccgtacgactaaacgaaaaccgaaaaaaccgccgactcgcgccctccgttctttcccgaaaccgacttcacgcaaaaccgaaaacgaccgtacctctaaaatccgccttcgctaacgccgaacacctacctaaacgcgaacgaacgaaatacccaaccccaaaaacaacaaaaacgaccgcaaaaacaaacgcgccaacaacaacgacgacgaacaaaaaaataaaaccgaaaccctaacaacgacgaacgcgacgaaaacgacgaccgaaaaaaccctaacgacgacgaccgattacgaaacgacgacgacgaacgcgccgaacgccgaaaacgcgacgaacgccgaaaacgcgaaaactaacgccgcgaacgctacgaccgccgcgaaaactacgaccgcgaacgataccaaaaacgataaaacgaaactaacgaaacgaacgccaacttcctccccgacgaaaacgacgcgataacgaaaccctaaataacgcgaacgatacgtaaacaatacgaaaatcaaaaaatactcaccccgcccctccgccccgccgcgactaccccttcgcgatccccacgcctaacgacgaaaacaaatctacgacccctacccgatatccgcgcgaaaaacaacccgcgccccacactctaaaaaactcccgactacgacaacgctaccctcgaacccaacctactacccgcgctaacactaccccgccgtatataccgaaccgaaaaaaaaaaaaaaaaaaaaaaaaaaccgcccaaattaaaaaaaataatccgattaaaaacttaaacaccgattaattcttcccgatactccaaaaccacccgtaacccccgaaataaaaaaaaaaaaacctcaattcttaacacaccc

SEQ ID NO: 28461 - DNA, 603 bp, Artificial Sequence
  chemically treated genomic DNA (Homo sapiens) CpG-island No: 28461
agaaggtcgagggggtaggtagaaggcgtatacgggcgttacgtttttttcgtttcgtatttttgttttaggtaggtgacggggaaaggaaagggattttgattttatcgtaaataggcggcgtcgtcgcgtggggggaatcgagcgcgcgttttcgttttttggggcggggacggatttagggttcgggttaggtcggggtcgttattttcggatttagcggtttagatgtttagtcggttagtttgttagttttttcgagttttcggttttacgcgtttttagtattatttgtttttcgtatcgcggcggatgatggcggaggaggaggattttgaaagtcggtagtttttttgtttcgatttgatttgttcgaggtttcggtcggtttgttttcgtttcgttcgcgcggtttttcgggtagagtagttcggttttttatttgggagcgcgatggggcgcgtatcgcgaattattcgttttatggcgtatcgcgcgtagagcgttttttatcgttttttttttcgtttttttttggtggtttttggttttttttcgtagagatcgtagggaggtgtttagtcgggagcgtttagagattat

SEQ ID NO: 28462 - DNA, 603 bp, Artificial Sequence
  chemically treated genomic DNA (Homo sapiens) CpG-island No: 28462
ataatctctaaacgctcccgactaaacacctccctacgatctctacgaaaaaaaaccaaaaaccaccaaaaaaaaacgaaaaaaaaaacgataaaaaacgctctacgcgcgatacgccataaaacgaataattcgcgatacgcgccccatcgcgctcccaaataaaaaaccgaactactctacccgaaaaaccgcgcgaacgaaacgaaaacaaaccgaccgaaacctcgaacaaatcaaatcgaaacaaaaaaactaccgactttcaaaatcctcctcctccgccatcatccgccgcgatacgaaaaacaaataatactaaaaacgcgtaaaaccgaaaactcgaaaaaactaacaaactaaccgactaaacatctaaaccgctaaatccgaaaataacgaccccgacctaacccgaaccctaaatccgtccccgccccaaaaaacgaaaacgcgcgctcgattccccccacgcgacgacgccgcctatttacgataaaatcaaaatccctttcctttccccgtcacctacctaaaacaaaaatacgaaacgaaaaaaacgtaacgcccgtatacgccttctacctaccccctcgaccttct

SEQ ID NO: 28463 - DNA, 603 bp, Artificial Sequence
  chemically treated genomic DNA (Homo sapiens) CpG-island No: 28463
gtagtttttgggcgttttcggttgaatatttttttgcggtttttgcgagaaagagttagaagttattaggggagggcgaagaggagggcggtggaggacgttttgcgcgcggtgcgttatgggacgggtagttcgcggtgcgcgttttatcgcgtttttagatggggaatcggattattttattcgagaggtcgcgcgagcggggcgagggtaagtcggtcggggtttcgaataaattaaatcgaagtaaagaaattgtcggtttttaaaatttttttttttcgttattattcgtcgcggtgcggagagtaggtggtgttggaagcgcgtgaggtcgggagttcgagagagttaatagattagtcggttggatatttggatcgttggattcggaggtggcgatttcggtttgattcggattttaaattcgttttcgttttagagggcggaggcgcgcgttcgattttttttacgcggcggcgtcgtttgtttacggtagagttagggtttttttttttttttcgttatttgtttggaataggggtgcggggcgaggagggcgtggcgttcgtgtgcgttttttgtttgttttttcggtttttt

SEQ ID NO: 28464 - DNA, 603 bp, Artificial Sequence
  chemically treated genomic DNA (Homo sapiens) CpG-island No: 28464
aaaaaaccgaaaaaacaaacaaaaaacgcacacgaacgccacgccctcctcgccccgcacccctattccaaacaaataacgaaaaaaaaaaaaaaaccctaactctaccgtaaacaaacgacgccgccgcgtaaaaaaaatcgaacgcgcgcctccgccctctaaaacgaaaacgaatttaaaatccgaatcaaaccgaaatcgccacctccgaatccaacgatccaaatatccaaccgactaatctattaactctctcgaactcccgacctcacgcgcttccaacaccacctactctccgcaccgcgacgaataataacgaaaaaaaaaaattttaaaaaccgacaatttctttacttcgatttaatttattcgaaaccccgaccgacttaccctcgccccgctcgcgcgacctctcgaataaaataatccgattccccatctaaaaacgcgataaaacgcgcaccgcgaactacccgtcccataacgcaccgcgcgcaaaacgtcctccaccgccctcctcttcgccctcccctaataacttctaactctttctcgcaaaaaccgcaaaaaaatattcaaccgaaaacgcccaaaaactac

SEQ ID NO: 28465 - DNA, 1347 bp, Artificial Sequence
  chemically treated genomic DNA (Homo sapiens) CpG-island No: 28465
gattttcgttttcgggttcgcgcgggattcgggtaggcgtcgttttttcggcgtttgtttcgcgaattttggggtatttgtaatttttgggtcgcggagttaggcgtgcgtcgttttttggttttattaacgtgagaacgttttattttcgaagagtttagtttttagggggttatgtttttttgcgtttttcgttcgttaggcggtgtcgtttattcgatcgtattatgcgtgggtagcggtcgcgttcgttggtagttgtgcggcgggaatacgttttaagtaaggtcggatttcgcgcgttttttgttagggacgttacgttacgtttttattcgtagtttcggagtattttcgcgtttcgcgttcgaagttcgggattttcgttttggcgaaacgaggaatatgatatatagtaaaatattttttcgcggtcgttgtattgtcgcgatatattcggcgtttgtttttatagtaagtcggcgaggggttgggatttcgtcgggacgtgttgacgttaggttcgacggggggcggggtttgggcggcggcggcgttagtttttcgggtattttaggcgttttagtttttttagtttttttattttgttttataggtttcgcggttttcggttttttcggttttcgtttttcggttttttcggttttcgtttttcgttattcgtcgttcggattttcgtcgttttttttaggtcgtttcgtcgttatgggtttgcgttcgtcgcgtcgtcgggtcgagggtagttgaggcgcggtgcgaagatgggcgaggatagagtagggttcgagcgttagttttagtagttcgggcgtttcgcgcgcgttcgttcgcgtcggcgaggggatgttcgcgttcgagagcgcgttttttcgtttgtatgggtttagtaatatttatcgagcgcggggcgaggtttacgttttttttttttttttcgcgtttacggcgggcgagttggcgttggataaggtttcgggttttcgtcgtatttttcggattttagttagatttattttttttcgagcgagttcgtgggaagttaggaggacggttttcgtttttaagtcgtgttcgatgttttggacggggatggggacggtttcgtcgtatcgaggattttatttagtttgttacggtttacggggtagagtaggtacggagcggttcggtcggcgtgggaattgggtaggtgcgcgttggtcggcggggttgatgtgggatcggtcgacgttgtttttggagtcgggaaaggtattgttaagatttgacggttttgttttttttgtttatttattatttcggttttggatttttggttgaattgcg

SEQ ID NO: 28466 - DNA, 1347 bp, Artificial Sequence
  chemically treated genomic DNA (Homo sapiens) CpG-island No: 28466
cgcaattcaaccaaaaatccaaaaccgaaataataaataaacaaaaaaaacaaaaccgtcaaatcttaacaatacctttcccgactccaaaaacaacgtcgaccgatcccacatcaaccccgccgaccaacgcgcacctacccaattcccacgccgaccgaaccgctccgtacctactctaccccgtaaaccgtaacaaactaaataaaatcctcgatacgacgaaaccgtccccatccccgtccaaaacatcgaacacgacttaaaaacgaaaaccgtcctcctaacttcccacgaactcgctcgaaaaaaaataaatctaactaaaatccgaaaaatacgacgaaaacccgaaaccttatccaacgccaactcgcccgccgtaaacgcgaaaaaaaaaaaaaaaacgtaaacctcgccccgcgctcgataaatattactaaacccatacaaacgaaaaaacgcgctctcgaacgcgaacatcccctcgccgacgcgaacgaacgcgcgcgaaacgcccgaactactaaaactaacgctcgaaccctactctatcctcgcccatcttcgcaccgcgcctcaactaccctcgacccgacgacgcgacgaacgcaaacccataacgacgaaacgacctaaaaaaaacgacgaaaatccgaacgacgaataacgaaaaacgaaaaccgaaaaaaccgaaaaacgaaaaccgaaaaaaccgaaaaccgcgaaacctataaaacaaaataaaaaaactaaaaaaactaaaacgcctaaaatacccgaaaaactaacgccgccgccgcccaaaccccgccccccgtcgaacctaacgtcaacacgtcccgacgaaatcccaacccctcgccgacttactataaaaacaaacgccgaatatatcgcgacaatacaacgaccgcgaaaaaatattttactatatatcatattcctcgtttcgccaaaacgaaaatcccgaacttcgaacgcgaaacgcgaaaatactccgaaactacgaataaaaacgtaacgtaacgtccctaacaaaaaacgcgcgaaatccgaccttacttaaaacgtattcccgccgcacaactaccaacgaacgcgaccgctacccacgcataatacgatcgaataaacgacaccgcctaacgaacgaaaaacgcaaaaaaacataaccccctaaaaactaaactcttcgaaaataaaacgttctcacgttaataaaaccaaaaaacgacgcacgcctaactccgcgacccaaaaattacaaataccccaaaattcgcgaaacaaacgccgaaaaaacgacgcctacccgaatcccgcgcgaacccgaaaacgaaaatc

SEQ ID NO: 28467 - DNA, 1347 bp, Artificial Sequence
  chemically treated genomic DNA (Homo sapiens) CpG-island No: 28467
cgtaatttaattagaaatttagggtcgaagtggtgaataagtagaaaaagtaggatcgttaggttttgatagtgtttttttcgattttaggggtagcgtcgatcggttttatattaatttcgtcggttagcgcgtatttgtttagtttttacgtcggtcgggtcgtttcgtatttgttttgtttcgtagatcgtagtaaattggatgaagttttcgatgcgacgaaatcgtttttattttcgtttagggtatcgaatacggtttggaggcgggggtcgtttttttgattttttacgggttcgttcggaagggggtgggtttggttgaggttcgagggatgcggcggggattcgggattttgtttagcgttagttcgttcgtcgtgggcgcggggaagggagagaagacgtagatttcgtttcgcgttcggtgggtgttgttggatttatgtaagcggaaaggcgcgttttcgggcgcgggtattttttcgtcggcgcgggcgggcgcgcgcggggcgttcgggttgttggggttggcgttcgggttttgttttgttttcgtttattttcgtatcgcgttttagttgttttcggttcggcggcgcggcgggcgtaggtttatggcggcggggcggtttagggagggcggcgaggattcgggcggcggatggcgggggacgggggtcgaggaggtcgggggacgggggtcgaggaggtcggaggtcgcggagtttgtgaagtaggatgaggagattaaggaggttgaggcgtttgaggtattcggagaattaacgtcgtcgtcgtttaggtttcgtttttcgtcgggtttgacgttagtacgtttcggcggggttttagtttttcgtcggtttgttgtagaggtaggcgtcgggtgtgtcgcggtagtgtagcggtcgcgaaggggtgttttgttgtatgttatatttttcgtttcgttagagcgggggtttcgagtttcgggcgcgggacgcgggggtgtttcgaggttgcgagtggaagcgtgacgtgacgtttttggtaagaagcgcgcggagttcggttttatttagaacgtgttttcgtcgtatagttattagcgggcgcgatcgttatttacgtatggtgcggtcgagtaaacggtatcgtttggcgagcgagagacgtaaagggatatagttttttaggagttgagtttttcgggggtaaagcgtttttacgttgatgagattaggaggcggcgtacgtttggtttcgcggtttaggggttgtaggtgttttagggttcgcggggtagacgtcgagagggcgacgtttgttcgggtttcgcgcggattcgggggcgagggtt

SEQ ID NO: 28468 - DNA, 1347 bp, Artificial Sequence
  chemically treated genomic DNA (Homo sapiens) CpG-island No: 28468
aaccctcgcccccgaatccgcgcgaaacccgaacaaacgtcgccctctcgacgtctaccccgcgaaccctaaaacacctacaacccctaaaccgcgaaaccaaacgtacgccgcctcctaatctcatcaacgtaaaaacgctttacccccgaaaaactcaactcctaaaaaactatatccctttacgtctctcgctcgccaaacgataccgtttactcgaccgcaccatacgtaaataacgatcgcgcccgctaataactatacgacgaaaacacgttctaaataaaaccgaactccgcgcgcttcttaccaaaaacgtcacgtcacgcttccactcgcaacctcgaaacacccccgcgtcccgcgcccgaaactcgaaacccccgctctaacgaaacgaaaaatataacatacaacaaaacaccccttcgcgaccgctacactaccgcgacacacccgacgcctacctctacaacaaaccgacgaaaaactaaaaccccgccgaaacgtactaacgtcaaacccgacgaaaaacgaaacctaaacgacgacgacgttaattctccgaatacctcaaacgcctcaacctccttaatctcctcatcctacttcacaaactccgcgacctccgacctcctcgacccccgtcccccgacctcctcgacccccgtcccccgccatccgccgcccgaatcctcgccgccctccctaaaccgccccgccgccataaacctacgcccgccgcgccgccgaaccgaaaacaactaaaacgcgatacgaaaataaacgaaaacaaaacaaaacccgaacgccaaccccaacaacccgaacgccccgcgcgcgcccgcccgcgccgacgaaaaaatacccgcgcccgaaaacgcgcctttccgcttacataaatccaacaacacccaccgaacgcgaaacgaaatctacgtcttctctcccttccccgcgcccacgacgaacgaactaacgctaaacaaaatcccgaatccccgccgcatccctcgaacctcaaccaaacccacccccttccgaacgaacccgtaaaaaatcaaaaaaacgacccccgcctccaaaccgtattcgataccctaaacgaaaataaaaacgatttcgtcgcatcgaaaacttcatccaatttactacgatctacgaaacaaaacaaatacgaaacgacccgaccgacgtaaaaactaaacaaatacgcgctaaccgacgaaattaatataaaaccgatcgacgctacccctaaaatcgaaaaaaacactatcaaaacctaacgatcctactttttctacttattcaccacttcgaccctaaatttctaattaaattacg

SEQ ID NO: 28469 - DNA, 624 bp, Artificial Sequence
  chemically treated genomic DNA (Homo sapiens) CpG-island No: 28469
gttttcgtcggtgaaggtttcggtcggtgagggttttttgtcggtgagggttttcggtcggtgagggtttttcgttagtgagggtttcggttagtgagggtttcggtcggtgagggtttcggtcggtgagggtttttgtcggtgagggtttttgtcggtgagggtttcggtcggtgagggtttcggtcggtgagggtttttgtcggtgagggttttttttcggtgagggtttcggtcggtgagggtttcggtcggtgagggtgtttcgtcggtgagggtttcggtcggtgagggtttcggtcggtgagggtttcggtcggtgaggggttcggtcggtgatggtttcggtcggtgaggttttcggtcggtgagggtttcggtcggtgagggttttcggtcggtgagggtttttgttggtgagggtttcggtcggtgagggcgtttcgtcggtgagggtttcggtcggtgagggtttcggtcggtgagggtttttagtcggtgagggtttcggttagtgagggttttcggtcggtgagggttttttgtttttcgagggtttcggtcggtgacggtcgttttgttatataggttttttatgggtgtattttgtggcgggggtaatat

SEQ ID NO: 28470 - DNA, 624 bp, Artificial Sequence
  chemically treated genomic DNA (Homo sapiens) CpG-island No: 28470
atattacccccgccacaaaatacacccataaaaaacctatataacaaaacgaccgtcaccgaccgaaaccctcgaaaaacaaaaaaccctcaccgaccgaaaaccctcactaaccgaaaccctcaccgactaaaaaccctcaccgaccgaaaccctcaccgaccgaaaccctcaccgacgaaacgccctcaccgaccgaaaccctcaccaacaaaaaccctcaccgaccgaaaaccctcaccgaccgaaaccctcaccgaccgaaaacctcaccgaccgaaaccatcaccgaccgaacccctcaccgaccgaaaccctcaccgaccgaaaccctcaccgaccgaaaccctcaccgacgaaacaccctcaccgaccgaaaccctcaccgaccgaaaccctcaccgaaaaaaaaccctcaccgacaaaaaccctcaccgaccgaaaccctcaccgaccgaaaccctcaccgacaaaaaccctcaccgacaaaaaccctcaccgaccgaaaccctcaccgaccgaaaccctcactaaccgaaaccctcactaacgaaaaaccctcaccgaccgaaaaccctcaccgacaaaaaaccctcaccgaccgaaaccttcaccgacgaaaac

SEQ ID NO: 28471 - DNA, 624 bp, Artificial Sequence
  chemically treated genomic DNA (Homo sapiens) CpG-island No: 28471
atgttgttttcgttataggatgtatttatgaggaatttgtgtggtagaacggtcgttatcgatcgggattttcgggggataggggatttttatcgatcggggatttttattgatcgggatttttatcgattggggatttttatcgatcggggtttttatcgatcgggatttttatcgacggggcgtttttatcgatcggggtttttattaataggggtttttatcgatcggggatttttatcgatcggggtttttatcgatcggggattttatcgatcggggttattatcgatcgggttttttatcgatcggggtttttatcgatcgggatttttatcgatcgggatttttatcgacggggtatttttatcgatcggggtttttatcgatcgggatttttatcgaaaggggatttttatcgatagggatttttatcgatcggggtttttatcgatcggggtttttatcgatagggatttttatcgataggggtttttatcgatcgggatttttatcgatcggggtttttattgatcgggatttttattgacggggggtttttatcgatcggggatttttatcggtaggggatttttatcgatcgggatttttatcgacggggat

SEQ ID NO: 28472 - DNA, 624 bp, Artificial Sequence
  chemically treated genomic DNA (Homo sapiens) CpG-island No: 28472
atccccgtcgataaaaatcccgatcgataaaaatcccctaccgataaaaatccccgatcgataaaaaccccccgtcaataaaaatcccgatcaataaaaaccccgatcgataaaaatcccgatcgataaaaacccctatcgataaaaatccctatcgataaaaaccccgatcgataaaaaccccgatcgataaaaatccctatcgataaaaatcccctttcgataaaaatcccgatcgataaaaaccccgatcgataaaaataccccgtcgataaaaatcccgatcgataaaaatcccgatcgataaaaaccccgatcgataaaaaacccgatcgataataaccccgatcgataaaatccccgatcgataaaaaccccgatcgataaaaatccccgatcgataaaaacccctattaataaaaaccccgatcgataaaaacgccccgtcgataaaaatcccgatcgataaaaaccccgatcgataaaaatccccaatcgataaaaatcccgatcaataaaaatccccgatcgataaaaatcccctatcccccgaaaatcccgatcgataacgaccgttctaccacacaaattcctcataaatacatcctataacgaaaacaacat

SEQ ID NO: 28473 - DNA, 875 bp, Artificial Sequence
  chemically treated genomic DNA (Homo sapiens) CpG-island No: 28473
ggtaggattatttttacgacggtaggattttttcgttattttagaaagaattacgtgtttatttaattttcgattttacgtcggggttcgcggacgtagtcgtttcgttcgtttacgtatttgcggtagtcgggttcggtagggacgagggttcggcggcgttttcgggaagagcgcggttcgggttttgggttttcgtttaggaggcgtcgttgtcgtagtgagtacgtcgggtcgggttttgagttcgcgtcggtcgcgtttttcgcgtttcgagttgtggcggtcgcgttttcgggcggaaggtttacgttcggtgacgtcgcgttgttttagaattttagcgattttgtagatttattggtgatttaacggtgcgtttcgtcgtcgtcgggcggaagtttcgtttttgtttcggagaggaagtttcgttttatcgagcgtcgattggtcgtatcgttttagagaggacgcgttcggggttatttcgtcgtttttttcgagggttttgcggaagtaggcggtatagtttgcgaggggttttcgtttttcggatttagtcgtatcgtttcggttcgggcgcgtttgtattttgtcgttcgttcgcgcgttgaaggggcggatataaataacgtggattttcgagtttttgattggcgagcgtgtaggaaaggggcggggttagtagagtcgtgatggatatgtaagcgatttaatggcgtcggcgacggggcgggcgaggataacggcgttgtgggtcgggggcggggcggtcggcggttttgggatttttttgggaggtagtcgtagggaagggaatgattttttttttatagtgagtcgtattagcggtcgtaaatttattagagtaatat

SEQ ID NO: 28474 - DNA, 875 bp, Artificial Sequence
  chemically treated genomic DNA (Homo sapiens) CpG-island No: 28474
atattactctaataaatttacgaccgctaatacgactcactataaaaaaaaaatcattcccttccctacgactacctcccaaaaaaatcccaaaaccgccgaccgccccgcccccgacccacaacgccgttatcctcgcccgccccgtcgccgacgccattaaatcgcttacatatccatcacgactctactaaccccgcccctttcctacacgctcgccaatcaaaaactcgaaaatccacgttatttatatccgccccttcaacgcgcgaacgaacgacaaaatacaaacgcgcccgaaccgaaacgatacgactaaatccgaaaaacgaaaacccctcgcaaactataccgcctacttccgcaaaaccctcgaaaaaaacgacgaaataaccccgaacgcgtcctctctaaaacgatacgaccaatcgacgctcgataaaacgaaacttcctctccgaaacaaaaacgaaacttccgcccgacgacgacgaaacgcaccgttaaatcaccaataaatctacaaaatcgctaaaattctaaaacaacgcgacgtcaccgaacgtaaaccttccgcccgaaaacgcgaccgccacaactcgaaacgcgaaaaacgcgaccgacgcgaactcaaaacccgacccgacgtactcactacgacaacgacgcctcctaaacgaaaacccaaaacccgaaccgcgctcttcccgaaaacgccgccgaaccctcgtccctaccgaacccgactaccgcaaatacgtaaacgaacgaaacgactacgtccgcgaaccccgacgtaaaatcgaaaattaaataaacacgtaattctttctaaaataacgaaaaaatcctaccgtcgtaaaaataatcctacc

SEQ ID NO: 28475 - DNA, 875 bp, Artificial Sequence
  chemically treated genomic DNA (Homo sapiens) CpG-island No: 28475
atattgttttaataaatttgcggtcgttaatacgatttattatagggagaggattatttttttttttgcggttgttttttagagaaattttagagtcgtcggtcgtttcgttttcggtttataacgtcgttgttttcgttcgtttcgtcgtcggcgttattgggtcgtttgtatgtttattacggttttgttaatttcgttttttttttatacgttcgttaattaggggttcggaagtttacgttgtttgtattcgtttttttaacgcgcggacgggcggtaggatgtaggcgcgttcgagtcgaggcgatgcggttgagttcgggaaacgaaagtttttcgtaggttgtgtcgtttgttttcgtagaattttcggagggagcggcggggtggtttcgggcgcgttttttttaaggcggtgcggttaatcggcgttcgatgaggcggaatttttttttcggggtaggggcgggattttcgttcggcggcggcggggcgtatcgttgggttattagtgagtttgtaaagtcgttgaggttttgggatagcgcggcgttatcgagcgtgagtttttcgttcggggacgcggtcgttatagttcgggacgcggggagcgcggtcggcgcgagtttaagattcggttcgacgtgtttattgcggtagcggcgttttttggacggggatttagggttcggatcgcgtttttttcgggggcgtcgtcgagttttcgtttttgtcgggttcggttgtcgtaggtgcgtgggcgagcgaggcggttgcgttcgcgggtttcggcgtggggtcgggggttgagtgggtacgtggttttttttggggtgacgagaaggttttatcgtcgtggggatggttttgtt

SEQ ID NO: 28476 - DNA, 875 bp, Artificial Sequence
  chemically treated genomic DNA (Homo sapiens) CpG-island No: 28476
aacaaaaccatccccacgacgataaaaccttctcgtcaccccaaaaaaaaccacgtacccactcaacccccgaccccacgccgaaacccgcgaacgcaaccgcctcgctcgcccacgcacctacgacaaccgaacccgacaaaaacgaaaactcgacgacgcccccgaaaaaaacgcgatccgaaccctaaatccccgtccaaaaaacgccgctaccgcaataaacacgtcgaaccgaatcttaaactcgcgccgaccgcgctccccgcgtcccgaactataacgaccgcgtccccgaacgaaaaactcacgctcgataacgccgcgctatcccaaaacctcaacgactttacaaactcactaataacccaacgatacgccccgccgccgccgaacgaaaatcccgcccctaccccgaaaaaaaaattccgcctcatcgaacgccgattaaccgcaccgccttaaaaaaaacgcgcccgaaaccaccccgccgctccctccgaaaattctacgaaaacaaacgacacaacctacgaaaaactttcgtttcccgaactcaaccgcatcgcctcgactcgaacgcgcctacatcctaccgcccgtccgcgcgttaaaaaaacgaatacaaacaacgtaaacttccgaacccctaattaacgaacgtataaaaaaaaaacgaaattaacaaaaccgtaataaacatacaaacgacccaataacgccgacgacgaaacgaacgaaaacaacgacgttataaaccgaaaacgaaacgaccgacgactctaaaatttctctaaaaaacaaccgcaaaaaaaaaaataatcctctccctataataaatcgtattaacgaccgcaaatttattaaaacaatat

SEQ ID NO: 28477 - DNA, 540 bp, Artificial Sequence
  chemically treated genomic DNA (Homo sapiens) CpG-island No: 28477
acgcggttgttttgggcgtggtttcgggaaacgtagcggcgtcgattttgggtttcgtatattttttacgttcgttcgtagcgttattcggattttcgtcgttatttttgtgggtttttcggcgacgttttttgtttcgtttttaagtcgggaaggttttttgcggttcgcggcgtgtcggacgtgataaacggaagtcgtacgttttattagtattttcgtagacggatagcgttagggagtaatggtagcgcgtcgatcgcgatgggttgtggttaatagcggttgtttagtagggcgcgtcgagagtagcggtcgggaaggggcggtgcgggaggcggggtgtggggcggtagtgtgggttttgtttttgttcgcgcggtgtttcgtattttgtaagttttcggagcgtacgtcggtagtcggttttttcgttgatcgaattatcgatttttttttttagttgtatttttaaaatgtcgttttttaataagttgacgttggataagttggacgttaaagggaagcgggtcgttatga

SEQ ID NO: 28478 - DNA, 540 bp, Artificial Sequence
  chemically treated genomic DNA (Homo sapiens) CpG-island No: 28478
tcataacgacccgcttccctttaacgtccaacttatccaacgtcaacttattaaaaaacgacattttaaaaatacaactaaaaaaaaaaatcgataattcgatcaacgaaaaaaccgactaccgacgtacgctccgaaaacttacaaaatacgaaacaccgcgcgaacaaaaacaaaacccacactaccgccccacaccccgcctcccgcaccgccccttcccgaccgctactctcgacgcgccctactaaacaaccgctattaaccacaacccatcgcgatcgacgcgctaccattactccctaacgctatccgtctacgaaaatactaataaaacgtacgacttccgtttatcacgtccgacacgccgcgaaccgcaaaaaaccttcccgacttaaaaacgaaacaaaaaacgtcgccgaaaaacccacaaaaataacgacgaaaatccgaataacgctacgaacgaacgtaaaaaatatacgaaacccaaaatcgacgccgctacgtttcccgaaaccacgcccaaaacaaccgcgt

SEQ ID NO: 28479 - DNA, 540 bp, Artificial Sequence
  chemically treated genomic DNA (Homo sapiens) CpG-island No: 28479
ttataacgattcgtttttttttaacgtttagtttgtttagcgttagtttgttagaaagcgatattttggaaatatagttggggagagaggtcggtgattcggttaacgagggagtcgattgtcgacgtgcgtttcggaggtttgtagaatgcggaatatcgcgcgggtaggaatagggtttatattatcgttttatatttcgtttttcgtatcgttttttttcggtcgttgttttcggcgcgttttgttgagtagtcgttattggttatagtttatcgcggtcggcgcgttgttattgttttttggcgttgttcgtttgcgagggtattagtgagacgtgcggttttcgtttgttacgttcggtacgtcgcgaatcgtaaggaattttttcgatttaggggcggagtaggaagcgtcgtcggggggtttataagggtagcggcgaagattcgggtgacgttgcgaacggacgtgaagaatgtgcgagatttagggtcggcgtcgttgcgtttttcggaattacgtttagagtagtcgcgt

SEQ ID NO: 28480 - DNA, 540 bp, Artificial Sequence
  chemically treated genomic DNA (Homo sapiens) CpG-island No: 28480
acgcgactactctaaacgtaattccgaaaaacgcaacgacgccgaccctaaatctcgcacattcttcacgtccgttcgcaacgtcacccgaatcttcgccgctacccttataaaccccccgacgacgcttcctactccgcccctaaatcgaaaaaattccttacgattcgcgacgtaccgaacgtaacaaacgaaaaccgcacgtctcactaataccctcgcaaacgaacaacgccaaaaaacaataacaacgcgccgaccgcgataaactataaccaataacgactactcaacaaaacgcgccgaaaacaacgaccgaaaaaaaacgatacgaaaaacgaaatataaaacgataatataaaccctattcctacccgcgcgatattccgcattctacaaacctccgaaacgcacgtcgacaatcgactccctcgttaaccgaatcaccgacctctctccccaactatatttccaaaatatcgctttctaacaaactaacgctaaacaaactaaacgttaaaaaaaaacgaatcgttataa

SEQ ID NO: 28481 - DNA, 686 bp, Artificial Sequence
  chemically treated genomic DNA (Homo sapiens) CpG-island No: 28481
gcgcgcggtgtgttttttattaggtttttttttttttttattttttttttcgttaggttttgttatggagttgcgttcggagttgtttagcgtgttcggcgcggcgacggcggcggcggtaatagcgacggggtcgtttgtggcgtcggtggcgtcggtggcggtagtcgcggcggtcgttgtatcgttatcggtgagcgtggtaggcggtttgttgcgggggtcgttattgttgttgcgggtagtcgagaagtattcgcggatttttaagtgcgcgcgttgtcgtaattatggcgtggtgtcggtttttaagggttataaacgttattgtcgttggaaggattgtttgtgcgttaagtgtacgtttatcgcggagcgttagcgtgttatggcggcgtagtggcgttgcgtaggtagtaggcgtaggaggagaacgaggcgcgcgagttgtagttgttttacggtattgtcgaggggttggcgttggtcgtcgttaacggtattattttttcgaggttcgtttacgaggttttcggtttagtgtgcgtcgtcgacggcgggggatttggagcgggagcgttcgcggggatcggaggcggagtagttggcgtagggggtttaggtgagagcgcggttaggtcgtaggtaggggtagtaggatcgtagttttggggtacggggtttag

SEQ ID NO: 28482 - DNA, 686 bp, Artificial Sequence
  chemically treated genomic DNA (Homo sapiens) CpG-island No: 28482
ctaaaccccgtaccccaaaactacgatcctactacccctacctacgacctaaccgcgctctcacctaaaccccctacgccaactactccgcctccgatccccgcgaacgctcccgctccaaatcccccgccgtcgacgacgcacactaaaccgaaaacctcgtaaacgaacctcgaaaaaataataccgttaacgacgaccaacgccaacccctcgacaataccgtaaaacaactacaactcgcgcgcctcgttctcctcctacgcctactacctacgcaacgccactacgccgccataacacgctaacgctccgcgataaacgtacacttaacgcacaaacaatccttccaacgacaataacgtttataacccttaaaaaccgacaccacgccataattacgacaacgcgcgcacttaaaaatccgcgaatacttctcgactacccgcaacaacaataacgacccccgcaacaaaccgcctaccacgctcaccgataacgatacaacgaccgccgcgactaccgccaccgacgccaccgacgccacaaacgaccccgtcgctattaccgccgccgccgtcgccgcgccgaacacgctaaacaactccgaacgcaactccataacaaaacctaacgaaaaaaaaaataaaaaaaaaaaaaaacctaataaaaaacacaccgcgcgc

SEQ ID NO: 28483 - DNA, 686 bp, Artificial Sequence
  chemically treated genomic DNA (Homo sapiens) CpG-island No: 28483
ttgggtttcgtgttttagagttacgattttgttgtttttatttgcggtttggtcgcgtttttatttgagttttttgcgttagttgtttcgttttcggttttcgcgggcgttttcgttttaggtttttcgtcgtcggcggcgtatattgaatcgaagatttcgtaggcgggtttcggggggatgatgtcgttggcggcggttagcgttagtttttcggtagtgtcgtagagtagttgtagttcgcgcgtttcgttttttttttgcgtttgttgtttgcgtagcgttattgcgtcgttatgatacgttggcgtttcgcgatgagcgtgtatttggcgtataggtagtttttttagcgatagtagcgtttgtggtttttgagggtcgatattacgttatggttgcgatagcgcgcgtatttgggggttcgcgggtatttttcggttgttcgtagtaatagtggcggttttcgtagtaagtcgtttgttacgtttatcggtagcgatgtagcggtcgtcgcggttgtcgttatcgacgttatcgacgttataggcggtttcgtcgttgttgtcgtcgtcgtcgtcgtcgcgtcgggtacgttgggtagtttcgagcgtagttttatgataggatttgacgggaaagaaggtgggagaggggagagatttggtgaggagtatatcgcgcgt

SEQ ID NO: 28484 - DNA, 686 bp, Artificial Sequence
  chemically treated genomic DNA (Homo sapiens) CpG-island No: 28484
acgcgcgatatactcctcaccaaatctctcccctctcccaccttctttcccgtcaaatcctatcataaaactacgctcgaaactacccaacgtacccgacgcgacgacgacgacgacgacaacaacgacgaaaccgcctataacgtcgataacgtcgataacgacaaccgcgacgaccgctacatcgctaccgataaacgtaacaaacgacttactacgaaaaccgccactattactacgaacaaccgaaaaatacccgcgaacccccaaatacgcgcgctatcgcaaccataacgtaatatcgaccctcaaaaaccacaaacgctactatcgctaaaaaaactacctatacgccaaatacacgctcatcgcgaaacgccaacgtatcataacgacgcaataacgctacgcaaacaacaaacgcaaaaaaaaaacgaaacgcgcgaactacaactactctacgacactaccgaaaaactaacgctaaccgccgccaacgacatcatccccccgaaacccgcctacgaaatcttcgattcaatatacgccgccgacgacgaaaaacctaaaacgaaaacgcccgcgaaaaccgaaaacgaaacaactaacgcaaaaaactcaaataaaaacgcgaccaaaccgcaaataaaaacaacaaaatcgtaactctaaaacacgaaacccaa

SEQ ID NO: 28485 - DNA, 763 bp, Artificial Sequence
  chemically treated genomic DNA (Homo sapiens) CpG-island No: 28485
gacgaggaagtcggagatggcgaggttgagtaggaagaagttgttttgggtgcggaggttcgagtcggttacgaaggcgagtatgattagcgcgttgtttagtatcgtggttacgatgagtagcgttatgagcgcggttagtatcgcggtttaggttgtcgagaagtcgcgcgtttcgttcgtcgtcgtcgtttcgttcgttagcgttttcgaagcgtttagcggttcgtcgggcggcgcgcgttttatggtttcgtaggtttacgcggtttcgggacgcggggtagggcgtcggtcgagagttgggcggtcgggaggggtttcggttcgggagtttcgtttttgcgggtttttggtcgggtcgggtttttttgggggcgtttagcgtatggttcgcggggtcggggtcggggttagagtaggcggtgtcgagggggtcggggtcggattcgagtttagtggggtcggtagcgcggttgttgtagcgggagaggagtcggagtttgagtcgttgtcggtgcgatcgtgtagtcggagcgtaacgcgtagtcgagtgcgtttcgcgtttagtttatcgtttcgcgcgtttcgcgtagcgttttcgttattggttgtcgttttcgtttcgtttttttttcgttttcgtttcgttcggcgtcggtagtattacggatagcgtcgcgtgttcgttaggttgtttggagtttagtttttgcgtttatagtagttggttgggagttcggtcggggtttgatcgggtttg

SEQ ID NO: 28486 - DNA, 763 bp, Artificial Sequence
  chemically treated genomic DNA (Homo sapiens) CpG-island No: 28486
caaacccgatcaaaccccgaccgaactcccaaccaactactataaacgcaaaaactaaactccaaacaacctaacgaacacgcgacgctatccgtaatactaccgacgccgaacgaaacgaaaacgaaaaaaaaacgaaacgaaaacgacaaccaataacgaaaacgctacgcgaaacgcgcgaaacgataaactaaacgcgaaacgcactcgactacgcgttacgctccgactacacgatcgcaccgacaacgactcaaactccgactcctctcccgctacaacaaccgcgctaccgaccccactaaactcgaatccgaccccgaccccctcgacaccgcctactctaaccccgaccccgaccccgcgaaccatacgctaaacgcccccaaaaaaacccgacccgaccaaaaacccgcaaaaacgaaactcccgaaccgaaacccctcccgaccgcccaactctcgaccgacgccctaccccgcgtcccgaaaccgcgtaaacctacgaaaccataaaacgcgcgccgcccgacgaaccgctaaacgcttcgaaaacgctaacgaacgaaacgacgacgacgaacgaaacgcgcgacttctcgacaacctaaaccgcgatactaaccgcgctcataacgctactcatcgtaaccacgatactaaacaacgcgctaatcatactcgccttcgtaaccgactcgaacctccgcacccaaaacaacttcttcctactcaacctcgccatctccgacttcctcgtc

SEQ ID NO: 28487 - DNA, 763 bp, Artificial Sequence
  chemically treated genomic DNA (Homo sapiens) CpG-island No: 28487
tagattcggttaagtttcggtcgggtttttagttagttgttgtgagcgtaggggttgggttttaggtagtttggcgggtacgcggcgttgttcgtggtgttgtcggcgtcgggcggggcgggggcggggagggggcggggcgagggcggtagttaatggcgggggcgttgcgcggggcgcgcggggcggtgggttgggcgcggggcgtattcggttgcgcgttgcgtttcggttgtacggtcgtatcggtagcggtttaggtttcggtttttttttcgttgtagtagtcgcgttgtcggttttattgggttcggattcggtttcggttttttcggtatcgtttgttttggtttcggtttcggtttcgcggattatgcgttgggcgtttttaggggaattcgattcggttaagggttcgtaaagacgaggttttcgggtcggggtttttttcggtcgtttagttttcggtcggcgttttgtttcgcgtttcggagtcgcgtgagtttgcggggttatggagcgcgcgtcgttcgacgggtcgttgaacgtttcgggggcgttggcgggcgaggcggcggcggcgggcggggcgcgcggtttttcggtagtttggatcgcggtgttggtcgcgtttatggcgttgtttatcgtggttacggtgttgggtaacgcgttggttatgttcgttttcgtggtcgattcgagttttcgtatttagaataatttttttttgtttaatttcgttattttcgattttttcgtt

SEQ ID NO: 28488 - DNA, 763 bp, Artificial Sequence
  chemically treated genomic DNA (Homo sapiens) CpG-island No: 28488
aacgaaaaaatcgaaaataacgaaattaaacaaaaaaaaattattctaaatacgaaaactcgaatcgaccacgaaaacgaacataaccaacgcgttacccaacaccgtaaccacgataaacaacgccataaacgcgaccaacaccgcgatccaaactaccgaaaaaccgcgcgccccgcccgccgccgccgcctcgcccgccaacgcccccgaaacgttcaacgacccgtcgaacgacgcgcgctccataaccccgcaaactcacgcgactccgaaacgcgaaacaaaacgccgaccgaaaactaaacgaccgaaaaaaaccccgacccgaaaacctcgtctttacgaacccttaaccgaatcgaattcccctaaaaacgcccaacgcataatccgcgaaaccgaaaccgaaaccaaaacaaacgataccgaaaaaaccgaaaccgaatccgaacccaataaaaccgacaacgcgactactacaacgaaaaaaaaaccgaaacctaaaccgctaccgatacgaccgtacaaccgaaacgcaacgcgcaaccgaatacgccccgcgcccaacccaccgccccgcgcgccccgcgcaacgcccccgccattaactaccgccctcgccccgccccctccccgcccccgccccgcccgacgccgacaacaccacgaacaacgccgcgtacccgccaaactacctaaaacccaacccctacgctcacaacaactaactaaaaacccgaccgaaacttaaccgaatcta

SEQ ID NO: 28489 - DNA, 1875 bp, Artificial Sequence
  chemically treated genomic DNA (Homo sapiens) CpG-island No: 28489
gagcgtacggtttatttttcgcgtttcgcggtttagagcggttttcgttcggtttttgttcgtcggggcggcggcgcgatttacgcgttcggtcggggttaggggtgtttaagatggcgtcgttacggttttcgtgttcggggttttacgcgaggtcgggttttaagcgaggcgttgagtggggagaacgagcgttcgcggtttacgttaaacgtcgtttttgtaggtattcgtggagatcggtagcggggttcgcgtttagttatagttttgatcgttcgcgtcgttgtttcgcgtacgttcgcgggcgtttatagcgtcgcgttcggtttcggttttttttgggttttttagttttattttcgttcgcgttttcggtttcgcgtaggtttcgtcgttttatcgcggtcgagttttttttgacggttttttgcgcgtattttatttggaagaggtggtcgtcgggcgagaagacggtgatggcgcggtcgtagtttatgtcggcgggcggcggtcgggtttttttcgtcgcgatttttaaaagcgtatatttacggttcgcgcgtattcgcgattttcggcgttattacgttcgcgttttattttcggcgtcgtgttttgcgttgtcggcgacgggcggcgttaggcggcgacgggtagcgttaggcggcgtcgggcggacgtgatggcgcgcgtcggggcggggttaggtcgaattatcggtggtcgggggtgggaggcggtgtttcggcgagggtcgggcgttgggtgcgagggggtcgtcgggggttatcgttcggtattgggtcgtagatcgttttgtagggcggagcggcggcgtcgcgggttcggaggcgcggcgacggcgacggggcggacgagtttacgacgcggcgtttttcgcgttttcgttttttttttttttttcgcgattgcggataatgagcgtttcgggtcgtttagcgtagtcggagtatttatttcgatgattacgggttgagtttcgcgtcgttattatgttcgtggttttcgcgtttgttcggttaagaggtaaaggggaggttacgtagtaaattatttagaaggtgggtcgggtcggagcggcggcgtttggcggcgggtttgcgggcgggcgcgcgcggggacggggcgcgggtagttggcgggcgcggggcgcgaataaagtcggggcgtagtcgggcggtcgcgagtttcgacggcggatttttgttttttttcgcgttttacgtttgcgcgtcggcgggtattcggtcgtgtggggggcggttttcggagagtttgcgttaattttgttggggcgcgcgggtttttcgggtcggggtattgggcggtgggggtcgggcggacgttggaggttgtcggttttcgagcgcgttgtttttcgagttcgcggcgcgcgttgggaattgttttgtgttatgtcgggcgtacggggatttttcggggtcggagtcgcggcgagggtttgtcgcgtttcgtagttagtttcggtggcgacggcgggcggtattcgttttttgcgtttattttggttagtggtgaggggttcgggtcggttttcgggcgtatttgcgatcgcggggattgtggtcggggttgttttttttgtttttggagcgaggcgcgaacgatggaggtacggaaggacgcgtttcgatttttatttgcggggtatcgttacgtagttcggtttcgtagggagcgtatcgtttttttcgtattttcgcggttacgtcgggttttagcgtgatattttcgttagtcgtttcgtttaataaatttgacggatttgttttataattttttttttagtttcgtaagttcggttttgtggtttttaagagatagcgttta

SEQ ID NO: 28490 - DNA, 1875 bp, Artificial Sequence
  chemically treated genomic DNA (Homo sapiens) CpG-island No: 28490
taaacgctatctcttaaaaaccacaaaaccgaacttacgaaactaaaaaaaaaattataaaacaaatccgtcaaatttattaaacgaaacgactaacgaaaatatcacgctaaaacccgacgtaaccgcgaaaatacgaaaaaaacgatacgctccctacgaaaccgaactacgtaacgataccccgcaaataaaaatcgaaacgcgtccttccgtacctccatcgttcgcgcctcgctccaaaaacaaaaaaaacaaccccgaccacaatccccgcgatcgcaaatacgcccgaaaaccgacccgaacccctcaccactaaccaaaataaacgcaaaaaacgaataccgcccgccgtcgccaccgaaactaactacgaaacgcgacaaaccctcgccgcgactccgaccccgaaaaatccccgtacgcccgacataacacaaaacaattcccaacgcgcgccgcgaactcgaaaaacaacgcgctcgaaaaccgacaacctccaacgtccgcccgacccccaccgcccaataccccgacccgaaaaacccgcgcgccccaacaaaattaacgcaaactctccgaaaaccgccccccacacgaccgaatacccgccgacgcgcaaacgtaaaacgcgaaaaaaaacaaaaatccgccgtcgaaactcgcgaccgcccgactacgccccgactttattcgcgccccgcgcccgccaactacccgcgccccgtccccgcgcgcgcccgcccgcaaacccgccgccaaacgccgccgctccgacccgacccaccttctaaataatttactacgtaacctcccctttacctcttaaccgaacaaacgcgaaaaccacgaacataataacgacgcgaaactcaacccgtaatcatcgaaataaatactccgactacgctaaacgacccgaaacgctcattatccgcaatcgcgaaaaaaaaaaaaaaaacgaaaacgcgaaaaacgccgcgtcgtaaactcgtccgccccgtcgccgtcgccgcgcctccgaacccgcgacgccgccgctccgccctacaaaacgatctacgacccaataccgaacgataacccccgacgaccccctcgcacccaacgcccgaccctcgccgaaacaccgcctcccacccccgaccaccgataattcgacctaaccccgccccgacgcgcgccatcacgtccgcccgacgccgcctaacgctacccgtcgccgcctaacgccgcccgtcgccgacaacgcaaaacacgacgccgaaaataaaacgcgaacgtaataacgccgaaaatcgcgaatacgcgcgaaccgtaaatatacgcttttaaaaatcgcgacgaaaaaaacccgaccgccgcccgccgacataaactacgaccgcgccatcaccgtcttctcgcccgacgaccacctcttccaaataaaatacgcgcaaaaaaccgtcaaaaaaaactcgaccgcgataaaacgacgaaacctacgcgaaaccgaaaacgcgaacgaaaataaaactaaaaaacccaaaaaaaaccgaaaccgaacgcgacgctataaacgcccgcgaacgtacgcgaaacaacgacgcgaacgatcaaaactataactaaacgcgaaccccgctaccgatctccacgaatacctacaaaaacgacgtttaacgtaaaccgcgaacgctcgttctccccactcaacgcctcgcttaaaacccgacctcgcgtaaaaccccgaacacgaaaaccgtaacgacgccatcttaaacacccctaaccccgaccgaacgcgtaaatcgcgccgccgccccgacgaacaaaaaccgaacgaaaaccgctctaaaccgcgaaacgcgaaaaataaaccgtacgctc

SEQ ID NO: 28491 - DNA, 1875 bp, Artificial Sequence
  chemically treated genomic DNA (Homo sapiens) CpG-island No: 28491
taaacgttgttttttgaaaattataaggtcgaatttacggagttagaagaaaggttgtggagtaaattcgttaagtttgttaggcgaggcggttggcgagggtgttacgttgaaattcggcgtagtcgcgaggatacggagggggcggtgcgttttttacggggtcgggttgcgtaacgatgtttcgtaaatggggatcgggacgcgttttttcgtgtttttatcgttcgcgtttcgttttaggagtaagaggggtagtttcggttatagttttcgcggtcgtaagtgcgttcggaggtcgattcgggttttttattattaattaaaatgagcgtagaaaacgagtatcgttcgtcgtcgttatcgaagttggttgcggagcgcgataagttttcgtcgcggtttcggtttcgaggggttttcgtgcgttcggtatagtataggatagtttttagcgcgcgtcgcggattcgggggatagcgcgttcgggggtcggtagtttttagcgttcgttcggtttttatcgtttagtgtttcggttcgagggattcgcgcgttttaataaagttggcgtaggtttttcggggatcgttttttatacggtcgggtgttcgtcggcgcgtaggcgtgggacgcggggaagggtaaaggttcgtcgtcggggttcgcggtcgttcggttgcgtttcggttttgttcgcgtttcgcgttcgttagttgttcgcgtttcgttttcgcgcgcgttcgttcgtagattcgtcgttaagcgtcgtcgtttcggttcggtttattttttggatggtttgttgcgtaattttttttttgttttttggtcgggtagacgcgaaggttacggatatggtggcggcgcggggtttagttcgtggttatcgaggtggatatttcggttgcgttgggcggttcgaggcgtttattattcgtagtcgcggagggggggaagggggcgggagcgcggggggcgtcgcgtcgtgggttcgttcgtttcgtcgtcgtcgtcgcgttttcgggttcgcggcgtcgtcgtttcgttttgtagaacggtttgcggtttagtgtcgaacggtggttttcggcgattttttcgtatttagcgttcggttttcgtcggagtatcgttttttattttcggttatcggtggttcggtttgatttcgtttcggcgcgcgttattacgttcgttcgacgtcgtttgacgttgttcgtcgtcgtttgacgtcgttcgtcgtcggtagcgtaggatacggcgtcgagggtggggcgcgggcgtagtggcgtcgggagtcgcgggtgcgcgcgggtcgtgagtgtgcgtttttgagagtcgcggcggaaggagttcggtcgtcgttcgtcggtatgagttacgatcgcgttattatcgttttttcgttcgacggttattttttttaagtggagtacgcgtaggaggtcgttaagaagggttcgatcgcggtgaggcggcggggtttgcgcggggtcggggacgcgggcggaagtggggttggggagtttagagagggtcggggtcgggcgcggcgttgtgggcgttcgcgggcgtgcgcggggtagcggcgcgggcggttagggttgtagttgagcgcgggtttcgttgtcggtttttacgagtgtttgtagaggcggcgtttggcgtgagtcgcgagcgttcgttttttttatttagcgtttcgtttggggttcggtttcgcgtggggtttcgggtacgggggtcgtgacgacgttattttgagtatttttggtttcggtcgggcgcgtgggtcgcgtcgtcgtttcggcgagtagaggtcgggcgagggtcgttttgggtcgcggagcgcggggggtaggtcgtgcgttt

SEQ ID NO: 28492 - DNA, 1875 bp, Artificial Sequence
  chemically treated genomic DNA (Homo sapiens) CpG-island No: 28492
aaacgcacgacctaccccccgcgctccgcgacccaaaacgaccctcgcccgacctctactcgccgaaacgacgacgcgacccacgcgcccgaccgaaaccaaaaatactcaaaataacgtcgtcacgacccccgtacccgaaaccccacgcgaaaccgaaccccaaacgaaacgctaaataaaaaaaacgaacgctcgcgactcacgccaaacgccgcctctacaaacactcgtaaaaaccgacaacgaaacccgcgctcaactacaaccctaaccgcccgcgccgctaccccgcgcacgcccgcgaacgcccacaacgccgcgcccgaccccgaccctctctaaactccccaaccccacttccgcccgcgtccccgaccccgcgcaaaccccgccgcctcaccgcgatcgaacccttcttaacgacctcctacgcgtactccacttaaaaaaaataaccgtcgaacgaaaaaacgataataacgcgatcgtaactcataccgacgaacgacgaccgaactccttccgccgcgactctcaaaaacgcacactcacgacccgcgcgcacccgcgactcccgacgccactacgcccgcgccccaccctcgacgccgtatcctacgctaccgacgacgaacgacgtcaaacgacgacgaacaacgtcaaacgacgtcgaacgaacgtaataacgcgcgccgaaacgaaatcaaaccgaaccaccgataaccgaaaataaaaaacgatactccgacgaaaaccgaacgctaaatacgaaaaaatcgccgaaaaccaccgttcgacactaaaccgcaaaccgttctacaaaacgaaacgacgacgccgcgaacccgaaaacgcgacgacgacgacgaaacgaacgaacccacgacgcgacgccccccgcgctcccgcccccttccccccctccgcgactacgaataataaacgcctcgaaccgcccaacgcaaccgaaatatccacctcgataaccacgaactaaaccccgcgccgccaccatatccgtaaccttcgcgtctacccgaccaaaaaacaaaaaaaaaattacgcaacaaaccatccaaaaaataaaccgaaccgaaacgacgacgcttaacgacgaatctacgaacgaacgcgcgcgaaaacgaaacgcgaacaactaacgaacgcgaaacgcgaacaaaaccgaaacgcaaccgaacgaccgcgaaccccgacgacgaacctttacccttccccgcgtcccacgcctacgcgccgacgaacacccgaccgtataaaaaacgatccccgaaaaacctacgccaactttattaaaacgcgcgaatccctcgaaccgaaacactaaacgataaaaaccgaacgaacgctaaaaactaccgacccccgaacgcgctatcccccgaatccgcgacgcgcgctaaaaactatcctatactataccgaacgcacgaaaacccctcgaaaccgaaaccgcgacgaaaacttatcgcgctccgcaaccaacttcgataacgacgacgaacgatactcgttttctacgctcattttaattaataataaaaaacccgaatcgacctccgaacgcacttacgaccgcgaaaactataaccgaaactacccctcttactcctaaaacgaaacgcgaacgataaaaacacgaaaaaacgcgtcccgatccccatttacgaaacatcgttacgcaacccgaccccgtaaaaaacgcaccgccccctccgtatcctcgcgactacgccgaatttcaacgtaacaccctcgccaaccgcctcgcctaacaaacttaacgaatttactccacaacctttcttctaactccgtaaattcgaccttataattttcaaaaaacaacgttta

SEQ ID NO: 28493 - DNA, 820 bp, Artificial Sequence
  chemically treated genomic DNA (Homo sapiens) CpG-island No: 28493
gcgttcgtatcggatttttcgcggcggtaaggcgaagttagggtaagggcggtggggacggcgtttcggggttgttttgcggtttttattgtttgttttgcgttgtttcgtagttttttcgggtaacggcggtgttttcgttagattcgggaggtttcgtaaacgtcggaggggttagagaagttgggggattttgggtatcgggtggaacgggcggggcggttgtttttgtgttcgggtagcgagggcgtcggcgagaagcgcggttgtagttgagcgtttcgtattttttttgtcgttgtttttgttttcgttattagggataaggtcgtttttcggttcgtcggcgtgttttttgtatttgcgtattgggtaagttttgggttttcggagttaaaaggtttcggaagtggtcggtcgtttgcgacgtttcggaagtgacgtgttttttcgagtcggtgagtgcgggagcggggagcggggagcgtgggtttggggggtggtcgcggttcgggcgtaaggaggggtttcggtttgggtcgcggggtatcggggcgttgggagcgggagaggtttcggtttaggagttgagaggtttggagggttgtcgggttgcgaatttcggcgggatcgagcgttgcggttttggagtagcgagcgttcgggcggtggggagcggcgttttgtttttcggttttgttttatttttttcgtagaatcgcgttttggggttagaagttttgttagttatttcggtggtgttttgttacgggatgggtgtcgtgtgtgagtttcgagttaagttgttaggaatttgttt

SEQ ID NO: 28494 - DNA, 820 bp, Artificial Sequence
  chemically treated genomic DNA (Homo sapiens) CpG-island No: 28494
aaacaaattcctaacaacttaactcgaaactcacacacgacacccatcccgtaacaaaacaccaccgaaataactaacaaaacttctaaccccaaaacgcgattctacgaaaaaaataaaacaaaaccgaaaaacaaaacgccgctccccaccgcccgaacgctcgctactccaaaaccgcaacgctcgatcccgccgaaattcgcaacccgacaaccctccaaacctctcaactcctaaaccgaaacctctcccgctcccaacgccccgataccccgcgacccaaaccgaaacccctccttacgcccgaaccgcgaccaccccccaaacccacgctccccgctccccgctcccgcactcaccgactcgaaaaaacacgtcacttccgaaacgtcgcaaacgaccgaccacttccgaaaccttttaactccgaaaacccaaaacttacccaatacgcaaatacaaaaaacacgccgacgaaccgaaaaacgaccttatccctaataacgaaaacaaaaacaacgacaaaaaaaatacgaaacgctcaactacaaccgcgcttctcgccgacgccctcgctacccgaacacaaaaacaaccgccccgcccgttccacccgatacccaaaatcccccaacttctctaacccctccgacgtttacgaaacctcccgaatctaacgaaaacaccgccgttacccgaaaaaactacgaaacaacgcaaaacaaacaataaaaaccgcaaaacaaccccgaaacgccgtccccaccgcccttaccctaacttcgccttaccgccgcgaaaaatccgatacgaacgc

SEQ ID NO: 28495 - DNA, 820 bp, Artificial Sequence
  chemically treated genomic DNA (Homo sapiens) CpG-island No: 28495
aggtaaatttttaataatttgattcggaatttatatacggtatttatttcgtgatagagtattatcggggtggttgataagatttttgattttaaaacgcggttttgcggagagagtggggtaggatcggggagtaaggcgtcgttttttatcgttcgagcgttcgttattttagggtcgtagcgttcggtttcgtcggggttcgtagttcggtagttttttaggttttttagtttttaggtcggggtttttttcgtttttagcgtttcggtatttcgcggtttaagtcgaggtttttttttgcgttcgggtcgcgattattttttaggtttacgtttttcgtttttcgttttcgtatttatcggttcgggaaagtacgttattttcggagcgtcgtaagcggtcgattattttcggggttttttggtttcggaagtttaaggtttgtttagtgcgtaggtgtagaaaatacgtcgacggatcgagaggcgattttgtttttggtagcggaagtaggagtaacggtaggagggatgcggagcgtttagttgtagtcgcgtttttcgtcggcgttttcgttgttcgagtataaggatagtcgtttcgttcgttttattcggtgtttaaggttttttagtttttttgattttttcggcgtttgcggaatttttcgggtttgacgaggatatcgtcgttgttcgaggaggttacggggtaacgtagagtaggtagtggggatcgtagggtagtttcggggcgtcgtttttatcgtttttattttggtttcgttttgtcgtcgcggggaattcggtgcggacgt

SEQ ID NO: 28496 - DNA, 820 bp, Artificial Sequence
  chemically treated genomic DNA (Homo sapiens) CpG-island No: 28496
acgtccgcaccgaattccccgcgacgacaaaacgaaaccaaaataaaaacgataaaaacgacgccccgaaactaccctacgatccccactacctactctacgttaccccgtaacctcctcgaacaacgacgatatcctcgtcaaacccgaaaaattccgcaaacgccgaaaaaatcaaaaaaactaaaaaaccttaaacaccgaataaaacgaacgaaacgactatccttatactcgaacaacgaaaacgccgacgaaaaacgcgactacaactaaacgctccgcatccctcctaccgttactcctacttccgctaccaaaaacaaaatcgcctctcgatccgtcgacgtattttctacacctacgcactaaacaaaccttaaacttccgaaaccaaaaaaccccgaaaataatcgaccgcttacgacgctccgaaaataacgtactttcccgaaccgataaatacgaaaacgaaaaacgaaaaacgtaaacctaaaaaataatcgcgacccgaacgcaaaaaaaaacctcgacttaaaccgcgaaataccgaaacgctaaaaacgaaaaaaaccccgacctaaaaactaaaaaacctaaaaaactaccgaactacgaaccccgacgaaaccgaacgctacgaccctaaaataacgaacgctcgaacgataaaaaacgacgccttactccccgatcctaccccactctctccgcaaaaccgcgttttaaaatcaaaaatcttatcaaccaccccgataatactctatcacgaaataaataccgtatataaattccgaatcaaattattaaaaatttacct

SEQ ID NO: 28497 - DNA, 533 bp, Artificial Sequence
  chemically treated genomic DNA (Homo sapiens) CpG-island No: 28497
tatcgtcggatttagtagttcgttgtcgatcggttgttaagtgacgttagcgcgtagtggcgcgtgcgcggttacggcggagtgcgtgaaagcggacgcgcgtcgtagtagtcggggcggcggcgaggacggcggttacggaagcggttaagggggcggtggcgtagagaggggtgcggagcgggcggaagaggcgtttgtgtcgtagtttggttttagaggagtatcgttggggtgagtagtcgggtttttgtaggggaggtggggtttggtcgtatttgcggcgcggggacgcgcgtttcgtcgtattcgcgcgtattcgttttcgttttttcgtcgtttttttcgggggcggggaggagttgggacggggtttgacgagggttattttttgggttcgggtgttttgggagagcggtagtcgtttcgttcgtagtttacgaaggtgtagtgggaagtagacgtttcggggattcggggtggttttattagttttttaaagagaggagttcgaattaggggtagtttaggtt

SEQ ID NO: 28498 - DNA, 533 bp, Artificial Sequence
  chemically treated genomic DNA (Homo sapiens) CpG-island No: 28498
aacctaaactacccctaattcgaactcctctctttaaaaaactaataaaaccaccccgaatccccgaaacgtctacttcccactacaccttcgtaaactacgaacgaaacgactaccgctctcccaaaacacccgaacccaaaaaataaccctcgtcaaaccccgtcccaactcctccccgcccccgaaaaaaacgacgaaaaaacgaaaacgaatacgcgcgaatacgacgaaacgcgcgtccccgcgccgcaaatacgaccaaaccccacctcccctacaaaaacccgactactcaccccaacgatactcctctaaaaccaaactacgacacaaacgcctcttccgcccgctccgcacccctctctacgccaccgcccccttaaccgcttccgtaaccgccgtcctcgccgccgccccgactactacgacgcgcgtccgctttcacgcactccgccgtaaccgcgcacgcgccactacgcgctaacgtcacttaacaaccgatcgacaacgaactactaaatccgacgata

SEQ ID NO: 28499 - DNA, 533 bp, Artificial Sequence
  chemically treated genomic DNA (Homo sapiens) CpG-island No: 28499
aatttgggttgtttttgattcgaatttttttttttgggaggttggtagagttatttcgaattttcgaaacgtttattttttattatattttcgtggattgcgaacgggacggttatcgtttttttagagtattcgggtttaagaaatgattttcgttaggtttcgttttagttttttttcgttttcggaaaaagcggcggaggggcgggggcgggtgcgcgcggatacggcggggcgcgcgttttcgcgtcgtaggtgcggttaggttttattttttttgtaaggattcggttatttattttagcgatgtttttttgagattaagttgcgatatagacgtttttttcgttcgtttcgtatttttttttgcgttatcgtttttttggtcgttttcgtggtcgtcgttttcgtcgtcgtttcggttgttgcggcgcgcgttcgtttttacgtatttcgtcgtggtcgcgtacgcgttattgcgcgttggcgttatttagtaatcgatcgatagcgggttgttgggttcggcgatg

SEQ ID NO: 28500 - DNA, 533 bp, Artificial Sequence
  chemically treated genomic DNA (Homo sapiens) CpG-island No: 28500
catcgccgaacccaacaacccgctatcgatcgattactaaataacgccaacgcgcaataacgcgtacgcgaccacgacgaaatacgtaaaaacgaacgcgcgccgcaacaaccgaaacgacgacgaaaacgacgaccacgaaaacgaccaaaaaaacgataacgcaaaaaaaaatacgaaacgaacgaaaaaaacgtctatatcgcaacttaatctcaaaaaaacatcgctaaaataaataaccgaatccttacaaaaaaaataaaacctaaccgcacctacgacgcgaaaacgcgcgccccgccgtatccgcgcgcacccgcccccgcccctccgccgctttttccgaaaacgaaaaaaaactaaaacgaaacctaacgaaaatcatttcttaaacccgaatactctaaaaaaacgataaccgtcccgttcgcaatccacgaaaatataataaaaaataaacgtttcgaaaattcgaaataactctaccaacctcccaaaaaaaaaaattcgaatcaaaaacaacccaaatt

SEQ ID NO: 28501 - DNA, 659 bp, Artificial Sequence
  chemically treated genomic DNA (Homo sapiens) CpG-island No: 28501
gttttggaaagggaaaagttgagcggagatatcgggaaagcgacgttttagaaatatcggggtcgtagaagtaatagagggcgagcgggcggacgtcgaggcgggattttcgtagaggtagatgtagtttattttttttttttattgcggttttcgagtttttcgcgggaatgtacgtggggttttttgtcgagttttttcgttttattttagttttgtcgtttagtatttattcggtagaattttttagtatgcgtcgtcgtagtagtcgtagtcgtttgagtcgttttaggggtttcggtcggtcgttttgattggttaggtgaggggtagggtcgggacgtttggtgagcgttattcggcgattcgaagtgttagttttagcgtgggggcgggattaagagcggagttatataatcgattggttaattttcgaggtcggtgcggaggtcgatttttggaatggggcgggtttcggaagggcgagtttcgattggttagttgcgggattggatacgttgagtttagtagcggtagttttagttaggttgggcggtttaggttcggcgtaggcggtagttcggaacggcggggtaggtggggtaggcggttggttatttattgtatttatcgttttatattttttttttttttttttt

SEQ ID NO: 28502 - DNA, 659 bp, Artificial Sequence
  chemically treated genomic DNA (Homo sapiens) CpG-island No: 28502
aaaaaaaaaaaaaaaaaaatataaaacgataaatacaataaataaccaaccgcctaccccacctaccccgccgttccgaactaccgcctacgccgaacctaaaccgcccaacctaactaaaactaccgctactaaactcaacgtatccaatcccgcaactaaccaatcgaaactcgcccttccgaaacccgccccattccaaaaatcgacctccgcaccgacctcgaaaattaaccaatcgattatataactccgctcttaatcccgcccccacgctaaaactaacacttcgaatcgccgaataacgctcaccaaacgtcccgaccctacccctcacctaaccaatcaaaacgaccgaccgaaacccctaaaacgactcaaacgactacgactactacgacgacgcatactaaaaaattctaccgaataaatactaaacgacaaaactaaaataaaacgaaaaaactcgacaaaaaaccccacgtacattcccgcgaaaaactcgaaaaccgcaataaaaaaaaaaaataaactacatctacctctacgaaaatcccgcctcgacgtccgcccgctcgccctctattacttctacgaccccgatatttctaaaacgtcgctttcccgatatctccgctcaacttttccctttccaaaac

SEQ ID NO: 28503 - DNA, 659 bp, Artificial Sequence
  chemically treated genomic DNA (Homo sapiens) CpG-island No: 28503
aaaaaaaaaaaaagaaaagtatgaaacgatgagtataatgagtagttagtcgtttgttttatttatttcgtcgtttcggattgtcgtttgcgtcgagtttaggtcgtttagtttgattgaaattgtcgttgttgaatttagcgtatttagtttcgtagttgattaatcggagttcgttttttcggggttcgttttattttaggaatcgattttcgtatcggtttcgaaaattgattaatcggttgtgtagtttcgtttttagtttcgtttttacgttgaaattgatatttcggatcgtcgagtaacgtttattagacgtttcggttttgttttttatttgattaattaagacggtcggtcgaggtttttggaacggtttaggcggttgcggttgttacggcggcgtatgttaggggattttgtcgggtgagtgttgggcggtaggattggggtggggcggaagggttcggtaggaggttttacgtgtattttcgcgaggggttcgggggtcgtagtggaaaagaagggtaggttgtatttgtttttgcgggggtttcgtttcggcgttcgttcgttcgttttttgttatttttgcggtttcggtgtttttggagcgtcgttttttcggtgttttcgtttagtttttttttttttaaagt

SEQ ID NO: 28504 - DNA, 659 bp, Artificial Sequence
  chemically treated genomic DNA (Homo sapiens) CpG-island No: 28504
actttaaaaaaaaaaaaactaaacgaaaacaccgaaaaaacgacgctccaaaaacaccgaaaccgcaaaaataacaaaaaacgaacgaacgaacgccgaaacgaaacccccgcaaaaacaaatacaacctacccttcttttccactacgacccccgaacccctcgcgaaaatacacgtaaaacctcctaccgaacccttccgccccaccccaatcctaccgcccaacactcacccgacaaaatcccctaacatacgccgccgtaacaaccgcaaccgcctaaaccgttccaaaaacctcgaccgaccgtcttaattaatcaaataaaaaacaaaaccgaaacgtctaataaacgttactcgacgatccgaaatatcaatttcaacgtaaaaacgaaactaaaaacgaaactacacaaccgattaatcaattttcgaaaccgatacgaaaatcgattcctaaaataaaacgaaccccgaaaaaacgaactccgattaatcaactacgaaactaaatacgctaaattcaacaacgacaatttcaatcaaactaaacgacctaaactcgacgcaaacgacaatccgaaacgacgaaataaataaaacaaacgactaactactcattatactcatcgtttcatacttttcttttttttttttt

SEQ ID NO: 28505 - DNA, 1215 bp, Artificial Sequence
  chemically treated genomic DNA (Homo sapiens) CpG-island No: 28505
cgttcgtcgttttatcggggcgtatcgcgttggttttttttcgttagtttttcgagtttcggttatttatttttagcgtagagtagcgttggtagtcggcgtcgcgatggaggaagagttgaagtgtttcgtgtgcggttttttgtttcgggagtttattattttgttttgtttttataatgtttgtttgttttgcgttcgtattatcgcggtgtagatttcggacggtgagtagtatttgttttagtcgtttttgttttttcggggatcggggttgtaggcgggcgtcgtcgtcgttgtttttttggagtacgacgttgcggttggttcggtttgcggcggtgtaggcgggagtgtagttggcggtttcggcggcggtgcgggaggtggcggagattacgcggataagtttagtttgtatagcgagatagatagcggttacgggttttatatttcgagttttaagttttttaacggggttcgcgtgttgtttatggtgttcgtattattcggtttttcggttgcggcggttcggggtgtcgtttgtttttcgttgttttcgttttcgagttttattacgtgttcgtagtgttatcgtagcgtatttttggattatcgcggtttgcgcggtttttagcgtaatcggttgttcgaggttatcgtgtagcggtattagtagggtcgcggggtcgtgtcggggacgtttgtagtcgcggcggtggttatttgttagttgtgcgatcgtatttcgttagagttagtagttacgttttgcgagtagtgcgacgttttttattgttttgtttgttagtttaagtgttatttatttcggggatttttcgttaagtatcgtttggtgtagtcgtcgtcgtcgtcgtcgtcgttcgtcgaggtagttttcgggtttattggtatcgtttagggcgtttttagcggaggcggcggttgtaagagttcgggaggcgcgggggcgggggcgattgggggtagtacggttcgtaagttttttacgtgtttcgagtatgaaatggagaattatagtatgtattgcgtgagttgtcgaatttcggtgtgttatttgtgtttggaggagggtcggtacgttaagtacgaggtgaagtcgttgggggttatgtggaagtagtataaggtgagttcgcgggacgcgggagtgtaggtgttagggaagagggtacgaggagaaaggtttttggt

SEQ ID NO: 28506 - DNA, 1215 bp, Artificial Sequence
  chemically treated genomic DNA (Homo sapiens) CpG-island No: 28506
accaaaaacctttctcctcgtaccctcttccctaacacctacactcccgcgtcccgcgaactcaccttatactacttccacataacccccaacgacttcacctcgtacttaacgtaccgaccctcctccaaacacaaataacacaccgaaattcgacaactcacgcaatacatactataattctccatttcatactcgaaacacgtaaaaaacttacgaaccgtactacccccaatcgcccccgcccccgcgcctcccgaactcttacaaccgccgcctccgctaaaaacgccctaaacgataccaataaacccgaaaactacctcgacgaacgacgacgacgacgacgacgactacaccaaacgatacttaacgaaaaatccccgaaataaataacacttaaactaacaaacaaaacaataaaaaacgtcgcactactcgcaaaacgtaactactaactctaacgaaatacgatcgcacaactaacaaataaccaccgccgcgactacaaacgtccccgacacgaccccgcgaccctactaataccgctacacgataacctcgaacaaccgattacgctaaaaaccgcgcaaaccgcgataatccaaaaatacgctacgataacactacgaacacgtaataaaactcgaaaacgaaaacaacgaaaaacaaacgacaccccgaaccgccgcaaccgaaaaaccgaataatacgaacaccataaacaacacgcgaaccccgttaaaaaacttaaaactcgaaatataaaacccgtaaccgctatctatctcgctatacaaactaaacttatccgcgtaatctccgccacctcccgcaccgccgccgaaaccgccaactacactcccgcctacaccgccgcaaaccgaaccaaccgcaacgtcgtactccaaaaaaacaacgacgacgacgcccgcctacaaccccgatccccgaaaaaacaaaaacgactaaaacaaatactactcaccgtccgaaatctacaccgcgataatacgaacgcaaaacaaacaaacattataaaaacaaaacaaaataataaactcccgaaacaaaaaaccgcacacgaaacacttcaactcttcctccatcgcgacgccgactaccaacgctactctacgctaaaaataaataaccgaaactcgaaaaactaacgaaaaaaaaccaacgcgatacgccccgataaaacgacgaacg

SEQ ID NO: 28507 - DNA, 1215 bp, Artificial Sequence
  chemically treated genomic DNA (Homo sapiens) CpG-island No: 28507
gttaaaagttttttttttcgtatttttttttttggtatttgtattttcgcgtttcgcgggtttattttgtgttgtttttatatggtttttagcggttttatttcgtgtttggcgtgtcggtttttttttaggtatagataatatatcggggttcgatagtttacgtagtatatgttgtagttttttattttatgttcgggatacgtggggaatttgcgggtcgtgttgtttttagtcgttttcgttttcgcgtttttcgggtttttgtagtcgtcgttttcgttgggggcgttttgggcggtgttagtgggttcggaggttgtttcggcgggcggcggcggcggcggcggcggttgtattaggcgatgtttggcgaagggttttcgggatggatggtatttgagttggtaggtagagtagtagaggacgtcgtattgttcgtagagcgtggttgttggttttggcggggtgcggtcgtatagttggtagatggttatcgtcgcggttgtagacgttttcggtacggtttcgcggttttgttggtatcgttgtacgatggtttcgagtagtcggttgcgttggaagtcgcgtaggtcgcggtggtttagggatgcgttgcggtggtattgcgggtacgtgatggagttcgaagacgaggatagcgaggagtaggcggtatttcgagtcgtcgtagtcgaggagtcgggtggtgcgggtattatgggtagtacgcgaatttcgttgggggatttgaggttcggggtgtaggattcgtagtcgttgtttgtttcgttgtataagttgagtttgttcgcgtggttttcgttatttttcgtatcgtcgtcgaggtcgttagttgtattttcgtttgtatcgtcgtaggtcgggttagtcgtagcgtcgtgttttagagaggtagcggcggcggcgttcgtttgtagtttcgattttcgggaaagtaggagcggttggggtaggtgttgtttatcgttcggggtttgtatcgcgatggtgcgagcgtaaggtaggtagatattgtgggaatagggtaggatgataggttttcgaaatagagagtcgtatacgggatattttagttttttttttatcgcggcgtcggttgttagcgttgttttgcgttggggatgaatggtcggagttcgggagattggcggaggaggattagcgcggtgcgtttcggtgagacgacgggcg

SEQ ID NO: 28508 - DNA, 1215 bp, Artificial Sequence
  chemically treated genomic DNA (Homo sapiens) CpG-island No: 28508
cgcccgtcgtctcaccgaaacgcaccgcgctaatcctcctccgccaatctcccgaactccgaccattcatccccaacgcaaaacaacgctaacaaccgacgccgcgataaaaaaaaaactaaaatatcccgtatacgactctctatttcgaaaacctatcatcctaccctattcccacaatatctacctaccttacgctcgcaccatcgcgatacaaaccccgaacgataaacaacacctaccccaaccgctcctactttcccgaaaatcgaaactacaaacgaacgccgccgccgctacctctctaaaacacgacgctacgactaacccgacctacgacgatacaaacgaaaatacaactaacgacctcgacgacgatacgaaaaataacgaaaaccacgcgaacaaactcaacttatacaacgaaacaaacaacgactacgaatcctacaccccgaacctcaaatcccccaacgaaattcgcgtactacccataatacccgcaccacccgactcctcgactacgacgactcgaaataccgcctactcctcgctatcctcgtcttcgaactccatcacgtacccgcaataccaccgcaacgcatccctaaaccaccgcgacctacgcgacttccaacgcaaccgactactcgaaaccatcgtacaacgataccaacaaaaccgcgaaaccgtaccgaaaacgtctacaaccgcgacgataaccatctaccaactatacgaccgcaccccgccaaaaccaacaaccacgctctacgaacaatacgacgtcctctactactctacctaccaactcaaataccatccatcccgaaaacccttcgccaaacatcgcctaatacaaccgccgccgccgccgccgccgcccgccgaaacaacctccgaacccactaacaccgcccaaaacgcccccaacgaaaacgacgactacaaaaacccgaaaaacgcgaaaacgaaaacgactaaaaacaacacgacccgcaaattccccacgtatcccgaacataaaataaaaaactacaacatatactacgtaaactatcgaaccccgatatattatctatacctaaaaaaaaaccgacacgccaaacacgaaataaaaccgctaaaaaccatataaaaacaacacaaaataaacccgcgaaacgcgaaaatacaaataccaaaaaaaaaaatacgaaaaaaaaaacttttaac

SEQ ID NO: 28509 - DNA, 585 bp, Artificial Sequence
  chemically treated genomic DNA (Homo sapiens) CpG-island No: 28509
tttgcgtcgcgggcggggcgatttcgggggtcgcgcgttttttttcggagcgcgttttttttttcggagcgcgcgttcgacggtttgtcgcggtttcggcgttttcgttttttcgggcgtttcgtagtcgtgacgtgtacgtcgtagtgtcggggattcggcggggcgtcggtcggcgggcggagatcgattcgggatttgttcgagtaggaagttagttttagttcggtcgttgtcgtcgttttgttttggtgttcgttcgcgtcgtcgttttttttattggtttttattattttttatcgcgttttttagttttattcgtataggtagtttcgtcgtcgcgtatttgttttcgttttcgtatcggtgagtgttttagagatttattgcggggcgtcggcgtcggggtttcgcgttttttggttcggttttgttttcgggttttttcgagtagtttcggggtcgacgtttttgtttattgttcgaggacgcgggtgggagaagtaggtgatggatgggtgggttttgggtagtagtggggtcggcggtggttttcgtttttatcgaaagataattagttttttt

SEQ ID NO: 28510 - DNA, 585 bp, Artificial Sequence
  chemically treated genomic DNA (Homo sapiens) CpG-island No: 28510
aaaaaaactaattatctttcgataaaaacgaaaaccaccgccgaccccactactacccaaaacccacccatccatcacctacttctcccacccgcgtcctcgaacaataaacaaaaacgtcgaccccgaaactactcgaaaaaacccgaaaacaaaaccgaaccaaaaaacgcgaaaccccgacgccgacgccccgcaataaatctctaaaacactcaccgatacgaaaacgaaaacaaatacgcgacgacgaaactacctatacgaataaaactaaaaaacgcgataaaaaataataaaaaccaataaaaaaaacgacgacgcgaacgaacaccaaaacaaaacgacgacaacgaccgaactaaaactaacttcctactcgaacaaatcccgaatcgatctccgcccgccgaccgacgccccgccgaatccccgacactacgacgtacacgtcacgactacgaaacgcccgaaaaaacgaaaacgccgaaaccgcgacaaaccgtcgaacgcgcgctccgaaaaaaaaaacgcgctccgaaaaaaaacgcgcgacccccgaaatcgccccgcccgcgacgcaaa

SEQ ID NO: 28511 - DNA, 585 bp, Artificial Sequence
  chemically treated genomic DNA (Homo sapiens) CpG-island No: 28511
aaggagattgattgtttttcggtggaaacgagaattatcgtcggttttattgttgtttagggtttatttatttattatttgttttttttattcgcgttttcgggtagtgaatagaagcgtcggtttcggagttgttcgaggaggttcgggagtaaggtcgggttagggaacgcgagatttcggcgtcgacgtttcgtagtgggtttttgggatatttatcggtgcgggagcgaaggtaggtgcgcggcggcggggttatttgtacgggtgaagttggagggcgcggtgagaagtgatgagggttagtgaagagggcgacgacgcggacgggtattaggatagggcggcgatagcggtcgggttgaggttggttttttgttcggatagatttcgagtcggttttcgttcgtcggtcggcgtttcgtcgagttttcggtattgcggcgtgtacgttacggttacggagcgttcgaaggggcgggggcgtcggggtcgcggtaggtcgtcgggcgcgcgtttcgggagggagggcgcgtttcgggagagggcgcgcgattttcggggtcgtttcgttcgcggcgtaga

SEQ ID NO: 28512 - DNA, 585 bp, Artificial Sequence
  chemically treated genomic DNA (Homo sapiens) CpG-island No: 28512
tctacgccgcgaacgaaacgaccccgaaaatcgcgcgccctctcccgaaacgcgccctccctcccgaaacgcgcgcccgacgacctaccgcgaccccgacgcccccgccccttcgaacgctccgtaaccgtaacgtacacgccgcaataccgaaaactcgacgaaacgccgaccgacgaacgaaaaccgactcgaaatctatccgaacaaaaaaccaacctcaacccgaccgctatcgccgccctatcctaatacccgtccgcgtcgtcgccctcttcactaaccctcatcacttctcaccgcgccctccaacttcacccgtacaaataaccccgccgccgcgcacctaccttcgctcccgcaccgataaatatcccaaaaacccactacgaaacgtcgacgccgaaatctcgcgttccctaacccgaccttactcccgaacctcctcgaacaactccgaaaccgacgcttctattcactacccgaaaacgcgaataaaaaaaacaaataataaataaataaaccctaaacaacaataaaaccgacgataattctcgtttccaccgaaaaacaatcaatctcctt

SEQ ID NO: 28513 - DNA, 625 bp, Artificial Sequence
  chemically treated genomic DNA (Homo sapiens) CpG-island No: 28513
tacgttgcggtagcgaaggaaggaaatttagataaggggtaaatattcgatggtgggtacgttttgttattcgggggttggggggataggggcgagaaggaaagaaatgagggtgtacggagcgcggaggtatagcggtagttgtagtttgagcgttcgtcgacgggtatttgttcgcgggatatttaggtcggtagtgtttaagttttagttgcggtgtagaggaatttgtgtcgcgttcggggttgtcgtttgggggttttcgtcgtaagcgaggcgaacgtagtatcgtttcgggagaaggtgacggggtgtcgagggtaatagagaggggcgtgcgtttatacgtgcgcgagttgtaggtgtttaggggcggcgcgtgtacgtcggagtgcgcgcgagtgtgcgcgtgtgtatatacggatatcggagggaggcggtatcggtcgggagggcgcgaggcgggagttcgggcggagggcgtcgcggtatatatagtttgattttcgtttttattttaatttttatcgttcgtatttttaggattcgacgggtcggtatattttttttttttttttatatttttttttttttgttgttggggtatatgttgtcgtgggggtgg

SEQ ID NO: 28514 - DNA, 625 bp, Artificial Sequence
  chemically treated genomic DNA (Homo sapiens) CpG-island No: 28514
ccacccccacgacaacatataccccaacaacaaaaaaaaaaaaatataaaaaaaaaaaaaaaatataccgacccgtcgaatcctaaaaatacgaacgataaaaattaaaataaaaacgaaaatcaaactatatataccgcgacgccctccgcccgaactcccgcctcgcgccctcccgaccgataccgcctccctccgatatccgtatatacacacgcgcacactcgcgcgcactccgacgtacacgcgccgcccctaaacacctacaactcgcgcacgtataaacgcacgcccctctctattaccctcgacaccccgtcaccttctcccgaaacgatactacgttcgcctcgcttacgacgaaaacccccaaacgacaaccccgaacgcgacacaaattcctctacaccgcaactaaaacttaaacactaccgacctaaatatcccgcgaacaaatacccgtcgacgaacgctcaaactacaactaccgctatacctccgcgctccgtacaccctcatttctttccttctcgcccctatccccccaacccccgaataacaaaacgtacccaccatcgaatatttaccccttatctaaatttccttccttcgctaccgcaacgta

SEQ ID NO: 28515 - DNA, 625 bp, Artificial Sequence
  chemically treated genomic DNA (Homo sapiens) CpG-island No: 28515
ttatttttacggtaatatgtattttagtaataagaagaaaaaggtgtggagagaggagaaaggtatatcggttcgtcgagttttgggggtgcgggcggtgggggttagggtgaggacgggggttaggttgtgtgtgtcgcggcgtttttcgttcgagttttcgtttcgcgttttttcggtcggtgtcgttttttttcggtgttcgtgtgtatatacgcgtatattcgcgcgtatttcggcgtgtacgcgtcgtttttgggtatttgtagttcgcgtacgtgtgggcgtacgtttttttttgttgttttcggtatttcgttattttttttcgaggcggtgttgcgttcgtttcgtttgcggcggggatttttaggcggtagtttcgggcgcggtataagtttttttgtatcgtagttgggatttgggtattgtcggtttgggtgtttcgcggataggtgttcgtcggcgggcgtttaggttgtagttgtcgttgtgttttcgcgtttcgtgtatttttatttttttttttttcgtttttgtttttttagttttcgaatggtaaagcgtatttattatcgggtgtttattttttgtttaggtttttttttttcgttgtcgtagcgtg

SEQ ID NO: 28516 - DNA, 625 bp, Artificial Sequence
  chemically treated genomic DNA (Homo sapiens) CpG-island No: 28516
cacgctacgacaacgaaaaaaaaaaacctaaacaaaaaataaacacccgataataaatacgctttaccattcgaaaactaaaaaaacaaaaacgaaaaaaaaaaaaataaaaatacacgaaacgcgaaaacacaacgacaactacaacctaaacgcccgccgacgaacacctatccgcgaaacacccaaaccgacaatacccaaatcccaactacgatacaaaaaaacttataccgcgcccgaaactaccgcctaaaaatccccgccgcaaacgaaacgaacgcaacaccgcctcgaaaaaaaataacgaaataccgaaaacaacaaaaaaaaacgtacgcccacacgtacgcgaactacaaatacccaaaaacgacgcgtacacgccgaaatacgcgcgaatatacgcgtatatacacacgaacaccgaaaaaaaacgacaccgaccgaaaaaacgcgaaacgaaaactcgaacgaaaaacgccgcgacacacacaacctaacccccgtcctcaccctaacccccaccgcccgcacccccaaaactcgacgaaccgatatacctttctcctctctccacacctttttcttcttattactaaaatacatattaccgtaaaaataa

SEQ ID NO: 28517 - DNA, 588 bp, Artificial Sequence
  chemically treated genomic DNA (Homo sapiens) CpG-island No: 28517
gttcgtcgttttttagtcgtcgttttttttttttagttcgcgttcggtttcggtttttattcgttttagtttcgcggacgtcgttatagtagtattttagagtttgttaattaggttacgtttcgcgttaatttaatattcgcgtaggtatcgtttattagtcgttaggtagcgtcgttttttattggttgtattgttcgtcgtttttcgtgttttagttacggcgcgttttaatttgggttttagggcgtacgcgtaggcgtaggttcgggttcgacgtcgacgacgttagggagttggagggggcggagttagggagcgagggggcggagttagggagcgagggggttggagttgttttcgagacgtgggcgcggcgtgaagtcgacgtttagtgggagagggaggtggatcgcgtttatcgttggttttttggaagatttgagggcgtggtttgtagagttaggtgcgttaagtgataggcgagttagcggaaagtcgttttagggatttggaggatgtagaagtgggaggagatcgagggttaatacgaattgttcgtgtttattttaattgttttgttgagga

SEQ ID NO: 28518 - DNA, 588 bp, Artificial Sequence
  chemically treated genomic DNA (Homo sapiens) CpG-island No: 28518
tcctcaacaaaacaattaaaataaacacgaacaattcgtattaaccctcgatctcctcccacttctacatcctccaaatccctaaaacgactttccgctaactcgcctatcacttaacgcacctaactctacaaaccacgccctcaaatcttccaaaaaaccaacgataaacgcgatccacctccctctcccactaaacgtcgacttcacgccgcgcccacgtctcgaaaacaactccaaccccctcgctccctaactccgccccctcgctccctaactccgccccctccaactccctaacgtcgtcgacgtcgaacccgaacctacgcctacgcgtacgccctaaaacccaaattaaaacgcgccgtaactaaaacacgaaaaacgacgaacaatacaaccaataaaaaacgacgctacctaacgactaataaacgatacctacgcgaatattaaattaacgcgaaacgtaacctaattaacaaactctaaaatactactataacgacgtccgcgaaactaaaacgaataaaaaccgaaaccgaacgcgaactaaaaaaaaaaaacgacgactaaaaaacgacgaac

SEQ ID NO: 28519 - DNA, 588 bp, Artificial Sequence
  chemically treated genomic DNA (Homo sapiens) CpG-island No: 28519
tttttaatagggtagttggagtgagtacggataattcgtgttgattttcggtttttttttatttttatattttttaagtttttgaggcgatttttcgttagttcgtttgttatttggcgtatttggttttataggttacgtttttaagttttttaagaggttagcggtaagcgcggtttattttttttttttattaggcgtcggttttacgtcgcgtttacgtttcgaggatagttttagttttttcgttttttggtttcgttttttcgttttttggtttcgttttttttagttttttagcgtcgtcggcgtcgagttcgagtttgcgtttgcgcgtgcgttttggggtttaagttggggcgcgtcgtggttagaatacggagagcggcgggtagtgtagttaatgggaggcggcgttgtttagcggttggtaggcggtgtttgcgcgggtgttaggttagcgcgaggcgtgatttagttgataggttttgaggtgttgttgtggcggcgttcgcggggttgaggcgggtgggagtcggagtcgagcgcgggttgagggaggagggcggcgattggagagcggcgagt

SEQ ID NO: 28520 - DNA, 588 bp, Artificial Sequence
  chemically treated genomic DNA (Homo sapiens) CpG-island No: 28520
actcgccgctctccaatcgccgccctcctccctcaacccgcgctcgactccgactcccacccgcctcaaccccgcgaacgccgccacaacaacacctcaaaacctatcaactaaatcacgcctcgcgctaacctaacacccgcgcaaacaccgcctaccaaccgctaaacaacgccgcctcccattaactacactacccgccgctctccgtattctaaccacgacgcgccccaacttaaaccccaaaacgcacgcgcaaacgcaaactcgaactcgacgccgacgacgctaaaaaactaaaaaaaacgaaaccaaaaaacgaaaaaacgaaaccaaaaaacgaaaaaactaaaactatcctcgaaacgtaaacgcgacgtaaaaccgacgcctaataaaaaaaaaaaataaaccgcgcttaccgctaacctcttaaaaaacttaaaaacgtaacctataaaaccaaatacgccaaataacaaacgaactaacgaaaaatcgcctcaaaaacttaaaaaatataaaaataaaaaaaaaccgaaaatcaacacgaattatccgtactcactccaactaccctattaaaaa

SEQ ID NO: 28521 - DNA, 727 bp, Artificial Sequence
  chemically treated genomic DNA (Homo sapiens) CpG-island No: 28521
  unsure (271)
agtgagggaataaggaggtttcgcgtgcggcgtttttagttattgcgcgtttcgcggagattgggtgttatcgttgttttcgttgttgagttttgttcgtcggtcggttcgttcgttagttcgttttttttcgtttagggggaaaggttagtagcgttttggagtcgtcgtgttatttttcgaaagttatgaattgtagcgagacgtagcgttgcgaatttttttgagtcggtttgttgttcgagttgtattatcggggaatgttagcgtnttgggcgttggttttcgtttagtatgggtatgggggtcgtgtttgattttttcgtgggtcgcgaggtgattagcgttaagggcgacgacgtttatttttatattttgtttattatgattttttacgtttgtttgtcggaggttttttttggtttatattcgtttcgtaagttcgtcgaggttaagacgagcgttttaggtttgcgtcgagtacgaatgggtttcgggaggcgtttgatcgtcgacgtcgaggcgtcgcgggtttttaggtcgaggtcgtcgttagtttgttttcgagggttgttttgttttcgtttagggcgttgagcgggtttaaaattatagttttagattgttggttcgcgttttttttatttcgtttatttttgggcgcgttttttattttttatttttaatttttttttagggttcgttttatttgaggtttagataatgg

SEQ ID NO: 28522 - DNA, 727 bp, Artificial Sequence
  chemically treated genomic DNA (Homo sapiens) CpG-island No: 28522
  unsure (457)
ccattatctaaacctcaaataaaacgaaccctaaaaaaaaattaaaaataaaaaataaaaaacgcgcccaaaaataaacgaaataaaaaaaacgcgaaccaacaatctaaaactataattttaaacccgctcaacgccctaaacgaaaacaaaacaaccctcgaaaacaaactaacgacgacctcgacctaaaaacccgcgacgcctcgacgtcgacgatcaaacgcctcccgaaacccattcgtactcgacgcaaacctaaaacgctcgtcttaacctcgacgaacttacgaaacgaatataaaccaaaaaaaacctccgacaaacaaacgtaaaaaatcataataaacaaaatataaaaataaacgtcgtcgcccttaacgctaatcacctcgcgacccacgaaaaaatcaaacacgacccccatacccatactaaacgaaaaccaacgcccaanacgctaacattccccgataatacaactcgaacaacaaaccgactcaaaaaaattcgcaacgctacgtctcgctacaattcataactttcgaaaaataacacgacgactccaaaacgctactaacctttccccctaaacgaaaaaaaacgaactaacgaacgaaccgaccgacgaacaaaactcaacaacgaaaacaacgataacacccaatctccgcgaaacgcgcaataactaaaaacgccgcacgcgaaacctccttattccctcact

SEQ ID NO: 28523 - DNA, 727 bp, Artificial Sequence
  chemically treated genomic DNA (Homo sapiens) CpG-island No: 28523
  unsure (457)
ttattatttgggttttagatgaggcgaattttggaagggagttgggggtggaaggtgggaggcgcgtttagggatgagcgagatgaggagggcgcgaattagtaatttggggttgtggttttagattcgtttagcgttttgggcgaaggtagggtagttttcggaggtaagttggcggcggtttcggtttgggagttcgcggcgtttcggcgtcggcggttaggcgtttttcggggtttattcgtgttcggcgtaagtttgggacgttcgttttggtttcgacgagtttacggagcgggtgtaggttaggagaggttttcggtaagtaggcgtagaagattatgatgagtaggatgtagagataggcgtcgtcgtttttggcgttggttatttcgcggtttacgaaaaggttaggtacgatttttatgtttatgttggacgaaggttagcgtttaangcgttggtatttttcggtggtgtagttcgagtaataggtcggtttagaagggttcgtagcgttgcgtttcgttgtagtttatggttttcggggagtgatacggcggttttaggacgttgttgatttttttttttgggcgaggggaagcgagttagcgagcgggtcggtcggcgggtagggtttagtagcggaaatagcggtagtatttagttttcgcggagcgcgtagtggttgggggcgtcgtacgcggggtttttttatttttttatt

SEQ ID NO: 28524 - DNA, 727 bp, Artificial Sequence
  chemically treated genomic DNA (Homo sapiens) CpG-island No: 28524
  unsure (271)
aataaaaaaataaaaaaaccccgcgtacgacgcccccaaccactacgcgctccgcgaaaactaaatactaccgctatttccgctactaaaccctacccgccgaccgacccgctcgctaactcgcttcccctcgcccaaaaaaaaaaatcaacaacgtcctaaaaccgccgtatcactccccgaaaaccataaactacaacgaaacgcaacgctacgaacccttctaaaccgacctattactcgaactacaccaccgaaaaataccaacgcnttaaacgctaaccttcgtccaacataaacataaaaatcgtacctaaccttttcgtaaaccgcgaaataaccaacgccaaaaacgacgacgcctatctctacatcctactcatcataatcttctacgcctacttaccgaaaacctctcctaacctacacccgctccgtaaactcgtcgaaaccaaaacgaacgtcccaaacttacgccgaacacgaataaaccccgaaaaacgcctaaccgccgacgccgaaacgccgcgaactcccaaaccgaaaccgccgccaacttacctccgaaaactaccctaccttcgcccaaaacgctaaacgaatctaaaaccacaaccccaaattactaattcgcgccctcctcatctcgctcatccctaaacgcgcctcccaccttccacccccaactcccttccaaaattcgcctcatctaaaacccaaataataa

SEQ ID NO: 28525 - DNA, 653 bp, Artificial Sequence
  chemically treated genomic DNA (Homo sapiens) CpG-island No: 28525
ggttgtcgaattacgggttttttatgttcgtcgcgcggttttgtggggtttgtagttcgcgacgcgcggttttgtggggtttgtagttcgcgacgcgcggttttgtggggtttgtagttcgcgacgcgcggttttgtggggtttgtagttcgcgacgcgcggttttgtggggtttgtagttcgcggtgggtaagagagggattcgttagttttcggcggtttatgcgcgtcgttcggttaggttcgtaaagaggttttcgagcgttatggttgcgttttcggttcgcgcggacgttgatttttcgtttacgtcgttatttacggttcgagatatattaggtcggtaggttgagaaaagcgagatcgcgtgcgaggatcggtaggcgtgggtttcgtttttattttattggcgagcgggaaggggttgtagattcggtcgagttgggcgggtggttcgttttcgtcgcgagtttaagttttttattttcggaggttaggcggcggcgtttcgtttttttacgtgtcgggtggaatttcgcgggtttgaagcggtcgggaggacggatttggtttaagtcggtaggtttttcggggttcggggaaggagttcgggtgcgtatttttagcgttgattttggtttttgttttcggtg

SEQ ID NO: 28526 - DNA, 653 bp, Artificial Sequence
  chemically treated genomic DNA (Homo sapiens) CpG-island No: 28526
caccgaaaacaaaaaccaaaatcaacgctaaaaatacgcacccgaactccttccccgaaccccgaaaaacctaccgacttaaaccaaatccgtcctcccgaccgcttcaaacccgcgaaattccacccgacacgtaaaaaaacgaaacgccgccgcctaacctccgaaaataaaaaacttaaactcgcgacgaaaacgaaccacccgcccaactcgaccgaatctacaaccccttcccgctcgccaataaaataaaaacgaaacccacgcctaccgatcctcgcacgcgatctcgcttttctcaacctaccgacctaatatatctcgaaccgtaaataacgacgtaaacgaaaaatcaacgtccgcgcgaaccgaaaacgcaaccataacgctcgaaaacctctttacgaacctaaccgaacgacgcgcataaaccgccgaaaactaacgaatccctctcttacccaccgcgaactacaaaccccacaaaaccgcgcgtcgcgaactacaaaccccacaaaaccgcgcgtcgcgaactacaaaccccacaaaaccgcgcgtcgcgaactacaaaccccacaaaaccgcgcgtcgcgaactacaaaccccacaaaaccgcgcgacgaacataaaaaacccgtaattcgacaacc

SEQ ID NO: 28527 - DNA, 653 bp, Artificial Sequence
  chemically treated genomic DNA (Homo sapiens) CpG-island No: 28527
tatcgggggtagagattaaggttaacgttgggggtgcgtattcggatttttttttcgagtttcgaggagtttgtcggtttgggttaggttcgttttttcggtcgttttaagttcgcggggttttattcggtacgtgggagaacggggcgtcgtcgtttggttttcgggagtgggggatttgggttcgcggcggggacggattattcgtttagttcggtcggatttgtagttttttttcgttcgttagtggagtggaggcgaggtttacgtttatcggttttcgtacgcggtttcgttttttttagtttgtcggtttggtgtgtttcgggtcgtaggtggcgacgtgggcgaaggattagcgttcgcgcgggtcgggggcgtagttatggcgttcggaggtttttttgcgggtttggtcgggcggcgcgtatgggtcgtcgggagttggcgggttttttttttgtttatcgcggattataagttttataaggtcgcgcgtcgcggattataagttttataaggtcgcgcgtcgcggattataagttttataaggtcgcgcgtcgcggattataagttttataaggtcgcgcgtcgcggattataagttttataaggtcgcgcggcgggtatgggggattcgtagttcggtagtt

SEQ ID NO: 28528 - DNA, 653 bp, Artificial Sequence
  chemically treated genomic DNA (Homo sapiens) CpG-island No: 28528
aactaccgaactacgaatcccccatacccgccgcgcgaccttataaaacttataatccgcgacgcgcgaccttataaaacttataatccgcgacgcgcgaccttataaaacttataatccgcgacgcgcgaccttataaaacttataatccgcgacgcgcgaccttataaaacttataatccgcgataaacaaaaaaaaaacccgccaactcccgacgacccatacgcgccgcccgaccaaacccgcaaaaaaacctccgaacgccataactacgcccccgacccgcgcgaacgctaatccttcgcccacgtcgccacctacgacccgaaacacaccaaaccgacaaactaaaaaaaacgaaaccgcgtacgaaaaccgataaacgtaaacctcgcctccactccactaacgaacgaaaaaaaactacaaatccgaccgaactaaacgaataatccgtccccgccgcgaacccaaatcccccactcccgaaaaccaaacgacgacgccccgttctcccacgtaccgaataaaaccccgcgaacttaaaacgaccgaaaaaacgaacctaacccaaaccgacaaactcctcgaaactcgaaaaaaaaatccgaatacgcacccccaacgttaaccttaatctctacccccgata

SEQ ID NO: 28529 - DNA, 585 bp, Artificial Sequence
  chemically treated genomic DNA (Homo sapiens) CpG-island No: 28529
ggagtcgtgtttaggggcgtacggacgtttttcgttttggcggatagttttggtgtacgtaggttcgcgcgtcgtcgatatatttcggagttttcggagcgcgttcggtatatagggttcggcggtaggtgtttcgtcgcgtatattcgcgggtcgcggggatcggttcgggcgcggggtcggttggggcggggcggggcggcggcgcgcgtttttcgtcggttatatcggtcgttttgtattcggcgaggggcgtgtgcgcgggtttggtattcgcgggttttatgtttatcgagttgaggtttaagttgagtttttcgcgtggtcgcgtcggggtcgtgcgcgcgggtttcggggagcgtcgggatgtggacggtgagcggggttggattggggagcggggatttttcgggcgggggttttagggatttagaggtacgggggcggggcgggattcggcgggtttcgagcggcggtggttgggggtattcggcggatgtttcggtttaacggggtttcgtagtttttgttttgttttagggggtagttagttttaggttttgggggttagcgcgtttttggttt

SEQ ID NO: 28530 - DNA, 585 bp, Artificial Sequence
  chemically treated genomic DNA (Homo sapiens) CpG-island No: 28530
aaaccaaaaacgcgctaacccccaaaacctaaaactaactaccccctaaaacaaaacaaaaactacgaaaccccgttaaaccgaaacatccgccgaatacccccaaccaccgccgctcgaaacccgccgaatcccgccccgcccccgtacctctaaatccctaaaacccccgcccgaaaaatccccgctccccaatccaaccccgctcaccgtccacatcccgacgctccccgaaacccgcgcgcacgaccccgacgcgaccacgcgaaaaactcaacttaaacctcaactcgataaacataaaacccgcgaataccaaacccgcgcacacgcccctcgccgaatacaaaacgaccgatataaccgacgaaaaacgcgcgccgccgccccgccccgccccaaccgaccccgcgcccgaaccgatccccgcgacccgcgaatatacgcgacgaaacacctaccgccgaaccctatataccgaacgcgctccgaaaactccgaaatatatcgacgacgcgcgaacctacgtacaccaaaactatccgccaaaacgaaaaacgtccgtacgcccctaaacacgactcc

SEQ ID NO: 28531 - DNA, 585 bp, Artificial Sequence
  chemically treated genomic DNA (Homo sapiens) CpG-island No: 28531
aagttaagggcgcgttgatttttaaggtttgaggttggttgttttttaaagtaggataaaggttacgggatttcgttgagtcgagatattcgtcgaatatttttagttatcgtcgttcgaagttcgtcgggtttcgtttcgttttcgtgtttttgggtttttgagattttcgttcgagaaattttcgttttttaatttagtttcgtttatcgtttatatttcggcgtttttcgaagttcgcgcgtacggtttcggcgcggttacgcggggggtttagtttggattttagttcggtgaatatggggttcgcgggtgttaggttcgcgtatacgtttttcgtcgagtgtagggcggtcggtgtggtcggcggggaacgcgcgtcgtcgtttcgtttcgttttagtcggtttcgcgttcgagtcggttttcgcggttcgcgagtgtgcgcgacgaggtatttgtcgtcgagttttgtgtgtcgggcgcgtttcgggagtttcgaggtgtgtcggcggcgcgcgggtttgcgtgtattaaggttgttcgttagggcgaggggcgttcgtgcgtttttgggtacggtttt

SEQ ID NO: 28532 - DNA, 585 bp, Artificial Sequence
  chemically treated genomic DNA (Homo sapiens) CpG-island No: 28532
aaaaccgtacccaaaaacgcacgaacgcccctcgccctaacgaacaaccttaatacacgcaaacccgcgcgccgccgacacacctcgaaactcccgaaacgcgcccgacacacaaaactcgacgacaaatacctcgtcgcgcacactcgcgaaccgcgaaaaccgactcgaacgcgaaaccgactaaaacgaaacgaaacgacgacgcgcgttccccgccgaccacaccgaccgccctacactcgacgaaaaacgtatacgcgaacctaacacccgcgaaccccatattcaccgaactaaaatccaaactaaaccccccgcgtaaccgcgccgaaaccgtacgcgcgaacttcgaaaaacgccgaaatataaacgataaacgaaactaaattaaaaaacgaaaatttctcgaacgaaaatctcaaaaacccaaaaacacgaaaacgaaacgaaacccgacgaacttcgaacgacgataactaaaaatattcgacgaatatctcgactcaacgaaatcccgtaacctttatcctactttaaaaaacaaccaacctcaaaccttaaaaatcaacgcgcccttaactt

SEQ ID NO: 28533 - DNA, 725 bp, Artificial Sequence
  chemically treated genomic DNA (Homo sapiens) CpG-island No: 28533
ttttcgtcgaattacgttttttttttttggttcgttcgtagtttcggtttattaggttgagtcgggtaaattaggacgggttaagcggtatttttattggatattattggtgggggcgggaagaaggcggagtacgtgttcgggcggaagtagtcgtcgtatcgcggattacgaaacgtcgcggagttgaggtagtttcgttggttagtgtgtacgcggcgagtttttttcggcgtcgttcgttcggtttttatagcgttcgcgatagcggttcggacgtcgttcgaatatggatttcgtcggttaaggtatttgtcgggttcggttttttcgtcgtagatgggtttaggttgttcgttgtttttcgtttttcggggtcgcgtttgcgattttttgttttttcggtttcggtttatttatttcgcggtttttttttagttttcggggttattgatttcgaagtttatgatggtcgtggtgtgttttttgttcgcggtttagatcgttttttgggttttttttagtcgtttttttggttttttttgggatcgtttcgaggtgtggttttttggcgttcgtcgttgttttcgtagtttgggttttgtcgtttttagtaggtttcgtttatgtcgtttatttcgtgttttgtttttgtttgttttgttatttttcggtttttgcgcggggttttcgggtttacgttgtttggttttggatttagttcg

SEQ ID NO: 28534 - DNA, 725 bp, Artificial Sequence
  chemically treated genomic DNA (Homo sapiens) CpG-island No: 28534
cgaactaaatccaaaaccaaacaacgtaaacccgaaaaccccgcgcaaaaaccgaaaaataacaaaacaaacaaaaacaaaacacgaaataaacgacataaacgaaacctactaaaaacgacaaaacccaaactacgaaaacaacgacgaacgccaaaaaaccacacctcgaaacgatcccaaaaaaaaccaaaaaaacgactaaaaaaaacccaaaaaacgatctaaaccgcgaacaaaaaacacaccacgaccatcataaacttcgaaatcaataaccccgaaaactaaaaaaaaaccgcgaaataaataaaccgaaaccgaaaaaacaaaaaatcgcaaacgcgaccccgaaaaacgaaaaacaacgaacaacctaaacccatctacgacgaaaaaaccgaacccgacaaataccttaaccgacgaaatccatattcgaacgacgtccgaaccgctatcgcgaacgctataaaaaccgaacgaacgacgccgaaaaaaactcgccgcgtacacactaaccaacgaaactacctcaactccgcgacgtttcgtaatccgcgatacgacgactacttccgcccgaacacgtactccgccttcttcccgcccccaccaataatatccaataaaaataccgcttaacccgtcctaatttacccgactcaacctaataaaccgaaactacgaacgaaccaaaaaaaaaaaacgtaattcgacgaaaa

SEQ ID NO: 28535 - DNA, 725 bp, Artificial Sequence
  chemically treated genomic DNA (Homo sapiens) CpG-island No: 28535
cggattgggtttagggttagatagcgtgaattcgagggtttcgcgtagggatcggggggtggtagagtaagtaagagtagggtacggggtgggcggtataagcgagatttgttgggagcgatagaatttaaattacgggagtaacggcgggcgttagggaattatatttcggaacggttttaggggagattaggagggcggttggagagagtttaggaagcggtttgggtcgcgggtaaaaaatatattacgattattataagtttcgaggttagtggtttcgggagttgaagaggggtcgcggggtgggtgaatcgagatcgagaggatagagagtcgtagacgcgatttcgggagacggagaataacgggtagtttgggtttatttgcggcgaaggggtcgggttcggtaggtattttggtcggcggagtttatgttcgggcggcgttcggatcgttgtcgcgggcgttatgggagtcgagcgggcggcgtcgggagaagttcgtcgcgtatatattagttagcggaattgttttagtttcgcggcgtttcgtaattcgcgatgcgacggttattttcgttcgggtacgtgtttcgtttttttttcgtttttattagtgatatttaatgagagtgtcgtttggttcgttttggtttattcgatttaatttgataggtcgaaattgcgggcgaattaggaaagggaggcgtggttcggcgggaa

SEQ ID NO: 28536 - DNA, 725 bp, Artificial Sequence
  chemically treated genomic DNA (Homo sapiens) CpG-island No: 28536
ttcccgccgaaccacgcctccctttcctaattcgcccgcaatttcgacctatcaaattaaatcgaataaaccaaaacgaaccaaacgacactctcattaaatatcactaataaaaacgaaaaaaaaacgaaacacgtacccgaacgaaaataaccgtcgcatcgcgaattacgaaacgccgcgaaactaaaacaattccgctaactaatatatacgcgacgaacttctcccgacgccgcccgctcgactcccataacgcccgcgacaacgatccgaacgccgcccgaacataaactccgccgaccaaaatacctaccgaacccgaccccttcgccgcaaataaacccaaactacccgttattctccgtctcccgaaatcgcgtctacgactctctatcctctcgatctcgattcacccaccccgcgacccctcttcaactcccgaaaccactaacctcgaaacttataataatcgtaatatattttttacccgcgacccaaaccgcttcctaaactctctccaaccgccctcctaatctcccctaaaaccgttccgaaatataattccctaacgcccgccgttactcccgtaatttaaattctatcgctcccaacaaatctcgcttataccgcccaccccgtaccctactcttacttactctaccaccccccgatccctacgcgaaaccctcgaattcacgctatctaaccctaaacccaatccg

SEQ ID NO: 28537 - DNA, 833 bp, Artificial Sequence
  chemically treated genomic DNA (Homo sapiens) CpG-island No: 28537
tttcggtttagcggttgggcgttagggttatcgtttatgtgcgttatttgtttcgtgaaggcgttggtgcgcgtgtttaagatttatttgatcgttagttatatttatttatttcgcggttggttcgtggtttttcgttgggatgacgtgcgcgtcgtgggtcggagtagtagttatcgggcgttgatttgcgcggtagtcgcggcgggcgtgtggttgttgcgggacgagacgttgggcggggatgcgttggggcggtttttacgtggggcgcgtagttaggcgtagtgttttttgtagtagtttcgcgagttgttcggttagttcgttagttacgcgttggtttattcgttgggtcgttggttcgtgtatttcggtttcgtgtttttgatgacgcgcgcgttgttgtcgttgttgtagtagggttaagagcgtttcgtggagcgttattacggtcggcgcgttaagttggtggtttgtgacggtaacgagatcgatattatgtttatggatcgtcgttagtattcgggtagttacgtgtacgggtcgcgtttcgttatttgttgcgaaggtaacgcgggtttttacgagatgggttgtttgtttgtatcgttcgaggtcggttatttcgtgttgggttggaattatttcggtttcggtagtagtattggcgtgttttttttttagtacgacgttaacgttatggacgtggtggtcgagtacgtattgtatcgtttgtatttttcgttcgcgtatttggtggtttacggttggtttgttggcggttttacggttatttgggttattatgatttattcggagttgggtgtatt

SEQ ID NO: 28538 - DNA, 833 bp, Artificial Sequence
  chemically treated genomic DNA (Homo sapiens) CpG-island No: 28538
aatacacccaactccgaataaatcataataacccaaataaccgtaaaaccgccaacaaaccaaccgtaaaccaccaaatacgcgaacgaaaaatacaaacgatacaatacgtactcgaccaccacgtccataacgttaacgtcgtactaaaaaaaaaacacgccaatactactaccgaaaccgaaataattccaacccaacacgaaataaccgacctcgaacgatacaaacaaacaacccatctcgtaaaaacccgcgttaccttcgcaacaaataacgaaacgcgacccgtacacgtaactacccgaatactaacgacgatccataaacataatatcgatctcgttaccgtcacaaaccaccaacttaacgcgccgaccgtaataacgctccacgaaacgctcttaaccctactacaacaacgacaacaacgcgcgcgtcatcaaaaacacgaaaccgaaatacacgaaccaacgacccaacgaataaaccaacgcgtaactaacgaactaaccgaacaactcgcgaaactactacaaaaaacactacgcctaactacgcgccccacgtaaaaaccgccccaacgcatccccgcccaacgtctcgtcccgcaacaaccacacgcccgccgcgactaccgcgcaaatcaacgcccgataactactactccgacccacgacgcgcacgtcatcccaacgaaaaaccacgaaccaaccgcgaaataaataaatataactaacgatcaaataaatcttaaacacgcgcaccaacgccttcacgaaacaaataacgcacataaacgataaccctaacgcccaaccgctaaaccgaaa

SEQ ID NO: 28539 - DNA, 833 bp, Artificial Sequence
  chemically treated genomic DNA (Homo sapiens) CpG-island No: 28539
agtgtatttagtttcgggtaggttatggtggtttaggtggtcgtgaagtcgttaatagattagtcgtagattattaggtgcgcgggcgggaagtgtaggcggtgtagtgcgtattcgattattacgtttatggcgttggcgtcgtgttgagggaagggtacgttagtgttgttgtcgaagtcggggtggttttagtttagtacggagtagtcggtttcgagcggtgtagatagatagtttatttcgtagaagttcgcgttgttttcgtagtagatgacgaggcgcggttcgtgtacgtggttgttcgggtgttggcggcggtttatgaatatagtgtcgatttcgttgtcgttataggttattagtttggcgcgtcggtcgtggtagcgttttacgaggcgtttttggttttgttgtagtagcggtagtagcgcgcgcgttattagggatacggagtcggggtatacgagttagcggtttagcgagtgggttagcgcgtagttagcgagttggtcgggtagttcgcggagttgttgtaagaggtattgcgtttggttgcgcgttttacgtggaggtcgttttagcgtattttcgtttagcgtttcgtttcgtagtaattatacgttcgtcgcggttgtcgcgtaggttagcgttcggtggttgttgtttcggtttacggcgcgtacgttattttagcggaaggttacgggttagtcgcggaatgggtaggtgtagttggcggttaggtagattttgaatacgcgtattagcgtttttacgaagtagatgacgtatatgagcggtggttttaacgtttagtcgttgggtcggga

SEQ ID NO: 28540 - DNA, 833 bp, Artificial Sequence
  chemically treated genomic DNA (Homo sapiens) CpG-island No: 28540
tcccgacccaacgactaaacgttaaaaccaccgctcatatacgtcatctacttcgtaaaaacgctaatacgcgtattcaaaatctacctaaccgccaactacacctacccattccgcgactaacccgtaaccttccgctaaaataacgtacgcgccgtaaaccgaaacaacaaccaccgaacgctaacctacgcgacaaccgcgacgaacgtataattactacgaaacgaaacgctaaacgaaaatacgctaaaacgacctccacgtaaaacgcgcaaccaaacgcaatacctcttacaacaactccgcgaactacccgaccaactcgctaactacgcgctaacccactcgctaaaccgctaactcgtataccccgactccgtatccctaataacgcgcgcgctactaccgctactacaacaaaaccaaaaacgcctcgtaaaacgctaccacgaccgacgcgccaaactaataacctataacgacaacgaaatcgacactatattcataaaccgccgccaacacccgaacaaccacgtacacgaaccgcgcctcgtcatctactacgaaaacaacgcgaacttctacgaaataaactatctatctacaccgctcgaaaccgactactccgtactaaactaaaaccaccccgacttcgacaacaacactaacgtacccttccctcaacacgacgccaacgccataaacgtaataatcgaatacgcactacaccgcctacacttcccgcccgcgcacctaataatctacgactaatctattaacgacttcacgaccacctaaaccaccataacctacccgaaactaaatacact

SEQ ID NO: 28541 - DNA, 830 bp, Artificial Sequence
  chemically treated genomic DNA (Homo sapiens) CpG-island No: 28541
  unsure (228)
tcgttgtcgagcgaagacgtatatttgttatagttttacgttcgtacgtttgcgttagtacgcgatacgtttattacgatcgtacgtgtatttacgcgtagcgcgcgtaggacgattatcgtacgtattgaagagtattgttattcgatcgattgcgtagatatattaattttatatatgcgttttatatagtacgtcgtatataggttacgttagcgcggtgtgttnttgcgaggggtacgttgtgtacgtttttattacgtacgtttttatcgttagtgcgtatttttcgttacgacgcgacgtagttcgcgtttatagcgtatagattttacgtaggcgaggttacggcggttgtttttagtttacgttcggtttttagtatattattattgaacgttaggtttgttgggttcgagcgttcgatcggcgagtcgttaagcggttgtgtttaacgcggtttaggatcgagttttcgtcgaagagttgcgaacgtttcgttttgtattaaataatattataatatcgtagcgtttttacgtatagttgattggcgttatttttagggatacgttttagagcgtatacgaggagaagtttttgagtaagcgttagacggaaagttttcgtagacgtaagcgttggtatattatgaaggtcgatttttggcgataaaagtattttcgcgtattagagaggcgtacgtcgttatacgttttcgtgttttttgttttcgacgtcggtttttttgtttaggacgtatagggtaaatgcgtaatgtgtttggtagtattaaatagtttgttttggtgtgagaggttagtaggttt

SEQ ID NO: 28542 - DNA, 830 bp, Artificial Sequence
  chemically treated genomic DNA (Homo sapiens) CpG-island No: 28542
  unsure (603)
aaacctactaacctctcacaccaaaacaaactatttaatactaccaaacacattacgcatttaccctatacgtcctaaacaaaaaaaccgacgtcgaaaacaaaaaacacgaaaacgtataacgacgtacgcctctctaatacgcgaaaatacttttatcgccaaaaatcgaccttcataatataccaacgcttacgtctacgaaaactttccgtctaacgcttactcaaaaacttctcctcgtatacgctctaaaacgtatccctaaaaataacgccaatcaactatacgtaaaaacgctacgatattataatattatttaatacaaaacgaaacgttcgcaactcttcgacgaaaactcgatcctaaaccgcgttaaacacaaccgcttaacgactcgccgatcgaacgctcgaacccaacaaacctaacgttcaataataatatactaaaaaccgaacgtaaactaaaaacaaccgccgtaacctcgcctacgtaaaatctatacgctataaacgcgaactacgtcgcgtcgtaacgaaaaatacgcactaacgataaaaacgtacgtaataaaaacgtacacaacgtacccctcgcaanaacacaccgcgctaacgtaacctatatacgacgtactatataaaacgcatatataaaattaatatatctacgcaatcgatcgaataacaatactcttcaatacgtacgataatcgtcctacgcgcgctacgcgtaaatacacgtacgatcgtaataaacgtatcgcgtactaacgcaaacgtacgaacgtaaaactataacaaatatacgtcttcgctcgacaacga

SEQ ID NO: 28543 - DNA, 830 bp, Artificial Sequence
  chemically treated genomic DNA (Homo sapiens) CpG-island No: 28543
  unsure (603)
gagtttgttggttttttatattagaatagattatttgatattattagatatattacgtatttgttttgtgcgttttgggtagagggatcggcgtcgaagatagaaggtacgggggcgtgtggcgacgtgcgtttttttggtgcgcggaggtgtttttgtcgttaggggtcgatttttatgatgtattagcgtttgcgtttgcggagatttttcgtttggcgtttgtttaggagttttttttcgtgtgcgttttggggcgtgtttttgggagtgacgttagttagttgtgcgtgaggacgttgcggtgttgtggtgttgtttggtataaaacgggacgttcgtaatttttcggcgggggttcgattttgggtcgcgttagatataatcgtttgacgattcgtcggtcggacgttcgggtttaataaatttggcgtttagtgatggtgtgttgaagatcgaacgtgggttgagaataatcgtcgtagtttcgtttgcgtgagatttgtgcgttgtggacgcgaattgcgtcgcgtcgtggcgagagatgcgtattggcgatgagagcgtgcgtgatgggggcgtgtatagcgtgtttttcgtagngatatatcgcgttggcgtagtttgtgtgcgacgtgttgtatggagcgtatgtgtggagttggtgtgtttacgtagtcggtcgagtagtagtgttttttagtgcgtgcggtgatcgttttgcgcgcgttgcgcgtgagtatacgtgcggtcgtgatgagcgtgtcgcgtgttgacgtagacgtacgagcgtaggattgtagtagatgtgcgttttcgttcggtagcgg

SEQ ID NO: 28544 - DNA, 830 bp, Artificial Sequence
  chemically treated genomic DNA (Homo sapiens) CpG-island No: 28544
  unsure (228)
ccgctaccgaacgaaaacgcacatctactacaatcctacgctcgtacgtctacgtcaacacgcgacacgctcatcacgaccgcacgtatactcacgcgcaacgcgcgcaaaacgatcaccgcacgcactaaaaaacactactactcgaccgactacgtaaacacaccaactccacacatacgctccatacaacacgtcgcacacaaactacgccaacgcgatatatcnctacgaaaaacacgctatacacgcccccatcacgcacgctctcatcgccaatacgcatctctcgccacgacgcgacgcaattcgcgtccacaacgcacaaatctcacgcaaacgaaactacgacgattattctcaacccacgttcgatcttcaacacaccatcactaaacgccaaatttattaaacccgaacgtccgaccgacgaatcgtcaaacgattatatctaacgcgacccaaaatcgaacccccgccgaaaaattacgaacgtcccgttttataccaaacaacaccacaacaccgcaacgtcctcacgcacaactaactaacgtcactcccaaaaacacgccccaaaacgcacacgaaaaaaaactcctaaacaaacgccaaacgaaaaatctccgcaaacgcaaacgctaatacatcataaaaatcgacccctaacgacaaaaacacctccgcgcaccaaaaaaacgcacgtcgccacacgcccccgtaccttctatcttcgacgccgatccctctacccaaaacgcacaaaacaaatacgtaatatatctaataatatcaaataatctattctaatataaaaaaccaacaaactc

SEQ ID NO: 28545 - DNA, 796 bp, Artificial Sequence
  chemically treated genomic DNA (Homo sapiens) CpG-island No: 28545
ttttcgagcgcgttagtgtttttgggagaggtttgtttgggtgagggattggacgtcggttttttcgtaagtcggtcggttgagggtgggggtcgaggcggggtcgggaatagttttcggattagggtttagataatttcgttcggcgtttgttttttcgcgcgtatttgtcgggttcgggggttgttagaagaggtcgtagttcgcgtttttcgggtttttacgtttcgtagcggcgttttttttttcggcggtacggattggttgcggcgtcgttttaagttcgtttcgcgttgtcggcggggggcgtcgcggattagagcgcgttgcgtcgttatcgtcgtcgttatcgtcgtcgtcgtcgtcgtcgttagtagtatagcgcgtttcgggtttcgcgcgtcgttagtttttggttcgttcgtcggtttcgtcgcgttcgttagtttcgtagcggagtttcggttcggtttcgggtcgtcgttattacgtcgcgcgtcgtatttcgcgttaagaatggggcggttaagttgtttaagtcgttcgtcgtcgtcgtcgtcgtcgcggtcgaggcgttcggcgtcggcgcgggtatggagcgttcgtagagtcgttttagtttgttcgtttttttcgaggcgttcgttatttatttttcgtgtatgaattttttcgacgacgaggacgtaggtaagcgcgcggttcgttttttagattttcggggtgtttcgggatttaggttcggtagtttttttttcgattcgtgcgtttttttttttatttttaattttttggg

SEQ ID NO: 28546 - DNA, 796 bp, Artificial Sequence
  chemically treated genomic DNA (Homo sapiens) CpG-island No: 28546
cccaaaaaattaaaaataaaaaaaaaaacgcacgaatcgaaaaaaaaactaccgaacctaaatcccgaaacaccccgaaaatctaaaaaacgaaccgcgcgcttacctacgtcctcgtcgtcgaaaaaattcatacacgaaaaataaataacgaacgcctcgaaaaaaacgaacaaactaaaacgactctacgaacgctccatacccgcgccgacgccgaacgcctcgaccgcgacgacgacgacgacgacgaacgacttaaacaacttaaccgccccattcttaacgcgaaatacgacgcgcgacgtaataacgacgacccgaaaccgaaccgaaactccgctacgaaactaacgaacgcgacgaaaccgacgaacgaaccaaaaactaacgacgcgcgaaacccgaaacgcgctatactactaacgacgacgacgacgacgacgataacgacgacgataacgacgcaacgcgctctaatccgcgacgccccccgccgacaacgcgaaacgaacttaaaacgacgccgcaaccaatccgtaccgccgaaaaaaaaaacgccgctacgaaacgtaaaaacccgaaaaacgcgaactacgacctcttctaacaacccccgaacccgacaaatacgcgcgaaaaaacaaacgccgaacgaaattatctaaaccctaatccgaaaactattcccgaccccgcctcgacccccaccctcaaccgaccgacttacgaaaaaaccgacgtccaatccctcacccaaacaaacctctcccaaaaacactaacgcgctcgaaaa

SEQ ID NO: 28547 - DNA, 796 bp, Artificial Sequence
  chemically treated genomic DNA (Homo sapiens) CpG-island No: 28547
tttaggggattgggggtggggaggagggcgtacgggtcggggagggggttatcggatttggatttcgggatatttcgggggtttggggggcgggtcgcgcgtttatttgcgttttcgtcgtcgaaggagtttatgtacgggaagtagatggcgagcgtttcgaaggaggcggatagattgaggcggttttgcgagcgttttatgttcgcgtcggcgtcgggcgtttcggtcgcggcggcggcggcggcggcgggcggtttgggtagtttggtcgttttatttttgacgcggagtacggcgcgcggcgtggtggcggcggttcggggtcgggtcgaggtttcgttgcggggttggcgggcgcggcggggtcggcgggcgggttaggagttggcggcgcgcggagttcgaggcgcgttgtgttgttggcggcggcggcggcggcggcggtggcggcggcggtggcggcgtagcgcgttttggttcgcggcgtttttcgtcggtagcgcgaggcgggtttggagcggcgtcgtagttaattcgtgtcgtcgggggagggggcgtcgttgcggggcgtgggagttcggagggcgcgggttgcggttttttttagtagttttcgggttcggtaggtgcgcgcggggaggtaggcgtcgggcgaggttgtttgggttttggttcgagggttgttttcgatttcgtttcggtttttatttttagtcggtcgatttgcggagaggtcggcgtttagttttttatttagataggttttttttagagatattggcgcgttcggagg

SEQ ID NO: 28548 - DNA, 796 bp, Artificial Sequence
  chemically treated genomic DNA (Homo sapiens) CpG-island No: 28548
cctccgaacgcgccaatatctctaaaaaaaacctatctaaataaaaaactaaacgccgacctctccgcaaatcgaccgactaaaaataaaaaccgaaacgaaatcgaaaacaaccctcgaaccaaaacccaaacaacctcgcccgacgcctacctccccgcgcgcacctaccgaacccgaaaactactaaaaaaaaccgcaacccgcgccctccgaactcccacgccccgcaacgacgccccctcccccgacgacacgaattaactacgacgccgctccaaacccgcctcgcgctaccgacgaaaaacgccgcgaaccaaaacgcgctacgccgccaccgccgccgccaccgccgccgccgccgccgccgccaacaacacaacgcgcctcgaactccgcgcgccgccaactcctaacccgcccgccgaccccgccgcgcccgccaaccccgcaacgaaacctcgacccgaccccgaaccgccgccaccacgccgcgcgccgtactccgcgtcaaaaataaaacgaccaaactacccaaaccgcccgccgccgccgccgccgccgcgaccgaaacgcccgacgccgacgcgaacataaaacgctcgcaaaaccgcctcaatctatccgcctccttcgaaacgctcgccatctacttcccgtacataaactccttcgacgacgaaaacgcaaataaacgcgcgacccgccccccaaacccccgaaatatcccgaaatccaaatccgataaccccctccccgacccgtacgccctcctccccacccccaatcccctaaa

SEQ ID NO: 28549 - DNA, 528 bp, Artificial Sequence
  chemically treated genomic DNA (Homo sapiens) CpG-island No: 28549
atcgatggtagtgatgacggtgatggcgaagtagaaggagtcggggaatttttattggcggtcggcgcggtggggtttagtttggagcgttaggcgttttagttcgcggtagttttcggtcgagaagtcgaatttttttcggagagcgtttcgtttttggattagtagtcgttggcggtcgtttttcgtttcggattcgagcgcgtcgaagatagtagcgtttattagtaggtaatatagggtgtataggattagttcggtcgcgcgtacgttcggttttcgtatggcgtttcggtttcggtattcgtcgcggttttaatttgtttcgtgtgttcggatcgcgcgtttcgttttttttaatttcggttttacgcggtagggttgtgacgggcgaggcggggcgattgtcgggaatttggaggttgggatcgttacgggtgggggtcggaagaatcgtttttttgttcgttttttattcgtttgttcggggtttatgtgtttgtgaatagtgagatttgaagtaaaggt

SEQ ID NO: 28550 - DNA, 528 bp, Artificial Sequence
  chemically treated genomic DNA (Homo sapiens) CpG-island No: 28550
acctttacttcaaatctcactattcacaaacacataaaccccgaacaaacgaataaaaaacgaacaaaaaaacgattcttccgacccccacccgtaacgatcccaacctccaaattcccgacaatcgccccgcctcgcccgtcacaaccctaccgcgtaaaaccgaaattaaaaaaaacgaaacgcgcgatccgaacacacgaaacaaattaaaaccgcgacgaataccgaaaccgaaacgccatacgaaaaccgaacgtacgcgcgaccgaactaatcctatacaccctatattacctactaataaacgctactatcttcgacgcgctcgaatccgaaacgaaaaacgaccgccaacgactactaatccaaaaacgaaacgctctccgaaaaaaattcgacttctcgaccgaaaactaccgcgaactaaaacgcctaacgctccaaactaaaccccaccgcgccgaccgccaataaaaattccccgactccttctacttcgccatcaccgtcatcactaccatcgat

SEQ ID NO: 28551 - DNA, 528 bp, Artificial Sequence
  chemically treated genomic DNA (Homo sapiens) CpG-island No: 28551
gtttttgttttagattttattatttatagatatatgaatttcgggtaggcgagtgggaggcggataggggagcggttttttcggtttttattcgtggcgattttagtttttaggttttcggtagtcgtttcgtttcgttcgttataattttgtcgcgtggggtcggggttggagggggcggagcgcgcggttcgggtatacggagtaggttgggatcgcggcgggtatcggggtcggggcgttatgcggaggtcgagcgtgcgcgcggtcgggttggttttgtgtattttgtgttatttgttggtgggcgttgttgttttcgacgcgttcgagttcgaggcggaaagcggtcgttagcgattgttggtttagaagcggggcgtttttcggaggaagttcggtttttcggtcgaggattatcgcgagttggagcgtttggcgttttaggttgagttttatcgcgtcggtcgttagtggaagtttttcggttttttttatttcgttattatcgttattattattatcggt

SEQ ID NO: 28552 - DNA, 528 bp, Artificial Sequence
  chemically treated genomic DNA (Homo sapiens) CpG-island No: 28552
accgataataataataacgataataacgaaataaaaaaaaccgaaaaacttccactaacgaccgacgcgataaaactcaacctaaaacgccaaacgctccaactcgcgataatcctcgaccgaaaaaccgaacttcctccgaaaaacgccccgcttctaaaccaacaatcgctaacgaccgctttccgcctcgaactcgaacgcgtcgaaaacaacaacgcccaccaacaaataacacaaaatacacaaaaccaacccgaccgcgcgcacgctcgacctccgcataacgccccgaccccgatacccgccgcgatcccaacctactccgtatacccgaaccgcgcgctccgccccctccaaccccgaccccacgcgacaaaattataacgaacgaaacgaaacgactaccgaaaacctaaaaactaaaatcgccacgaataaaaaccgaaaaaaccgctcccctatccgcctcccactcgcctacccgaaattcatatatctataaataataaaatctaaaacaaaaac

SEQ ID NO: 28553 - DNA, 1555 bp, Artificial Sequence
  chemically treated genomic DNA (Homo sapiens) CpG-island No: 28553
  unsure (16, 23, 28, 81, 95..96, 112, 119, 161, 180, 205, 231, 234)
  unsure (236, 273, 291, 307, 346, 375, 385, 446, 463, 516, 521, 523)
  unsure (577, 640, 648, 657, 704, 769, 774, 809, 937, 988, 991, 995)
  unsure (1005, 1047, 1068, 1088, 1121, 1126, 1281, 1313)
acgtacgttacgtaanagcgttngagancgttcgtacggacgacgagttacgtaagcgcgtagagcgtattatcgtatcgngatagtagcgtaannacgatcgtatcgtagncgtagtngataagacggacgagtcgagtaataatcgtatatatataggnataatagacgagagagtantaggcgacgtattaacgatttattntagcgaaagacggagtaggacgatanatnanatagacgcgttacgaagcggtaaattatacggggagngagcggaggaggattagnatagttacgtatattntcgcgtaatcgagagatagagagacgcgagcgagcgggntatacgcgttttaattatttcgagagganttagacgttnacgacgaatagtatttatagagtagcgttagtacgcgttacgttaacgttattataagagncgagtagtaggtaagtnatagggataatatagtagaggtacgttagcgacgagttacggaaggattaagnacganangattatattataggattcgacgcgcgcgatattgcgtattataagtagttattnatataacgacgtaacggtgtatagacgaagagacgaagtagtaatagtaacgtatatacgaancgtcgatnatagcgagngacgttagtcgtagcgatttacgcgtcgttatattatagtatattanttatagatcgacggtcgattacgcgcgaagcgatatagatagcgagcgagattacgttatagtangacgngagacgaaatatattatcgtaatagcgtagcgttntattacgacgagttgcgcgtagtaacgtatcgaatacggcgttagtagttagtagacgattacgaggagagtatcgcggagtttaacgagtacgagtatagacgatcgtagtcgagcggagacgttantgagacgtatagtatagaatagagagaacgcgacgagataagtatagcgtnagngtangcgcggatantatacggtatagcggtagagcggacgtaagaatcgaatacgntacgacgcgatataacggatncgttacgtatagatagtaantatagattaagaacgtagataaacgagacgagnatatngcgcgtacgcgatacgcgatacgttatatatttacgtttattcgcgcgacgagacgttagtacggtacgaataacggttagtaatcgtatagtacgtcggcgagtaatatcgtacgtttaggtagtatcgacgagacgcgtatagacgagacgtntagagtacgtaacgcgcgatattatatcggtnaggcgaacgaagattcgtcgtagcggacgcgggataacgataacgcgcgagacgtatagttcgagtagatcgacgcggggcgagtagagtcgatcgggtagtatacgattatcgcggggaattttatttaggtatcgttagacgacgttattcgtaataatttatacgaatacgatttttacggttaacgttatcgacgatttaattcgattaatataatagtagagagatagtcgattatt

SEQ ID NO: 28554 - DNA, 1555 bp, Artificial Sequence
  chemically treated genomic DNA (Homo sapiens) CpG-island No: 28554
  unsure (243, 275, 430, 435, 468, 488, 509, 551, 561, 565, 568, 619)
  unsure (747, 782, 787, 852, 899, 908, 916, 979, 1033, 1035, 1040)
  unsure (1093, 1110, 1171, 1181, 1210, 1249, 1265, 1283, 1320, 1322)
  unsure (1325, 1351, 1376, 1395, 1437, 1444, 1460..1461, 1475, 1528)
  unsure (1533, 1540)
aataatcgactatctctctactattatattaatcgaattaaatcgtcgataacgttaaccgtaaaaatcgtattcgtataaattattacgaataacgtcgtctaacgatacctaaataaaattccccgcgataatcgtatactacccgatcgactctactcgccccgcgtcgatctactcgaactatacgtctcgcgcgttatcgttatcccgcgtccgctacgacgaatcttcgttcgcctnaccgatataatatcgcgcgttacgtactctanacgtctcgtctatacgcgtctcgtcgatactacctaaacgtacgatattactcgccgacgtactatacgattactaaccgttattcgtaccgtactaacgtctcgtcgcgcgaataaacgtaaatatataacgtatcgcgtatcgcgtacgcgcnatatnctcgtctcgtttatctacgttcttaatctatanttactatctatacgtaacgnatccgttatatcgcgtcgtancgtattcgattcttacgtccgctctaccgctataccgtatantatccgcgcntacnctnacgctatacttatctcgtcgcgttctctctattctatactatacgtctcantaacgtctccgctcgactacgatcgtctatactcgtactcgttaaactccgcgatactctcctcgtaatcgtctactaactactaacgccgtattcgatacgttactacgcgcaactcgtcgtaatanaacgctacgctattacgataatatatttcgtctcncgtcntactataacgtaatctcgctcgctatctatatcgcttcgcgcgtaatcgaccgtcgatctataantaatatactataatataacgacgcgtaaatcgctacgactaacgtcnctcgctatnatcgacgnttcgtatatacgttactattactacttcgtctcttcgtctatacaccgttacgtcgttatatnaataactacttataatacgcaatatcgcgcgcgtcgaatcctataatataatcntntcgtncttaatccttccgtaactcgtcgctaacgtacctctactatattatccctatnacttacctactactcgnctcttataataacgttaacgtaacgcgtactaacgctactctataaatactattcgtcgtnaacgtctaantcctctcgaaataattaaaacgcgtatancccgctcgctcgcgtctctctatctctcgattacgcganaatatacgtaactatnctaatcctcctccgctcnctccccgtataatttaccgcttcgtaacgcgtctatntnatntatcgtcctactccgtctttcgctanaataaatcgttaatacgtcgcctantactctctcgtctattatncctatatatatacgattattactcgactcgtccgtcttatcnactacgnctacgatacgatcgtnnttacgctactatcncgatacgataatacgctctacgcgcttacgtaactcgtcgtccgtacgaacgntctcnaacgctnttacgtaacgtacgt

SEQ ID NO: 28555 - DNA, 1555 bp, Artificial Sequence
  chemically treated genomic DNA (Homo sapiens) CpG-island No: 28555
  unsure (243, 275, 430, 435, 468, 488, 509, 551, 561, 565, 568, 619)
  unsure (747, 782, 787, 852, 899, 908, 916, 979, 1033, 1035, 1040)
  unsure (1093, 1110, 1171, 1181, 1210, 1249, 1265, 1283, 1320, 1322)
  unsure (1325, 1351, 1376, 1395, 1437, 1444, 1460..1461, 1475, 1528)
  unsure (1533, 1540)
ggtggtcggttgtttttttgttattgtgttagtcgggttgggtcgtcggtggcgttggtcgtgggggtcgtgttcgtgtgggttgttgcgggtggcgtcgtttggcggtgtttgggtggggtttttcgcggtggtcgtgtgttgttcggtcggttttgttcgtttcgcgtcggtttgttcgggttgtgcgtttcgcgcgttgtcgttgtttcgcgttcgttgcgacggattttcgttcgtttngtcgatgtggtgtcgcgcgttgcgtattttgngcgtttcgtttgtgcgcgtttcgtcggtgttgtttgggcgtgcggtgttgttcgtcggcgtgttgtgcggttgttgatcgttgttcgtgtcgtgttggcgtttcgtcgcgcgggtgagcgtgggtgtgtagcgtgtcgcgtgtcgcgtgcgcgtngtgtnttcgtttcgtttgtttgcgtttttgatttgtgnttgttatttgtgcgtagcgngttcgttgtatcgcgtcgtgncgtgttcggtttttgcgttcgttttgtcgttgtgtcgtgtgntgttcgcgtntgtnttngcgttgtgtttgtttcgtcgcgttttttttgttttatgttgtgcgttttantggcgttttcgttcggttgcggtcgtttgtgttcgtgttcgttgagtttcgcggtgtttttttcgtggtcgtttgttggttgttggcgtcgtattcggtgcgttgttgcgcgtagttcgtcgtggtgnggcgttgcgttgttgcggtggtgtgtttcgttttncgttntgttgtggcgtggtttcgttcgttgtttgtgtcgtttcgcgcgtagtcggtcgtcgatttgtggntagtgtgttgtggtgtggcggcgcgtgagtcgttacggttgacgttnttcgttgtngtcggcgnttcgtgtatgcgttgttgttgttgtttcgttttttcgtttgtgtatcgttgcgtcgttgtgtnggtggttgtttgtggtgcgtagtatcgcgcgcgtcgggttttgtggtgtggttntntcgtntttggttttttcgtggttcgtcgttggcgtgtttttgttgtgttgtttttgtngtttgtttgttgttcgntttttgtggtggcgttggcgtggcgcgtgttggcgttgttttgtgggtgttgttcgtcgtnggcgtttggnttttttcggggtggttggggcgcgtgtgnttcgttcgttcgcgtttttttgtttttcggttgcgcggnggtgtgcgtggttgtnttggttttttttcgtttntttttcgtgtggtttgtcgtttcgtggcgcgtttgtntngtntgtcgttttgtttcgtttttcgttgnggtgggtcgttggtgcgtcgtttgntgttttttcgtttgttgtntttgtgtgtgtgcggttgttgttcggttcgttcgttttgttngttgcgnttgcggtgcggtcgtnnttgcgttgttgttncggtgcggtggtgcgttttgcgcgtttgcgtggttcgtcgttcgtgcgggcgnttttnggcgttnttgcgtggcgtgcgt

SEQ ID NO: 28556 - DNA, 1555 bp, Artificial Sequence
  chemically treated genomic DNA (Homo sapiens) CpG-island No: 28556
  unsure (16, 23, 28, 81, 95..96, 112, 119, 161, 180, 205, 231, 234)
  unsure (236, 273, 291, 307, 346, 375, 385, 446, 463, 516, 521, 523)
  unsure (577, 640, 648, 657, 704, 769, 774, 809, 937, 988, 991, 995)
  unsure (1005, 1047, 1068, 1088, 1121, 1126, 1281, 1313)
acgcacgccacgcaanaacgccnaaaancgcccgcacgaacgacgaaccacgcaaacgcgcaaaacgcaccaccgcaccgnaacaacaacgcaannacgaccgcaccgcaancgcaacnaacaaaacgaacgaaccgaacaacaaccgcacacacacaaanacaacaaacgaaaaaacancaaacgacgcaccaacgacccaccncaacgaaaaacgaaacaaaacgacanacnanacaaacgcgccacgaaacgacaaaccacacgaaaaanaaacgaaaaaaaaccaanacaaccacgcacaccnccgcgcaaccgaaaaacaaaaaaacgcgaacgaacgaancacacgcgccccaaccaccccgaaaaaanccaaacgccnacgacgaacaacacccacaaaacaacgccaacacgcgccacgccaacgccaccacaaaaancgaacaacaaacaaacnacaaaaacaacacaacaaaaacacgccaacgacgaaccacgaaaaaaccaaanacgananaaccacaccacaaaacccgacgcgcgcgatactacgcaccacaaacaaccaccnacacaacgacgcaacgatacacaaacgaaaaaacgaaacaacaacaacaacgcatacacgaancgccgacnacaacgaanaacgtcaaccgtaacgactcacgcgccgccacaccacaacacactanccacaaatcgacgaccgactacgcgcgaaacgacacaaacaacgaacgaaaccacgccacaacanaacgnaaaacgaaacacaccaccgcaacaacgcaacgccncaccacgacgaactacgcgcaacaacgcaccgaatacgacgccaacaaccaacaaacgaccacgaaaaaaacaccgcgaaactcaacgaacacgaacacaaacgaccgcaaccgaacgaaaacgccantaaaacgcacaacataaaacaaaaaaaacgcgacgaaacaaacacaacgcnaanacanacgcgaacancacacgacacaacgacaaaacgaacgcaaaaaccgaacacgncacgacgcgatacaacgaacncgctacgcacaaataacaancacaaatcaaaaacgcaaacaaacgaaacgaanacacnacgcgcacgcgacacgcgacacgctacacacccacgctcacccgcgcgacgaaacgccaacacgacacgaacaacgatcaacaaccgcacaacacgccgacgaacaacaccgcacgcccaaacaacaccgacgaaacgcgcacaaacgaaacgcncaaaatacgcaacgcgcgacaccacatcgacnaaacgaacgaaaatccgtcgcaacgaacgcgaaacaacgacaacgcgcgaaacgcacaacccgaacaaaccgacgcgaaacgaacaaaaccgaccgaacaacacacgaccaccgcgaaaaaccccacccaaacaccgccaaacgacgccacccgcaacaacccacacgaacacgacccccacgaccaacgccaccgacgacccaacccgactaacacaataacaaaaaaacaaccgaccacc

SEQ ID NO: 28557 - DNA, 1042 bp, Artificial Sequence
  chemically treated genomic DNA (Homo sapiens) CpG-island No: 28557
  unsure (497, 892)
gattcgatttgttattcgtttttttttttattacgttattttattcgttttttattcgttttatcgtgttttttttttattatatttttttatgtattgcggcggtatttttttttttgttaattacgttcgttcgacgacgtcgcgattttttattgtcgaggtcgtttcgcgattcgcgtgtttgataatttcgttttttattttttacgtttcgtgttacgcgtatattcgcgcgtacgcgacgttttcgcgtgttcgtgatgtatttttatttcgtttacgatacgtttttcgcgtcgttttatgtttttttttatttttatcgttgtttttttgttcgttatttcggcgtttattttagtcgattttttattcgtacgatgcgttcgttcgcgcgcgttagtcgacgttcgcgacggttttgtttttcgtattttttatacgtttcgttttttcgtttgtatcgttttattatattacgcgtgattgtattnttatcgtacgttttattttacgttatcgacggcgtatatttgtttcgacgttgtcgcgtatatttcgtttttttttatgttattattttttgttttttttattcgtatgttttttttttgtatttcgtgtttttatagttttattcgattttcgattttattttttcgtcgttgcggatttacgacgtttcgttttatacgtttggtcgttttatttattttttatcgtattattttattttttttcgtattatattatttttattattcgtattcgatcgattattatgatttattagacgatacgtacgtgttcgttcgcgtcgttattcgtatatttatttttatgacggattattgttcgtattatttcggttttgcgattcgtgttattngagttcgtttatttcgttataggttgtatttgttagtgttgacgatagtattgtcgatcgtattttgatacgttacgatagatacgttacgacgattattatcgttcgtatcgtatatgtttcgttgtattcgattcgttttgttttcga

SEQ ID NO: 28558 - DNA, 1042 bp, Artificial Sequence
  chemically treated genomic DNA (Homo sapiens) CpG-island No: 28558
  unsure (151, 546)
tcgaaaacaaaacgaatcgaatacaacgaaacatatacgatacgaacgataataatcgtcgtaacgtatctatcgtaacgtatcaaaatacgatcgacaatactatcgtcaacactaacaaatacaacctataacgaaataaacgaactcnaataacacgaatcgcaaaaccgaaataatacgaacaataatccgtcataaaaataaatatacgaataacgacgcgaacgaacacgtacgtatcgtctaataaatcataataatcgatcgaatacgaataataaaaataatataatacgaaaaaaaataaaataatacgataaaaaataaataaaacgaccaaacgtataaaacgaaacgtcgtaaatccgcaacgacgaaaaaataaaatcgaaaatcgaataaaactataaaaacacgaaatacaaaaaaaaaacatacgaataaaaaaaacaaaaaataataacataaaaaaaaacgaaatatacgcgacaacgtcgaaacaaatatacgccgtcgataacgtaaaataaaacgtacgataanaatacaatcacgcgtaatataataaaacgatacaaacgaaaaaacgaaacgtataaaaaatacgaaaaacaaaaccgtcgcgaacgtcgactaacgcgcgcgaacgaacgcatcgtacgaataaaaaatcgactaaaataaacgccgaaataacgaacaaaaaaacaacgataaaaataaaaaaaaacataaaacgacgcgaaaaacgtatcgtaaacgaaataaaaatacatcacgaacacgcgaaaacgtcgcgtacgcgcgaatatacgcgtaacacgaaacgtaaaaaataaaaaacgaaattatcaaacacgcgaatcgcgaaacgacctcgacaataaaaaatcgcgacgtcgtcgaacgaacgtaattaacaaaaaaaaaaataccgccgcaatacataaaaaaatataataaaaaaaaaacacgataaaacgaataaaaaacgaataaaataacgtaataaaaaaaaaaacgaataacaaatcgaatc

SEQ ID NO: 28559 - DNA, 1042 bp, Artificial Sequence
  chemically treated genomic DNA (Homo sapiens) CpG-island No: 28559
  unsure (151, 546)
tcgagagtagagcgagtcggatgtagcgaagtatgtacggtacggacggtgatggtcgtcgtagcgtgtttgtcgtagcgtattagagtacgatcggtagtgttgtcgttagtattgatagatgtagtttatgacgaggtagacgggtttnagtaatacgagtcgtagaatcgagatgatgcgagtagtagttcgttatgaggatgagtgtacggatggcggcgcggacgagtacgtgcgtatcgtttggtgagttatagtagtcgatcgagtacgaatgatgagagtgatgtagtgcgagagaggatgaggtgatacggtagggagtgagtgaggcgattaggcgtgtgagacgagacgtcgtagattcgtagcgacgagagagtgaggtcgagagtcgagtgagattgtaggagtacggagtgtaggaaggagatatgcgagtagagagagtaggaggtgatagtatgagaggagacggagtgtgcgcgatagcgtcgaggtaggtatgcgtcgtcgatgacgtgaggtagagcgtgcgatggnagtgtagttacgcgtgatgtagtgagacgatgtaggcgagggagcgagacgtgtgagagatgcgaggagtagggtcgtcgcgagcgtcggttggcgcgcgcgagcgagcgtatcgtgcgggtaggaggtcggttgagatgagcgtcgaggtgacgagtaggaggatagcgatagagatgagagagagtatgagacggcgcgaggagcgtgtcgtagacgagatgaggatgtattacgagtacgcggagacgtcgcgtacgcgcggatgtacgcgtagtacgagacgtgagagatagaggacgaggttgttaagtacgcgagtcgcggagcggtttcggtagtagagagtcgcggcgtcgtcgaacgagcgtggttggtagaggaaggggtgtcgtcgtagtgtatggagagatgtggtgagggggaggtacggtgagacgggtgagaggcggatgaagtagcgtgatggaaggagagacgagtagtaggtcggatt

SEQ ID NO: 28560 - DNA, 1042 bp, Artificial Sequence
  chemically treated genomic DNA (Homo sapiens) CpG-island No: 28560
  unsure (497, 892)
aatccgacctactactcgtctctccttccatcacgctacttcatccgcctctcacccgtctcaccgtacctccccctcaccacatctctccatacactacgacgacaccccttcctctaccaaccacgctcgttcgacgacgccgcgactctctactaccgaaaccgctccgcgactcgcgtacttaacaacctcgtcctctatctctcacgtctcgtactacgcgtacatccgcgcgtacgcgacgtctccgcgtactcgtaatacatcctcatctcgtctacgacacgctcctcgcgccgtctcatactctctctcatctctatcgctatcctcctactcgtcacctcgacgctcatctcaaccgacctcctacccgcacgatacgctcgctcgcgcgcgccaaccgacgctcgcgacgaccctactcctcgcatctctcacacgtctcgctccctcgcctacatcgtctcactacatcacgcgtaactacactnccatcgcacgctctacctcacgtcatcgacgacgcatacctacctcgacgctatcgcgcacactccgtctcctctcatactatcacctcctactctctctactcgcatatctccttcctacactccgtactcctacaatctcactcgactctcgacctcactctctcgtcgctacgaatctacgacgtctcgtctcacacgcctaatcgcctcactcactccctaccgtatcacctcatcctctctcgcactacatcactctcatcattcgtactcgatcgactactataactcaccaaacgatacgcacgtactcgtccgcgccgccatccgtacactcatcctcataacgaactactactcgcatcatctcgattctacgactcgtattactnaaacccgtctacctcgtcataaactacatctatcaatactaacgacaacactaccgatcgtactctaatacgctacgacaaacacgctacgacgaccatcaccgtccgtaccgtacatacttcgctacatccgactcgctctactctcga

SEQ ID NO: 28561 - DNA, 749 bp, Artificial Sequence
  chemically treated genomic DNA (Homo sapiens) CpG-island No: 28561
cgggtagtggttacgttcgttcgtcgggggttaggttttcgtatcgaggtggcggtaggggcggtggcggcggggattcggcggcgtttttagttcgcggcggcggcggtggcgggaaggcgcggttttttggcggcggcgcggttttttgcgagttcgggtgttagtgtcgcgcgtttatggtgagcgtgtttagcgagcgttattcgttttataatcgcgttaagataggttagatcgttaattgcgcgttgttttgttataattttttttttagttaggacgagcgcgtttttatcgttttttggatcggtttgtggtcggtgttttgtttcgtgtttattttcgttatcgtttttattttttttatcgatatggagcgttttaagtattcggagcggtttattatttttttttcggtttgttattttttcgtgtcggtgggttatttagtgcgtttggtggcgggttacgagaaggtggcgtgtagcggtggcgcgtcgggcgcggggggcgttgggggcgcgggcggcgcggcggcgggcgcgggcgcggcgggcgcgggcgcgggcggttcgggcgggcgcggcgagtacgaggagttgggcgcggtggagtagtacgtgcgttacgagattatcggtttcgcgttgtgtatcgtggtttttttgttggtttattttttcggtatggttagttttatttggtgggtgattttgtcgtttatatggtttttggcggtcggtatg

SEQ ID NO: 28562 - DNA, 749 bp, Artificial Sequence
  chemically treated genomic DNA (Homo sapiens) CpG-island No: 28562
cataccgaccgccaaaaaccatataaacgacaaaatcacccaccaaataaaactaaccataccgaaaaaataaaccaacaaaaaaaccacgatacacaacgcgaaaccgataatctcgtaacgcacgtactactccaccgcgcccaactcctcgtactcgccgcgcccgcccgaaccgcccgcgcccgcgcccgccgcgcccgcgcccgccgccgcgccgcccgcgcccccaacgccccccgcgcccgacgcgccaccgctacacgccaccttctcgtaacccgccaccaaacgcactaaataacccaccgacacgaaaaaataacaaaccgaaaaaaaaataataaaccgctccgaatacttaaaacgctccatatcgataaaaaaaataaaaacgataacgaaaataaacacgaaacaaaacaccgaccacaaaccgatccaaaaaacgataaaaacgcgctcgtcctaactaaaaaaaaaattataacaaaacaacgcgcaattaacgatctaacctatcttaacgcgattataaaacgaataacgctcgctaaacacgctcaccataaacgcgcgacactaacacccgaactcgcaaaaaaccgcgccgccgccaaaaaaccgcgccttcccgccaccgccgccgccgcgaactaaaaacgccgccgaatccccgccgccaccgcccctaccgccacctcgatacgaaaacctaacccccgacgaacgaacgtaaccactacccg

SEQ ID NO: 28563 - DNA, 749 bp, Artificial Sequence
  chemically treated genomic DNA (Homo sapiens) CpG-island No: 28563
tatatcggtcgttaggaattatgtgagcgataagattatttattagatggagttggttatgtcgaagaagtagattagtaagaagattacggtgtatagcgcggggtcggtggtttcgtagcgtacgtgttgttttatcgcgtttagtttttcgtattcgtcgcgttcgttcgggtcgttcgcgttcgcgttcgtcgcgttcgcgttcgtcgtcgcgtcgttcgcgtttttagcgtttttcgcgttcggcgcgttatcgttgtacgttattttttcgtggttcgttattaggcgtattaggtagtttatcgatacgaagaggtagtaggtcgagaggaagataatgggtcgtttcgggtatttgaagcgttttatgtcgataaggaaggtggagacggtggcgaaggtggatacgaagtagagtatcgattataggtcgatttagaagacggtgaaggcgcgttcgttttggttgaaaaaggggttgtggtagggtagcgcgtagttagcgatttggtttgttttgacgcggttgtagagcgggtggcgttcgttggatacgtttattataggcgcgcggtattggtattcgggttcgtagggagtcgcgtcgtcgttagggggtcgcgttttttcgttatcgtcgtcgtcgcgagttgggggcgtcgtcgggttttcgtcgttatcgtttttgtcgttatttcggtgcgggggtttggttttcggcgggcggacgtggttattgttcg

SEQ ID NO: 28564 - DNA, 749 bp, Artificial Sequence
  chemically treated genomic DNA (Homo sapiens) CpG-island No: 28564
cgaacaataaccacgtccgcccgccgaaaaccaaacccccgcaccgaaataacgacaaaaacgataacgacgaaaacccgacgacgcccccaactcgcgacgacgacgataacgaaaaaacgcgaccccctaacgacgacgcgactccctacgaacccgaataccaataccgcgcgcctataataaacgtatccaacgaacgccacccgctctacaaccgcgtcaaaacaaaccaaatcgctaactacgcgctaccctaccacaacccctttttcaaccaaaacgaacgcgccttcaccgtcttctaaatcgacctataatcgatactctacttcgtatccaccttcgccaccgtctccaccttccttatcgacataaaacgcttcaaatacccgaaacgacccattatcttcctctcgacctactacctcttcgtatcgataaactacctaatacgcctaataacgaaccacgaaaaaataacgtacaacgataacgcgccgaacgcgaaaaacgctaaaaacgcgaacgacgcgacgacgaacgcgaacgcgacgaacgcgaacgcgaacgacccgaacgaacgcgacgaatacgaaaaactaaacgcgataaaacaacacgtacgctacgaaaccaccgaccccgcgctatacaccgtaatcttcttactaatctacttcttcgacataaccaactccatctaataaataatcttatcgctcacataattcctaacgaccgatata

SEQ ID NO: 28565 - DNA, 556 bp, Artificial Sequence
  chemically treated genomic DNA (Homo sapiens) CpG-island No: 28565
gaagttatcgtcggttattcgtagtatttttatttggtcgcgtggtttgtgtttagcgttaagtttatcgcggtgttggcgtttagttcggtggacggcgattcggtggcgggtatttgttacgtgggtaattagagtttggataatttgcgcggtttcgtgttggcgtcgttggttatttatttttttatcggtattatgtttttgttggtcggtttcgtgtttttttttcgtattcgttcggttattaagtaataggacggttttattaagacgtataagttggagaagttgatgattcgtttgggtttgtttatcgtgttttatatcgtgttcgtcgcggtggtggtcgtttgttttttttacgagtagtataatcgttcgcgttgggaggttacgtataattgttcgtgtttgcgggatttgtagttcgattaggtacgtaggttcgattacgtcgtttttatgtttaagtattttatgtgtttagtggtgggtattatttcgggcgtgtgggtttggttcggtaagacgttggagttttggcgttttttgt

SEQ ID NO: 28566 - DNA, 556 bp, Artificial Sequence
  chemically treated genomic DNA (Homo sapiens) CpG-island No: 28566
acaaaaaacgccaaaactccaacgtcttaccgaaccaaacccacacgcccgaaataatacccaccactaaacacataaaatacttaaacataaaaacgacgtaatcgaacctacgtacctaatcgaactacaaatcccgcaaacacgaacaattatacgtaacctcccaacgcgaacgattatactactcgtaaaaaaaacaaacgaccaccaccgcgacgaacacgatataaaacacgataaacaaacccaaacgaatcatcaacttctccaacttatacgtcttaataaaaccgtcctattacttaataaccgaacgaatacgaaaaaaaaacacgaaaccgaccaacaaaaacataataccgataaaaaaataaataaccaacgacgccaacacgaaaccgcgcaaattatccaaactctaattacccacgtaacaaatacccgccaccgaatcgccgtccaccgaactaaacgccaacaccgcgataaacttaacgctaaacacaaaccacgcgaccaaataaaaatactacgaataaccgacgataacttc

SEQ ID NO: 28567 - DNA, 556 bp, Artificial Sequence
  chemically treated genomic DNA (Homo sapiens) CpG-island No: 28567
atagggagcgttaggattttagcgttttgtcggattagatttatacgttcgaggtgatgtttattattaggtatatgaagtatttgagtatgaagacggcgtagtcgggtttgcgtgtttggtcgggttgtaggtttcgtaggtacgggtagttgtgcgtggttttttagcgcgggcggttgtgttgttcgtagaagaggtaggcgattattatcgcggcgggtacggtgtagagtacggtgaataggtttaggcggattattagtttttttagtttgtgcgttttggtggggtcgttttgttgtttgatgatcgagcggatgcggaagagggatacgaagtcggttagtaggaatatggtgtcgatgaagaggtagatgattagcggcgttagtacgaagtcgcgtaggttgtttaggttttggttgtttacgtagtagatgttcgttatcgggtcgtcgtttatcgagttgagcgttagtatcgcgatggatttgacgttgggtataagttacgcggttaggtggaagtattgcgagtagtcggcgatggtttt

SEQ ID NO: 28568 - DNA, 556 bp, Artificial Sequence
  chemically treated genomic DNA (Homo sapiens) CpG-island No: 28568
aaaaccatcgccgactactcgcaatacttccacctaaccgcgtaacttatacccaacgtcaaatccatcgcgatactaacgctcaactcgataaacgacgacccgataacgaacatctactacgtaaacaaccaaaacctaaacaacctacgcgacttcgtactaacgccgctaatcatctacctcttcatcgacaccatattcctactaaccgacttcgtatccctcttccgcatccgctcgatcatcaaacaacaaaacgaccccaccaaaacgcacaaactaaaaaaactaataatccgcctaaacctattcaccgtactctacaccgtacccgccgcgataataatcgcctacctcttctacgaacaacacaaccgcccgcgctaaaaaaccacgcacaactacccgtacctacgaaacctacaacccgaccaaacacgcaaacccgactacgccgtcttcatactcaaatacttcatatacctaataataaacatcacctcgaacgtataaatctaatccgacaaaacgctaaaatcctaacgctccctat

SEQ ID NO: 28569 - DNA, 767 bp, Artificial Sequence
  chemically treated genomic DNA (Homo sapiens) CpG-island No: 28569
tcgtagagagcgcgtatagtagtgcggatattcggggattgttttaaggaaggttgagttttgggagcgcgtggatttcgttttatcgttcggcgattggttcgcggggttgggggcggagatcgagttcgcgttgtataaatatttatgagtcggtagcgcggcgcgagcggggttggagtcgggaagttgggttaagggcgttgttttcgtcgaggaggaggcggcggttgggcgcgggtcgcgttatttaggtgttcgtttcgtttttcggtttggatttgtttttgggtgtttagtaggaaggagattgtgtgtatttcgttcgattgcggtcggagcgcggcgttgatttttttaggcggcgggggttcgtttgtttcggcggcggacggacgaaggacggacgtcggagaaagagggcggcggtttgggtcgaggcgggtttttaatttcggcggcggcggcggcggtttggttttgggggcgggtatgagttttcgggggtcgagtggtggtcgttagggttgattcggcgcggtaagcggttcggtttagttattttgattgcgtatcgcggttttagaggaaatttgcggcgttttcgttttttttgttcggcggagttatcgtcgttcggcgcggcggggagaagtggtcgggcgcgcggagaggaggcgagcgagcgcgggtcgatgagtcgaggttcggtcgttttgcgtcgcgagggttgagcgcgattcggggttagtagagcggatttacgg

SEQ ID NO: 28570 - DNA, 767 bp, Artificial Sequence
  chemically treated genomic DNA (Homo sapiens) CpG-island No: 28570
ccgtaaatccgctctactaaccccgaatcgcgctcaaccctcgcgacgcaaaacgaccgaacctcgactcatcgacccgcgctcgctcgcctcctctccgcgcgcccgaccacttctccccgccgcgccgaacgacgataactccgccgaacaaaaaaaacgaaaacgccgcaaatttcctctaaaaccgcgatacgcaatcaaaataactaaaccgaaccgcttaccgcgccgaatcaaccctaacgaccaccactcgacccccgaaaactcatacccgcccccaaaaccaaaccgccgccgccgccgccgaaattaaaaacccgcctcgacccaaaccgccgccctctttctccgacgtccgtccttcgtccgtccgccgccgaaacaaacgaacccccgccgcctaaaaaaatcaacgccgcgctccgaccgcaatcgaacgaaatacacacaatctccttcctactaaacacccaaaaacaaatccaaaccgaaaaacgaaacgaacacctaaataacgcgacccgcgcccaaccgccgcctcctcctcgacgaaaacaacgcccttaacccaacttcccgactccaaccccgctcgcgccgcgctaccgactcataaatatttatacaacgcgaactcgatctccgcccccaaccccgcgaaccaatcgccgaacgataaaacgaaatccacgcgctcccaaaactcaaccttccttaaaacaatccccgaatatccgcactactatacgcgctctctacga

SEQ ID NO: 28571 - DNA, 767 bp, Artificial Sequence
  chemically treated genomic DNA (Homo sapiens) CpG-island No: 28571
tcgtaggttcgttttgttggtttcgggtcgcgtttagttttcgcggcgtagagcggtcgggtttcggtttatcggttcgcgttcgttcgtttttttttcgcgcgttcgattattttttttcgtcgcgtcgggcggcggtgatttcgtcggatagagagggcggaggcgtcgtaagttttttttggggtcgcggtgcgtagttaagatggttgggtcgggtcgtttgtcgcgtcgggttagttttggcggttattattcggttttcgggggtttatgttcgtttttaaggttaagtcgtcgtcgtcgtcgtcggagttggggattcgtttcggtttaggtcgtcgtttttttttttcggcgttcgtttttcgttcgttcgtcgtcgggatagacggattttcgtcgtttggaaaagttagcgtcgcgtttcggtcgtagtcgggcgaggtgtatatagttttttttttgttggatatttaggagtaaatttagatcggaaggcggagcggatatttgagtggcgcggttcgcgtttagtcgtcgtttttttttcggcgggagtagcgtttttagtttaatttttcggttttagtttcgttcgcgtcgcgttgtcggtttatgaatatttatatagcgcggattcggttttcgtttttagtttcgcgagttaatcgtcgggcggtagggcggagtttacgcgtttttagggtttagttttttttaaggtagttttcgagtgttcgtattgttgtgcgcgttttttgcgg

SEQ ID NO: 28572 - DNA, 767 bp, Artificial Sequence
  chemically treated genomic DNA (Homo sapiens) CpG-island No: 28572
ccgcaaaaaacgcgcacaacaatacgaacactcgaaaactaccttaaaaaaaactaaaccctaaaaacgcgtaaactccgccctaccgcccgacgattaactcgcgaaactaaaaacgaaaaccgaatccgcgctatataaatattcataaaccgacaacgcgacgcgaacgaaactaaaaccgaaaaattaaactaaaaacgctactcccgccgaaaaaaaaacgacgactaaacgcgaaccgcgccactcaaatatccgctccgccttccgatctaaatttactcctaaatatccaacaaaaaaaaaactatatacacctcgcccgactacgaccgaaacgcgacgctaacttttccaaacgacgaaaatccgtctatcccgacgacgaacgaacgaaaaacgaacgccgaaaaaaaaaaacgacgacctaaaccgaaacgaatccccaactccgacgacgacgacgacgacttaaccttaaaaacgaacataaacccccgaaaaccgaataataaccgccaaaactaacccgacgcgacaaacgacccgacccaaccatcttaactacgcaccgcgaccccaaaaaaaacttacgacgcctccgccctctctatccgacgaaatcaccgccgcccgacgcgacgaaaaaaaataatcgaacgcgcgaaaaaaaaacgaacgaacgcgaaccgataaaccgaaacccgaccgctctacgccgcgaaaactaaacgcgacccgaaaccaacaaaacgaacctacga

SEQ ID NO: 28573 - DNA, 712 bp, Artificial Sequence
  chemically treated genomic DNA (Homo sapiens) CpG-island No: 28573
attcgttgtaaggttgagaaaaaggtgaacgagcgagtgagcgaggaatggatgaggttttattagggggcgacggcgtttcgttacgaagttcggggcggagtaggagacggagaagtcgtttttttagcgtttttttttttgagtttcggcgtcgcgtttcgtagttttatcggggaatcgtttcgtttcgttcgtcgttttcgcgttttagataattgattcgaatcgatgaagcgttgatcgcggcgtttttgtgcgcgtcgtttcggtattgttatggaaagcggggttttttttttcgttttcgtagttggttcggagtcggttcgagttttttggacgggattaggggatttttaagtcggtcggcgtttcgttcgtttgttttttatttttatcgttagttgcggattcggttcggtcgggaagggtgggcgagggttttttgcggcgttttcggggttcgtattttttttttttttgcgtcgttttcgcggggtcgagttgagcgcgcgtttcggatttcggtttacgcggcgggggtgtgtttcggaggcggcggtggagttgtgttttcgttgagggagtaataatagcgggggaagttcgagtacggaagggaattagtggaaaagtttcgtacgtaagtattagttcgtttttaggttttcggagggttttatggaaatataatatttcgtcgggcgcg

SEQ ID NO: 28574 - DNA, 712 bp, Artificial Sequence
  chemically treated genomic DNA (Homo sapiens) CpG-island No: 28574
cgcgcccgacgaaatattatatttccataaaaccctccgaaaacctaaaaacgaactaatacttacgtacgaaacttttccactaattcccttccgtactcgaacttcccccgctattattactccctcaacgaaaacacaactccaccgccgcctccgaaacacacccccgccgcgtaaaccgaaatccgaaacgcgcgctcaactcgaccccgcgaaaacgacgcaaaaaaaaaaaaaatacgaaccccgaaaacgccgcaaaaaaccctcgcccacccttcccgaccgaaccgaatccgcaactaacgataaaaataaaaaacaaacgaacgaaacgccgaccgacttaaaaatcccctaatcccgtccaaaaaactcgaaccgactccgaaccaactacgaaaacgaaaaaaaaaaccccgctttccataacaataccgaaacgacgcgcacaaaaacgccgcgatcaacgcttcatcgattcgaatcaattatctaaaacgcgaaaacgacgaacgaaacgaaacgattccccgataaaactacgaaacgcgacgccgaaactcaaaaaaaaaaacgctaaaaaaacgacttctccgtctcctactccgccccgaacttcgtaacgaaacgccgtcgccccctaataaaacctcatccattcctcgctcactcgctcgttcacctttttctcaaccttacaacgaat

SEQ ID NO: 28575 - DNA, 712 bp, Artificial Sequence
  chemically treated genomic DNA (Homo sapiens) CpG-island No: 28575
cgcgttcggcgggatattatatttttataaggtttttcgggggtttgggaacggattggtgtttgcgtgcggggtttttttattggttttttttcgtattcgggtttttttcgttgttgttatttttttaacgggaatataattttatcgtcgttttcgggatatattttcgtcgcgtgggtcggggttcgggacgcgcgtttagttcggtttcgcgggggcggcgtaggagggaagggggtgcggatttcggaggcgtcgtaggaagttttcgtttatttttttcggtcgggtcgggttcgtagttgacggtgggggtggggagtagacgggcggggcgtcggtcggtttgggggttttttggtttcgtttagggggttcgggtcgatttcgggttagttgcggaggcgggggaggggatttcgttttttatggtagtgtcgaggcggcgcgtataaaggcgtcgcgattagcgttttatcggttcgagttaattatttgaggcgcggaggcggcgggcggggcgaggcgatttttcggtggggttgcggagcgcggcgtcgagatttagaggagggggcgttggggaagcggttttttcgttttttgtttcgtttcgggtttcgtggcgaggcgtcgtcgttttttggtggggttttatttatttttcgtttattcgttcgtttattttttttttaattttatagcgggt

SEQ ID NO: 28576 - DNA, 712 bp, Artificial Sequence
  chemically treated genomic DNA (Homo sapiens) CpG-island No: 28576
acccgctataaaattaaaaaaaaaataaacgaacgaataaacgaaaaataaataaaaccccaccaaaaaacgacgacgcctcgccacgaaacccgaaacgaaacaaaaaacgaaaaaaccgcttccccaacgccccctcctctaaatctcgacgccgcgctccgcaaccccaccgaaaaatcgcctcgccccgcccgccgcctccgcgcctcaaataattaactcgaaccgataaaacgctaatcgcgacgcctttatacgcgccgcctcgacactaccataaaaaacgaaatcccctcccccgcctccgcaactaacccgaaatcgacccgaaccccctaaacgaaaccaaaaaacccccaaaccgaccgacgccccgcccgtctactccccacccccaccgtcaactacgaacccgacccgaccgaaaaaaataaacgaaaacttcctacgacgcctccgaaatccgcacccccttccctcctacgccgcccccgcgaaaccgaactaaacgcgcgtcccgaaccccgacccacgcgacgaaaatatatcccgaaaacgacgataaaattatattcccgttaaaaaaataacaacaacgaaaaaaacccgaatacgaaaaaaaaccaataaaaaaaccccgcacgcaaacaccaatccgttcccaaacccccgaaaaaccttataaaaatataatatcccgccgaacgcg

SEQ ID NO: 28577 - DNA, 534 bp, Artificial Sequence
  chemically treated genomic DNA (Homo sapiens) CpG-island No: 28577
tcgttttttttattttttttttttcgtttttttttgtttttgcgtttttttcgtttttattttttttttttttgtttgtttcgggtttgtttttatcgtcgtcggtttaggggaacgtgtgcggagcgattgttttgggggatatttgatggattagagcgtcgagcggttttattgttaggggattatttgatttttagtttgcgttttatataaagtcggtagtcggagtgttgagcgtagttttcgcgattttttgtttgcgcgtcgtcgtcgttaagttcgagttcgagtcggggtcgtcgttatcggtgtcggtttcgagcggtttttcgcgttttagttcgttgggagttgtttagtgttgaaaattcgcgcggatatagtcgatcgcgttcggtcggtcgttttttcgtatcgagtttcgcgtcggtcgcgttatgtcgcgtttttttttggtaaagaagattaaaggggacggtttttagtgtagcggggtgtcggtttttatttattattttttggagatagttt

SEQ ID NO: 28578 - DNA, 534 bp, Artificial Sequence
  chemically treated genomic DNA (Homo sapiens) CpG-island No: 28578
aaactatctccaaaaaataataaataaaaaccgacaccccgctacactaaaaaccgtcccctttaatcttctttaccaaaaaaaaacgcgacataacgcgaccgacgcgaaactcgatacgaaaaaacgaccgaccgaacgcgatcgactatatccgcgcgaattttcaacactaaacaactcccaacgaactaaaacgcgaaaaaccgctcgaaaccgacaccgataacgacgaccccgactcgaactcgaacttaacgacgacgacgcgcaaacaaaaaatcgcgaaaactacgctcaacactccgactaccgactttatataaaacgcaaactaaaaatcaaataatcccctaacaataaaaccgctcgacgctctaatccatcaaatatcccccaaaacaatcgctccgcacacgttcccctaaaccgacgacgataaaaacaaacccgaaacaaacaaaaaaaaaaaaaataaaaacgaaaaaaacgcaaaaacaaaaaaaaacgaaaaaaaaaaaataaaaaaaacga

SEQ ID NO: 28579 - DNA, 534 bp, Artificial Sequence
  chemically treated genomic DNA (Homo sapiens) CpG-island No: 28579
aggttgtttttaaggggtggtaggtgggggtcggtatttcgttgtattggaagtcgttttttttgattttttttattaggaaggagcgcggtatggcgcggtcggcgcggggttcggtgcggggaggcggtcggtcgggcgcgatcggttgtgttcgcgcgggtttttagtattggatagtttttagcgggttggagcgcgggaggtcgttcggagtcggtatcggtggcggcggtttcggttcgggttcgggtttggcggcggcggcgcgtagataggggatcgcgggagttgcgtttagtatttcggttgtcggttttatatgggacgtaggttggagattaggtggttttttagtaatggaatcgttcggcgttttaatttattaaatgttttttaggataatcgtttcgtatacgtttttttgaatcggcggcggtgggggtaggttcggagtaggtaggaggggagaaagtgagggcgagaaaggcgtagagatagagagggacggagaaaggggagtgaggggggcgg

SEQ ID NO: 28580 - DNA, 534 bp, Artificial Sequence
  chemically treated genomic DNA (Homo sapiens) CpG-island No: 28580
ccgcccccctcactcccctttctccgtccctctctatctctacgcctttctcgccctcactttctcccctcctacctactccgaacctacccccaccgccgccgattcaaaaaaacgtatacgaaacgattatcctaaaaaacatttaataaattaaaacgccgaacgattccattactaaaaaaccacctaatctccaacctacgtcccatataaaaccgacaaccgaaatactaaacgcaactcccgcgatcccctatctacgcgccgccgccgccaaacccgaacccgaaccgaaaccgccgccaccgataccgactccgaacgacctcccgcgctccaacccgctaaaaactatccaatactaaaaacccgcgcgaacacaaccgatcgcgcccgaccgaccgcctccccgcaccgaaccccgcgccgaccgcgccataccgcgctccttcctaataaaaaaaatcaaaaaaaacgacttccaatacaacgaaataccgacccccacctaccaccccttaaaaacaacct

SEQ ID NO: 28581 - DNA, 1269 bp, Artificial Sequence
  chemically treated genomic DNA (Homo sapiens) CpG-island No: 28581
ttaaagcgggaaatttttttcggcgtttttttttatcgtttttttatttttcgttttttttagggtacgtttcgtatcgtttgttttcgagtagttacgatgcggattagaagtcgggtttggagttggtttcggtcgagttcgcgtattcgtcggcggcgtcggaggagtatagcgatttcgaaagttcgtagtcgagtttgtcggcgcgttattttcgaggggaggcggtagtgatcgatagttattttatggacgttttttttatttcggacgggcgttcgcggcggcggcggggcgggggcggcggggacgcggggggttcgggagacgcggggggcgtcggggggcgcgcggggcgcgcgggggcgtaggcgggcggcgggtatcggtacgcgtgcgtcgagtgcggtaagatttacgttacgtcgtcgaatttgagtcgttataagtagacgtatcgtagtttggatagttagttggcgcgtaaatgttcgacgtgcggtaaggtttacgtgtttatgttcgcgttcgttatgtatttgtttacgtataatttgcgttataagtgcggcgtttgcggtaaggttttttcgcggttttggttgttgtagggttatatgcgttcgtatatcggcgaaaagtcgttcggttgcgcgtattgcggtaaggttttcgtcgatcgttttaatttgcgcgcgtatatgtagacgtattcggtttttaagtattatcgttgtcgttagtgcgataagagtttcgcgtttaagttttatttttataagtattgcgaggcggtttgcgttaaggcggtcgagttattttcgtcgattttcgtcggttcggttagttgagtttttcgtttcgttttcgcgttcggaattcgttttttacgcgtttcgggttttttatttgcgttcgtagcgttttcgtttagtttcggttgcgtttttttgtttatgattttttcgtggggattttcggttcggttcggaatttttttttttaatttttaaatttacgatttatttttatatcgttttttttagcgtttttcgatttattttatttttttcggttatttttcggattttgatttttttgttcgcgtttttaaggtttttaatttaggtattaggttcgtatttttttcgcgttttagagtcggaaattttttttttttagatttcgcgttgtttttttaatttttagattttttttttcgttttttagttgaatttttttgattatttttttattggagttttt

SEQ ID NO: 28582 - DNA, 1269 bp, Artificial Sequence
  chemically treated genomic DNA (Homo sapiens) CpG-island No: 28582
aaaaactccaataaaaaaataatcaaaaaaattcaactaaaaaacgaaaaaaaaaatctaaaaattaaaaaaacaacgcgaaatctaaaaaaaaaaaatttccgactctaaaacgcgaaaaaaatacgaacctaatacctaaattaaaaaccttaaaaacgcgaacaaaaaaatcaaaatccgaaaaataaccgaaaaaaataaaataaatcgaaaaacgctaaaaaaaacgatataaaaataaatcgtaaatttaaaaattaaaaaaaaaaattccgaaccgaaccgaaaatccccacgaaaaaatcataaacaaaaaaacgcaaccgaaactaaacgaaaacgctacgaacgcaaataaaaaacccgaaacgcgtaaaaaacgaattccgaacgcgaaaacgaaacgaaaaactcaactaaccgaaccgacgaaaatcgacgaaaataactcgaccgccttaacgcaaaccgcctcgcaatacttataaaaataaaacttaaacgcgaaactcttatcgcactaacgacaacgataatacttaaaaaccgaatacgtctacatatacgcgcgcaaattaaaacgatcgacgaaaaccttaccgcaatacgcgcaaccgaacgacttttcgccgatatacgaacgcatataaccctacaacaaccaaaaccgcgaaaaaaccttaccgcaaacgccgcacttataacgcaaattatacgtaaacaaatacataacgaacgcgaacataaacacgtaaaccttaccgcacgtcgaacatttacgcgccaactaactatccaaactacgatacgtctacttataacgactcaaattcgacgacgtaacgtaaatcttaccgcactcgacgcacgcgtaccgatacccgccgcccgcctacgcccccgcgcgccccgcgcgccccccgacgccccccgcgtctcccgaaccccccgcgtccccgccgcccccgccccgccgccgccgcgaacgcccgtccgaaataaaaaaaacgtccataaaataactatcgatcactaccgcctcccctcgaaaataacgcgccgacaaactcgactacgaactttcgaaatcgctatactcctccgacgccgccgacgaatacgcgaactcgaccgaaaccaactccaaacccgacttctaatccgcatcgtaactactcgaaaacaaacgatacgaaacgtaccctaaaaaaaacgaaaaataaaaaaacgataaaaaaaaacgccgaaaaaaatttcccgctttaa

SEQ ID NO: 28583 - DNA, 1269 bp, Artificial Sequence
  chemically treated genomic DNA (Homo sapiens) CpG-island No: 28583
gggggttttagtagaggaatggttagagagatttagttgagaagcgagagaaaagatttagaagttagaagagtagcgcggggtttgggagggagaaattttcggttttggggcgcgggagaggtgcggatttggtgtttgagttgggagttttgaaggcgcggataggggggttaaggttcgagggatggtcggaaaggatgaagtgggtcgggggacgttggggaagacggtgtggaagtgagtcgtgggtttgggggttggggagaaaagtttcgggtcgggtcgggggtttttacgagagggttatgggtagggaaacgtagtcggggttgggcgagggcgttgcgggcgtaggtagggggttcggggcgcgtggagagcgagtttcgggcgcgagggcgaggcggaaggtttagttggtcgggtcggcgggggtcggcgggggtggttcggtcgttttggcgtaggtcgtttcgtagtgtttgtggaggtaggatttgagcgcgaagtttttgtcgtattggcggtagcggtagtgtttgaaggtcgagtgcgtttgtatgtgcgcgcgtaggttggagcggtcggcgaaggttttgtcgtagtgcgcgtagtcgaacggtttttcgtcggtgtgcgagcgtatgtgattttgtagtagttagggtcgcgagaaggttttgtcgtagacgtcgtatttgtggcgtaggttgtgcgtgagtaggtgtatggcgagcgcgggtatggatacgtaggttttgtcgtacgtcgggtatttgcgcgttagttggttgtttaggttgcggtgcgtttgtttgtggcggtttaggttcgacgacgtggcgtaggttttgtcgtattcggcgtacgcgtgtcggtgttcgtcgttcgtttgcgttttcgcgcgtttcgcgcgtttttcggcgtttttcgcgtttttcgagtttttcgcgttttcgtcgttttcgtttcgtcgtcgtcgcgagcgttcgttcgagatgaagaaggcgtttatggagtagttgtcggttattgtcgttttttttcggaagtagcgcgtcgataggttcgattgcgggttttcggggtcgttgtattttttcggcgtcgtcggcgggtacgcgggttcggtcggggttagttttaggttcggtttttggttcgtatcgtagttgttcgggggtaggcggtgcggggcgtattttggagggggcgagaagtggaggggcggtgagaggaggcgtcgaagagggtttttcgttttga

SEQ ID NO: 28584 - DNA, 1269 bp, Artificial Sequence
  chemically treated genomic DNA (Homo sapiens) CpG-island No: 28584
tcaaaacgaaaaaccctcttcgacgcctcctctcaccgcccctccacttctcgccccctccaaaatacgccccgcaccgcctacccccgaacaactacgatacgaaccaaaaaccgaacctaaaactaaccccgaccgaacccgcgtacccgccgacgacgccgaaaaaatacaacgaccccgaaaacccgcaatcgaacctatcgacgcgctacttccgaaaaaaaacgacaataaccgacaactactccataaacgccttcttcatctcgaacgaacgctcgcgacgacgacgaaacgaaaacgacgaaaacgcgaaaaactcgaaaaacgcgaaaaacgccgaaaaacgcgcgaaacgcgcgaaaacgcaaacgaacgacgaacaccgacacgcgtacgccgaatacgacaaaacctacgccacgtcgtcgaacctaaaccgccacaaacaaacgcaccgcaacctaaacaaccaactaacgcgcaaatacccgacgtacgacaaaacctacgtatccatacccgcgctcgccatacacctactcacgcacaacctacgccacaaatacgacgtctacgacaaaaccttctcgcgaccctaactactacaaaatcacatacgctcgcacaccgacgaaaaaccgttcgactacgcgcactacgacaaaaccttcgccgaccgctccaacctacgcgcgcacatacaaacgcactcgaccttcaaacactaccgctaccgccaatacgacaaaaacttcgcgctcaaatcctacctccacaaacactacgaaacgacctacgccaaaacgaccgaaccacccccgccgacccccgccgacccgaccaactaaaccttccgcctcgccctcgcgcccgaaactcgctctccacgcgccccgaaccccctacctacgcccgcaacgccctcgcccaaccccgactacgtttccctacccataaccctctcgtaaaaacccccgacccgacccgaaacttttctccccaacccccaaacccacgactcacttccacaccgtcttccccaacgtcccccgacccacttcatcctttccgaccatccctcgaaccttaacccccctatccgcgccttcaaaactcccaactcaaacaccaaatccgcacctctcccgcgccccaaaaccgaaaatttctccctcccaaaccccgcgctactcttctaacttctaaatcttttctctcgcttctcaactaaatctctctaaccattcctctactaaaaccccc

SEQ ID NO: 28585 - DNA, 746 bp, Artificial Sequence
  chemically treated genomic DNA (Homo sapiens) CpG-island No: 28585
ggtagtagcgtatcgcgggttttgtcgatttattttggttgggtaggttcgtcgcgttttttttcgttttcgttttcgcggtttaagtcggttcggtcggtgcgttattcgcgtttttttcgtttcgcgatttgtaaatttattttgagttagttcgttcgggcgtttttatttttcggacgtcgcgcggcgtaggggaggcgagaggcgtttttcggtggagagtttgagtttcgcgcgagtttggcggtatttggcgagcggagtcggagtcgggttggggatcgcggggtcgaggtcggatcgcggcggggtcgggggagaaacgcgcgttgttttggtacgggttttttttttcggtcgcgcggaatggtatggttcggtcggagttaaggtcggggggaggcggcgagtttcgcggcggcggcgacgatggggttgcgtgtaggaggaacgttgggtagggtcggcgcgggtcggggggcgttcgaggggttcgggtcgagcggcggcgcgtagggcggtagtatttattcgggtcgtatcgtcgcggtgtataacgtgtcgttgagcgtgtttattcggtcgttgtcgttcgtgttggatttcgttaaggtgtagagtttcgtggatacgattcgggtgaggtttcggggagtttagttaatcggagggagggtttcggaggagggaggttgtcggaggagggaggtcgttgcgatggacgcgagacggattggtttcgg

SEQ ID NO: 28586 - DNA, 746 bp, Artificial Sequence
  chemically treated genomic DNA (Homo sapiens) CpG-island No: 28586
ccgaaaccaatccgtctcgcgtccatcgcaacgacctccctcctccgacaacctccctcctccgaaaccctccctccgattaactaaactccccgaaacctcacccgaatcgtatccacgaaactctacaccttaacgaaatccaacacgaacgacaacgaccgaataaacacgctcaacgacacgttatacaccgcgacgatacgacccgaataaatactaccgccctacgcgccgccgctcgacccgaacccctcgaacgccccccgacccgcgccgaccctacccaacgttcctcctacacgcaaccccatcgtcgccgccgccgcgaaactcgccgcctccccccgaccttaactccgaccgaaccataccattccgcgcgaccgaaaaaaaaaacccgtaccaaaacaacgcgcgtttctcccccgaccccgccgcgatccgacctcgaccccgcgatccccaacccgactccgactccgctcgccaaataccgccaaactcgcgcgaaactcaaactctccaccgaaaaacgcctctcgcctcccctacgccgcgcgacgtccgaaaaataaaaacgcccgaacgaactaactcaaaataaatttacaaatcgcgaaacgaaaaaaacgcgaataacgcaccgaccgaaccgacttaaaccgcgaaaacgaaaacgaaaaaaaacgcgacgaacctacccaaccaaaataaatcgacaaaacccgcgatacgctactacc

SEQ ID NO: 28587 - DNA, 746 bp, Artificial Sequence
  chemically treated genomic DNA (Homo sapiens) CpG-island No: 28587
tcggaattagttcgtttcgcgtttatcgtagcgatttttttttttcggtaatttttttttttcgaagtttttttttcggttggttggatttttcgaggttttattcggatcgtgtttacgaggttttgtattttggcggggtttaatacggacggtagcggtcggatgagtacgtttagcggtacgttgtgtatcgcggcgatgcggttcgagtggatgttgtcgttttgcgcgtcgtcgttcggttcgggtttttcgggcgtttttcgattcgcgtcggttttgtttagcgttttttttgtacgtagttttatcgtcgtcgtcgtcgcgggattcgtcgttttttttcggttttaatttcggtcgggttatattatttcgcgcggtcgggggggggggttcgtgttagggtagcgcgcgtttttttttcgatttcgtcgcggttcggtttcgatttcgcggtttttagttcgatttcggtttcgttcgttaggtgtcgttagattcgcgcggggtttaggttttttatcggggggcgtttttcgttttttttgcgtcgcgcggcgttcggggagtggaaacgttcgggcgggttgatttagggtgagtttgtaggtcgcggggcgggaggggcgcgggtgacgtatcggtcgggtcgatttaggtcgcgggggcgggggcgggggagagcgcggcggatttgtttagttagggtgagtcggtaaagttcgcggtgcgttgttgtt

SEQ ID NO: 28588 - DNA, 746 bp, Artificial Sequence
  chemically treated genomic DNA (Homo sapiens) CpG-island No: 28588
aacaacaacgcaccgcgaactttaccgactcaccctaactaaacaaatccgccgcgctctcccccgcccccgcccccgcgacctaaatcgacccgaccgatacgtcacccgcgcccctcccgccccgcgacctacaaactcaccctaaatcaacccgcccgaacgtttccactccccgaacgccgcgcgacgcaaaaaaaacgaaaaacgccccccgataaaaaacctaaaccccgcgcgaatctaacgacacctaacgaacgaaaccgaaatcgaactaaaaaccgcgaaatcgaaaccgaaccgcgacgaaatcgaaaaaaaaacgcgcgctaccctaacacgaacccccccccccgaccgcgcgaaataatataacccgaccgaaattaaaaccgaaaaaaaacgacgaatcccgcgacgacgacgacgataaaactacgtacaaaaaaaacgctaaacaaaaccgacgcgaatcgaaaaacgcccgaaaaacccgaaccgaacgacgacgcgcaaaacgacaacatccactcgaaccgcatcgccgcgatacacaacgtaccgctaaacgtactcatccgaccgctaccgtccgtattaaaccccgccaaaatacaaaacctcgtaaacacgatccgaataaaacctcgaaaaatccaaccaaccgaaaaaaaaacttcgaaaaaaaaaaattaccgaaaaaaaaaaatcgctacgataaacgcgaaacgaactaattccga

SEQ ID NO: 28589 - DNA, 996 bp, Artificial Sequence
  chemically treated genomic DNA (Homo sapiens) CpG-island No: 28589
aagtttaatttaaaaaagcggagcgcgttagtatcgttgaggttaacggattcgatcggttttttgtcgtttacgtgcgggtaggggttatttgatacgcggtaacgtttttttttatttcgttttggggttgatcgggattggacggggtgtttttcgttgcggttttgtcgttagtattcggatttatgggatgtttttttgaaaatgttcggtgtggtcggacgtcgtatcgatgagggttagaagttgatagcgatcggatcgtagattagggcggcgaggtaggtattgacgcggttcgggatgattagcggcgcggattgtattatgatgatgcgttgggtaggatcgttgtttagttaagttttcggcgcgtatgttatcggtttgtagttgaaggtcgggtcgacgattagatcgaacgcgcgggtgtttatgaggtcgggttcggatatgatgattatatcgttcgggagtataggttgttcgatatcgttcggatcgatatattagtcgttgtaaagttatagatcgtattggttttatttgtttttgtagatcgcgtcgattttgatttggttgttcgggtttagcgagttgtcgtcgatcgtaagggtgggatattgaattgtattttggacgtttttagtagtgaggaatttggtttatgtcgagttggtgaagacgatgtcggtggcgatcgcgttagacgtttttaggattcgcgcgtcgaatgtatcgatttgttcgataatgttggtattacggttttgcgcgttgagggtggtattttatttattcgtatcggtgagcgcgatcgttagggtcgtcgagcgatcgaagtcgattagagtggtagggaattttttatcggcgatggtgatcgtgtcggtggttagcgtcgacgacgttatttattcgaggcgacggtttattatgtcgatttggtcggttattttcgtttcgaggttgattatttggcgttaattaggg

SEQ ID NO: 28590 - DNA, 996 bp, Artificial Sequence
  chemically treated genomic DNA (Homo sapiens) CpG-island No: 28590
ccctaattaacgccaaataatcaacctcgaaacgaaaataaccgaccaaatcgacataataaaccgtcgcctcgaataaataacgtcgtcgacgctaaccaccgacacgatcaccatcgccgataaaaaattccctaccactctaatcgacttcgatcgctcgacgaccctaacgatcgcgctcaccgatacgaataaataaaataccaccctcaacgcgcaaaaccgtaataccaacattatcgaacaaatcgatacattcgacgcgcgaatcctaaaaacgtctaacgcgatcgccaccgacatcgtcttcaccaactcgacataaaccaaattcctcactactaaaaacgtccaaaatacaattcaatatcccacccttacgatcgacgacaactcgctaaacccgaacaaccaaatcaaaatcgacgcgatctacaaaaacaaataaaaccaatacgatctataactttacaacgactaatatatcgatccgaacgatatcgaacaacctatactcccgaacgatataatcatcatatccgaacccgacctcataaacacccgcgcgttcgatctaatcgtcgacccgaccttcaactacaaaccgataacatacgcgccgaaaacttaactaaacaacgatcctacccaacgcatcatcataatacaatccgcgccgctaatcatcccgaaccgcgtcaatacctacctcgccgccctaatctacgatccgatcgctatcaacttctaaccctcatcgatacgacgtccgaccacaccgaacattttcaaaaaaacatcccataaatccgaatactaacgacaaaaccgcaacgaaaaacaccccgtccaatcccgatcaaccccaaaacgaaataaaaaaaaacgttaccgcgtatcaaataacccctacccgcacgtaaacgacaaaaaaccgatcgaatccgttaacctcaacgatactaacgcgctccgcttttttaaattaaactt

SEQ ID NO: 28591 - DNA, 996 bp, Artificial Sequence
  chemically treated genomic DNA (Homo sapiens) CpG-island No: 28591
ttttgattaacgttagatggttaatttcggggcggagatgatcgattaagtcgatatggtgaatcgtcgtttcgagtggatggcgtcgtcggcgttgattatcggtacgattattatcgtcggtgagggattttttattattttgatcgatttcggtcgttcggcgattttgacgatcgcgtttatcggtgcgaataagtggggtgttatttttaacgcgtagggtcgtgatattaatattgtcgggtagatcgatgtattcggcgcgcgaattttgaaggcgtttggcgcggtcgttatcgatatcgtttttattaattcggtatgggttaagttttttattgttgagggcgtttaaggtgtaatttagtattttatttttgcggtcgacggtaattcgttgaattcgggtagttaggttaaagtcggcgcgatttataagggtaagtggggttagtacgatttgtggttttataacgattggtatatcgattcggacggtgtcgagtagtttatgttttcggacggtatgattattatgttcgggttcgattttatgggtattcgcgcgttcggtttgatcgtcgattcggtttttaattataagtcgatggtatacgcgtcgaagatttggttgaataacgattttgtttagcgtattattatgatgtagttcgcgtcgttggttatttcgagtcgcgttaatgtttgtttcgtcgttttggtttgcgattcgatcgttattagtttttaatttttatcggtgcggcgttcgattatatcgaatatttttaagggagtattttatggattcgaatgttggcggtaaagtcgtaacgaaaaatatttcgtttaatttcgattagttttagagcgaagtagagaaaggcgttatcgcgtattaggtggtttttgttcgtacgtgggcggtaaggggtcggtcgagttcgttgattttaacgatattgacgcgtttcgtttttttgagttgggttt

SEQ ID NO: 28592 - DNA, 996 bp, Artificial Sequence
  chemically treated genomic DNA (Homo sapiens) CpG-island No: 28592
aaacccaactcaaaaaaacgaaacgcgtcaatatcgttaaaatcaacgaactcgaccgaccccttaccgcccacgtacgaacaaaaaccacctaatacgcgataacgcctttctctacttcgctctaaaactaatcgaaattaaacgaaatatttttcgttacgactttaccgccaacattcgaatccataaaatactcccttaaaaatattcgatataatcgaacgccgcaccgataaaaattaaaaactaataacgatcgaatcgcaaaccaaaacgacgaaacaaacattaacgcgactcgaaataaccaacgacgcgaactacatcataataatacgctaaacaaaatcgttattcaaccaaatcttcgacgcgtataccatcgacttataattaaaaaccgaatcgacgatcaaaccgaacgcgcgaatacccataaaatcgaacccgaacataataatcataccgtccgaaaacataaactactcgacaccgtccgaatcgatataccaatcgttataaaaccacaaatcgtactaaccccacttacccttataaatcgcgccgactttaacctaactacccgaattcaacgaattaccgtcgaccgcaaaaataaaatactaaattacaccttaaacgccctcaacaataaaaaacttaacccataccgaattaataaaaacgatatcgataacgaccgcgccaaacgccttcaaaattcgcgcgccgaatacatcgatctacccgacaatattaatatcacgaccctacgcgttaaaaataacaccccacttattcgcaccgataaacgcgatcgtcaaaatcgccgaacgaccgaaatcgatcaaaataataaaaaatccctcaccgacgataataatcgtaccgataatcaacgccgacgacgccatccactcgaaacgacgattcaccatatcgacttaatcgatcatctccgccccgaaattaaccatctaacgttaatcaaaa

SEQ ID NO: 28593 - DNA, 1111 bp, Artificial Sequence
  chemically treated genomic DNA (Homo sapiens) CpG-island No: 28593
gcggtttaggtaaaatcgttagttgttcgattcggcgtttttgagttgtagtaaaaagtcgatgtcgggggcgggggatatcgttatttcgatgtttacgttggatatgtcgggcgtcgtcgcgttcgtttcggcggcgatcgtgtcgttttagataggaattgtattatcgtgttattcggcgcgattagggaaacgtcgtcggcggggtcgttttggatgtcgttgatcggataacggaaggttatcgcgttaaattcggtgttttcgatatagagcgtgttagataaatgggggggtatatagatcggtttcgcgttaggcgtgtgggtgtcggtgtatagaattagtttatagttcgataggtcggtgttcggcgtatcggagatttcgatcgttttatcgatatcggtatcgttattatcgtagtgaattttattgatgaatatattcgtcggcgggacgggcggcgcggtatcgtcgttggtgatcgttttcgtcgcgatcgtacgggttagcgtcgcgtcgttttgcggatcggtgagcgtgacggagaaggtttcgttggtttcgaatatcgtgtcgtttagtacgggtagtcgaatttcggcggtggtcgcgttcgcggcgaacgttatcgtgtcggtgcgtattagattcgtggcgaagtcgttttcgtcggttatagcggtgtcgttgtttaggtttagcgtttaggtcgtcgatatttcgttcgtcgtgtcgtcgttgcgcgttacggtgaagacgatgttacgcgtatcgttgtttttttcggcgatggtggcgtcggcgatggttagcgtgtttggcgtcggggtcggcgtcgcgttgtcgaacgtttggttcgtgttcgtcgcgtcggcggtcgtcgtgttgattagcgtttaatgaaagtttttcgtcgtcgtgtcggtgtcgattaggtttagcgcggtgtcgttttgcgtttcgtttttatagacgtcgatattgacgttcgttatgtttttggtcggtttatcggcggtaacgaagttgtttttatagttgagaaattggacgatatttttcgtcgtatcgattagcgcgaggttatcgggtttttcggcgg

SEQ ID NO: 28594 - DNA, 1111 bp, Artificial Sequence
  chemically treated genomic DNA (Homo sapiens) CpG-island No: 28594
ccgccgaaaaacccgataacctcgcgctaatcgatacgacgaaaaatatcgtccaatttctcaactataaaaacaacttcgttaccgccgataaaccgaccaaaaacataacgaacgtcaatatcgacgtctataaaaacgaaacgcaaaacgacaccgcgctaaacctaatcgacaccgacacgacgacgaaaaactttcattaaacgctaatcaacacgacgaccgccgacgcgacgaacacgaaccaaacgttcgacaacgcgacgccgaccccgacgccaaacacgctaaccatcgccgacgccaccatcgccgaaaaaaacaacgatacgcgtaacatcgtcttcaccgtaacgcgcaacgacgacacgacgaacgaaatatcgacgacctaaacgctaaacctaaacaacgacaccgctataaccgacgaaaacgacttcgccacgaatctaatacgcaccgacacgataacgttcgccgcgaacgcgaccaccgccgaaattcgactacccgtactaaacgacacgatattcgaaaccaacgaaaccttctccgtcacgctcaccgatccgcaaaacgacgcgacgctaacccgtacgatcgcgacgaaaacgatcaccaacgacgataccgcgccgcccgtcccgccgacgaatatattcatcaataaaattcactacgataataacgataccgatatcgataaaacgatcgaaatctccgatacgccgaacaccgacctatcgaactataaactaattctatacaccgacacccacacgcctaacgcgaaaccgatctatatacccccccatttatctaacacgctctatatcgaaaacaccgaatttaacgcgataaccttccgttatccgatcaacgacatccaaaacgaccccgccgacgacgtttccctaatcgcgccgaataacacgataatacaattcctatctaaaacgacacgatcgccgccgaaacgaacgcgacgacgcccgacatatccaacgtaaacatcgaaataacgatatcccccgcccccgacatcgactttttactacaactcaaaaacgccgaatcgaacaactaacgattttacctaaaccgc

SEQ ID NO: 28595 - DNA, 1111 bp, Artificial Sequence
  chemically treated genomic DNA (Homo sapiens) CpG-island No: 28595
tcgtcggggagttcgatggtttcgcgttggtcgatgcggcggggaatgtcgtttagttttttagttatgagggtagtttcgttgtcgtcgatggatcggttaagggtatgacgagcgttaatatcggcgtttatgaggacgggacgtagaacggtatcgcgttgggtttggtcggtatcggtacgacggcggaagatttttattgggcgttgattaatacggcgatcgtcggcgcgacgaatacgggttagacgttcggtagcgcggcgtcgatttcgacgttaggtacgttggttatcgtcgacgttattatcgtcgagggggatagcggtacgcgtgatatcgtttttatcgtgacgcgtagcgacggtacggcgggcgaggtgtcggcgatttggacgttgaatttgggtaacggtatcgttatggtcgacgagagcgatttcgttacgggtttggtgcgtatcggtacggtgacgttcgtcgcgggcgcgattatcgtcgagattcggttgttcgtgttgggcgatacggtgttcgaggttaacgaaatttttttcgttacgtttatcgattcgtagggcggcgcgacgttgattcgtgcggtcgcgacggggacgattattaacgacgatgtcgcgtcgttcgtttcgtcggcgaatgtgtttattaatgagatttattacgataatagcggtgtcgatgtcggtgaggcgatcgagattttcggtgcgtcgggtatcgatttgtcgggttataagttggttttgtgtatcggtatttatacgtttgacgcggggtcggtttatgtgtttttttatttgtttggtacgttttatatcgaagatatcgggtttggcgcggtggtttttcgttattcggttaacggtatttagaacggtttcgtcgacggcgtttttttggtcgcgtcggatggtacggtggtgtagtttttgtttaaggcggtacgatcgtcgtcgggacgggcgcggcggcgttcggtatgtttagcgtggatatcggggtggcggtatttttcgttttcggtatcggttttttgttgtagtttaaaggcgtcgggtcgagtagttggcgattttatttggatcgt

SEQ ID NO: 28596 - DNA, 1111 bp, Artificial Sequence
  chemically treated genomic DNA (Homo sapiens) CpG-island No: 28596
acgatccaaataaaatcgccaactactcgacccgacgcctttaaactacaacaaaaaaccgataccgaaaacgaaaaataccgccaccccgatatccacgctaaacataccgaacgccgccgcgcccgtcccgacgacgatcgtaccgccttaaacaaaaactacaccaccgtaccatccgacgcgaccaaaaaaacgccgtcgacgaaaccgttctaaataccgttaaccgaataacgaaaaaccaccgcgccaaacccgatatcttcgatataaaacgtaccaaacaaataaaaaaacacataaaccgaccccgcgtcaaacgtataaataccgatacacaaaaccaacttataacccgacaaatcgatacccgacgcaccgaaaatctcgatcgcctcaccgacatcgacaccgctattatcgtaataaatctcattaataaacacattcgccgacgaaacgaacgacgcgacatcgtcgttaataatcgtccccgtcgcgaccgcacgaatcaacgtcgcgccgccctacgaatcgataaacgtaacgaaaaaaatttcgttaacctcgaacaccgtatcgcccaacacgaacaaccgaatctcgacgataatcgcgcccgcgacgaacgtcaccgtaccgatacgcaccaaacccgtaacgaaatcgctctcgtcgaccataacgataccgttacccaaattcaacgtccaaatcgccgacacctcgcccgccgtaccgtcgctacgcgtcacgataaaaacgatatcacgcgtaccgctatccccctcgacgataataacgtcgacgataaccaacgtacctaacgtcgaaatcgacgccgcgctaccgaacgtctaacccgtattcgtcgcgccgacgatcgccgtattaatcaacgcccaataaaaatcttccgccgtcgtaccgataccgaccaaacccaacgcgataccgttctacgtcccgtcctcataaacgccgatattaacgctcgtcatacccttaaccgatccatcgacgacaacgaaactaccctcataactaaaaaactaaacgacattccccgccgcatcgaccaacgcgaaaccatcgaactccccgacga

SEQ ID NO: 28597 - DNA, 633 bp, Artificial Sequence
  chemically treated genomic DNA (Homo sapiens) CpG-island No: 28597
tcgtcggcggtcgttattcggtatagatcgaacgttcgtttcgaattcgagtgcgattatggacgttacggtgaggcgataggtgattcgttttaggttcgatatgttcgtgtcggttttttcggtattcgcgttaaggcggtttaattgttttcggcgtcgattatgaatattatcggtttgtcgcgggatatcggattttagtcggtcgatacggcggagcgtacgtatcgcgtgatcgtcgcgtcgtcgagttggagtcgatcgcgcggtagtttttttaatagtcgtttgggcgtcgggaattcgacgagcgtttcgcgtttggtattttgttgaaggagcgaaatcgttatgtttttttatttttcgttattcgattgatgaggttcgttgtgaaggtgttaattataggttattttatcgatagtgacggtttcggcgtgtatgtgcgatttcgatatatgcggggttttagtacgataaattcgtagaagtataaattaggtaggcgtttttttcggcgtcggtagcgattagtcggttaaggtagtaatttttagcgttcgtatatttttcggtacgatgaaggtatcgtagatcgtttttaggagtaggtttacgatatgtcgt

SEQ ID NO: 28598 - DNA, 633 bp, Artificial Sequence
  chemically treated genomic DNA (Homo sapiens) CpG-island No: 28598
acgacatatcgtaaacctactcctaaaaacgatctacgataccttcatcgtaccgaaaaatatacgaacgctaaaaattactaccttaaccgactaatcgctaccgacgccgaaaaaaacgcctacctaatttatacttctacgaatttatcgtactaaaaccccgcatatatcgaaatcgcacatacacgccgaaaccgtcactatcgataaaataacctataattaacaccttcacaacgaacctcatcaatcgaataacgaaaaataaaaaaacataacgatttcgctccttcaacaaaataccaaacgcgaaacgctcgtcgaattcccgacgcccaaacgactattaaaaaaactaccgcgcgatcgactccaactcgacgacgcgacgatcacgcgatacgtacgctccgccgtatcgaccgactaaaatccgatatcccgcgacaaaccgataatattcataatcgacgccgaaaacaattaaaccgccttaacgcgaataccgaaaaaaccgacacgaacatatcgaacctaaaacgaatcacctatcgcctcaccgtaacgtccataatcgcactcgaattcgaaacgaacgttcgatctataccgaataacgaccgccgacga

SEQ ID NO: 28599 - DNA, 633 bp, Artificial Sequence
  chemically treated genomic DNA (Homo sapiens) CpG-island No: 28599
gcgatatgtcgtagatttgtttttgggggcggtttgcgatgtttttatcgtgtcggaagatgtgcgggcgttggggattgttgttttgatcggttggtcgttgtcggcgtcgggaaaagcgtttgtttgatttgtgtttttgcggatttgtcgtgttagagtttcgtatatgtcgaaatcgtatatgtacgtcggaatcgttattgtcgatggagtggtttatgattggtatttttatagcgaattttattagtcggatgacgaggggtggaagggtatgacgatttcgtttttttagtaggatgttaagcgcgaagcgttcgtcgaattttcggcgtttaagcggttgttgaaaggattgtcgcgcggtcggttttaattcgacgacgcgacgattacgcgatgcgtgcgtttcgtcgtgtcggtcggttgggattcgatgtttcgcggtaagtcggtggtatttatggtcgacgtcgaaggtaattgagtcgttttaacgcgggtgtcgaaaagatcggtacggatatgtcggatttaaggcggattatttgtcgttttatcgtggcgtttatggtcgtattcgggttcgagacggacgttcgatttgtgtcggatggcggtcgtcgacgg

SEQ ID NO: 28600 - DNA, 633 bp, Artificial Sequence
  chemically treated genomic DNA (Homo sapiens) CpG-island No: 28600
ccgtcgacgaccgccatccgacacaaatcgaacgtccgtctcgaacccgaatacgaccataaacgccacgataaaacgacaaataatccgccttaaatccgacatatccgtaccgatcttttcgacacccgcgttaaaacgactcaattaccttcgacgtcgaccataaataccaccgacttaccgcgaaacatcgaatcccaaccgaccgacacgacgaaacgcacgcatcgcgtaatcgtcgcgtcgtcgaattaaaaccgaccgcgcgacaatcctttcaacaaccgcttaaacgccgaaaattcgacgaacgcttcgcgcttaacatcctactaaaaaaacgaaatcgtcatacccttccacccctcgtcatccgactaataaaattcgctataaaaataccaatcataaaccactccatcgacaataacgattccgacgtacatatacgatttcgacatatacgaaactctaacacgacaaatccgcaaaaacacaaatcaaacaaacgcttttcccgacgccgacaacgaccaaccgatcaaaacaacaatccccaacgcccgcacatcttccgacacgataaaaacatcgcaaaccgcccccaaaaacaaatctacgacatatcgc

SEQ ID NO: 28601 - DNA, 993 bp, Artificial Sequence
  chemically treated genomic DNA (Homo sapiens) CpG-island No: 28601
cggtgttcggtgttacgttttcgatatggtttttgatttcgatatcgggtagcgtatttatttcgatttttatcggttggtcggggcgtattaggtttagttgcgtttttttgaagttcgtttcgatataaagttggttgacgggtacgatcgatatggtacgggtgtcggtttgtacgaattggtcgatacgtatcgttttgttgtcgatacggttcgcgatcgaggcgcggattagggtcgaatttagattgatttcggcggtatcgagttgcgttttggcggtttggttttgcgagcgggtttgttgtatttgggtatttagtgtgtcgacgcggcgttgcgtagcggcgagcgcggcggaggtattggcgacgcgggtattggtttgtcgtgtttggttttgaagttgcgataggcgttcgcggtttttcgtttttaagtcggcgagcggagtgtagcgcgttatttcggtttgggcgaagcgggtatcgttttgcgcggcgcgaagtttcgcgcgggcgcggtcgatcgcggtttgttgttcgcggatttgcgtttgaacgttttcggattggcgcgtgcgacgtcgatttgcgtttgaatttgcgcggtttgcgcgttataatcgcgcgtgtcgatttgaagtagcggttgggcggttttgacgttttgattttcgtcgacgaatattttgtcgatatagtcggatattttcggcgttacggttattgcgttcgtttggatgaaggcgtcgttggtcgattgtatatattggttaacgtttttgtagcgcgtatattagaatatttcgtcgataatcgcgatggcggttacgataagtagaatgattcggatacgtcgttttttttgcggcgatgcgatttcggtcgtatcgttttgcggtacgtgggttgcggcgtttttttggtcgttatttatttggttagcgtcgattatgtttttttttttgtcgatggaattaataggatt

SEQ ID NO: 28602 - DNA, 993 bp, Artificial Sequence
  chemically treated genomic DNA (Homo sapiens) CpG-island No: 28602
aatcctattaattccatcgacaaaaaaaaaaacataatcgacgctaaccaaataaataacgaccaaaaaaacgccgcaacccacgtaccgcaaaacgatacgaccgaaatcgcatcgccgcaaaaaaaacgacgtatccgaatcattctacttatcgtaaccgccatcgcgattatcgacgaaatattctaatatacgcgctacaaaaacgttaaccaatatatacaatcgaccaacgacgccttcatccaaacgaacgcaataaccgtaacgccgaaaatatccgactatatcgacaaaatattcgtcgacgaaaatcaaaacgtcaaaaccgcccaaccgctacttcaaatcgacacgcgcgattataacgcgcaaaccgcgcaaattcaaacgcaaatcgacgtcgcacgcgccaatccgaaaacgttcaaacgcaaatccgcgaacaacaaaccgcgatcgaccgcgcccgcgcgaaacttcgcgccgcgcaaaacgatacccgcttcgcccaaaccgaaataacgcgctacactccgctcgccgacttaaaaacgaaaaaccgcgaacgcctatcgcaacttcaaaaccaaacacgacaaaccaatacccgcgtcgccaatacctccgccgcgctcgccgctacgcaacgccgcgtcgacacactaaatacccaaatacaacaaacccgctcgcaaaaccaaaccgccaaaacgcaactcgataccgccgaaatcaatctaaattcgaccctaatccgcgcctcgatcgcgaaccgtatcgacaacaaaacgatacgtatcgaccaattcgtacaaaccgacacccgtaccatatcgatcgtacccgtcaaccaactttatatcgaaacgaacttcaaaaaaacgcaactaaacctaatacgccccgaccaaccgataaaaatcgaaataaatacgctacccgatatcgaaatcaaaaaccatatcgaaaacgtaacaccgaacaccg

SEQ ID NO: 28603 - DNA, 993 bp, Artificial Sequence
  chemically treated genomic DNA (Homo sapiens) CpG-island No: 28603
agttttattgattttatcgatagggaggggggtatggtcgacgttaattaagtaaatgacggttaggaagacgtcgtaatttacgtgtcgtaggacgatgcggtcgaggtcgtatcgtcgtagaagaagcggcgtattcgggttattttgtttgtcgtggtcgttatcgcgattatcggcggggtgttttggtatgcgcgttataagagcgttggttagtatatgtagtcgattaacgacgtttttatttaggcggacgtagtgatcgtggcgtcgaaggtgttcggttatgtcgataaggtgttcgtcggcgagaattaggacgttaaggtcgtttagtcgttgttttagatcgatacgcgcgattatagcgcgtagatcgcgtagatttaggcgtagatcggcgtcgtacgcgttaattcgagggcgtttaggcgtagattcgcgagtagtaagtcgcgatcgatcgcgttcgcgcggagtttcgcgtcgcgtagagcgatgttcgtttcgtttaggtcgaagtgacgcgttatatttcgttcgtcggtttgggggcggagagtcgcgagcgtttgtcgtagttttagaattaggtacggtaggttaatgttcgcgtcgttagtgttttcgtcgcgttcgtcgttgcgtagcgtcgcgtcggtatattgaatgtttaggtgtagtaggttcgttcgtagggttaggtcgttaaggcgtagttcgatgtcgtcgaggttaatttgggttcgattttgattcgcgtttcgatcgcgggtcgtgtcggtaataagacggtgcgtgtcggttagttcgtataggtcggtattcgtattatgtcgatcgtgttcgttagttagttttatatcgaggcgaattttaaggaaacgtaattgggtttgatgcgtttcggttagtcggtgaagatcgaggtggatgcgttgttcgatgtcgagattaagggttatgtcgaaagcgtggtatcgggtatcg

SEQ ID NO: 28604 - DNA, 993 bp, Artificial Sequence
  chemically treated genomic DNA (Homo sapiens) CpG-island No: 28604
cgatacccgataccacgctttcgacataacccttaatctcgacatcgaacaacgcatccacctcgatcttcaccgactaaccgaaacgcatcaaacccaattacgtttccttaaaattcgcctcgatataaaactaactaacgaacacgatcgacataatacgaataccgacctatacgaactaaccgacacgcaccgtcttattaccgacacgacccgcgatcgaaacgcgaatcaaaatcgaacccaaattaacctcgacgacatcgaactacgccttaacgacctaaccctacgaacgaacctactacacctaaacattcaatataccgacgcgacgctacgcaacgacgaacgcgacgaaaacactaacgacgcgaacattaacctaccgtacctaattctaaaactacgacaaacgctcgcgactctccgcccccaaaccgacgaacgaaatataacgcgtcacttcgacctaaacgaaacgaacatcgctctacgcgacgcgaaactccgcgcgaacgcgatcgatcgcgacttactactcgcgaatctacgcctaaacgccctcgaattaacgcgtacgacgccgatctacgcctaaatctacgcgatctacgcgctataatcgcgcgtatcgatctaaaacaacgactaaacgaccttaacgtcctaattctcgccgacgaacaccttatcgacataaccgaacaccttcgacgccacgatcactacgtccgcctaaataaaaacgtcgttaatcgactacatatactaaccaacgctcttataacgcgcataccaaaacaccccgccgataatcgcgataacgaccacgacaaacaaaataacccgaatacgccgcttcttctacgacgatacgacctcgaccgcatcgtcctacgacacgtaaattacgacgtcttcctaaccgtcatttacttaattaacgtcgaccatacccccctccctatcgataaaatcaataaaact

SEQ ID NO: 28605 - DNA, 971 bp, Artificial Sequence
  chemically treated genomic DNA (Homo sapiens) CpG-island No: 28605
cggtatgtcgtcgtttggatcggtttttttagttatttcgaattatgggaagaggatttggagtttgcgcgtgaggaggtgttggtttttgcgcgtgcggtttatgtcgatggtcggggcgaacgggtgattttggtcgtcgtcgatggcgaggcggcggatgcggcgcgcgttatggcgggtaatgtggcggacgtggtggtatagtcgttcggcgatataaggttgcgcgatatcgggtcgatcgttatcggcgacggttcggttcggttgttttagtttaacggttggggcgcgaagatatatttgttttgcgacgatacggtcgcgggcgtttggtcgaagatcgagttttcggcgttacggtatgcgattgggtgttggaaaggggcgcgatcgatgtcgacggtatcggtttggtcgtgattacgcgttagtgtttgttttattttaatcgtaatttcgagttggacgaagttacgatcgagtagcggttgggtcgaggatttggggtgattcgcgtggtttggttgggcgacgggatgtttaacgattatatcgacggttatgtcgataatttggcgcgtttcgtcgggtcgaatcgcgtcgcgattttcgaggcggcggagagcgattttaattggtaggtttatgttatcgtttagcgtaacgttaaggcggtcgggttgaacgtgtagacgatttagtcgtcgggttgtgttttgcgcgatgaagagatcgtttcgattagtaatatgaatttttatatcggtaatgcggcggtggtcgtgtttatttatggtatcgataatgacgaggtcggcgtcgcggcgatttaggcgatttttttcgatcgttaggtggtgggtttgcgcgtcgatacgattttgatcggcggcggtagtttttattgtatttcgtagtagatttcggttttttcgttgtttttgatttaaagtaagcgttttttt

SEQ ID NO: 28606 - DNA, 971 bp, Artificial Sequence
  chemically treated genomic DNA (Homo sapiens) CpG-island No: 28606
aaaaaaacgcttactttaaatcaaaaacaacgaaaaaaccgaaatctactacgaaatacaataaaaactaccgccgccgatcaaaatcgtatcgacgcgcaaacccaccacctaacgatcgaaaaaaatcgcctaaatcgccgcgacgccgacctcgtcattatcgataccataaataaacacgaccaccgccgcattaccgatataaaaattcatattactaatcgaaacgatctcttcatcgcgcaaaacacaacccgacgactaaatcgtctacacgttcaacccgaccgccttaacgttacgctaaacgataacataaacctaccaattaaaatcgctctccgccgcctcgaaaatcgcgacgcgattcgacccgacgaaacgcgccaaattatcgacataaccgtcgatataatcgttaaacatcccgtcgcccaaccaaaccacgcgaatcaccccaaatcctcgacccaaccgctactcgatcgtaacttcgtccaactcgaaattacgattaaaataaaacaaacactaacgcgtaatcacgaccaaaccgataccgtcgacatcgatcgcgcccctttccaacacccaatcgcataccgtaacgccgaaaactcgatcttcgaccaaacgcccgcgaccgtatcgtcgcaaaacaaatatatcttcgcgccccaaccgttaaactaaaacaaccgaaccgaaccgtcgccgataacgatcgacccgatatcgcgcaaccttatatcgccgaacgactataccaccacgtccgccacattacccgccataacgcgcgccgcatccgccgcctcgccatcgacgacgaccaaaatcacccgttcgccccgaccatcgacataaaccgcacgcgcaaaaaccaacacctcctcacgcgcaaactccaaatcctcttcccataattcgaaataactaaaaaaaccgatccaaacgacgacataccg

SEQ ID NO: 28607 - DNA, 971 bp, Artificial Sequence
  chemically treated genomic DNA (Homo sapiens) CpG-island No: 28607
ggggaagcgtttgttttggattagaggtagcgaggaggtcggaatttgttgcgaaatatagtgaaagttgtcgtcgtcggttaggatcgtatcggcgcgtaggtttattatttgacgatcggggaagatcgtttggatcgtcgcgacgtcggtttcgttattgtcggtgttatagatgggtacgattatcgtcgtattgtcgatatagaagtttatattgttggtcggaacgatttttttatcgcgtaggatatagttcggcgattggatcgtttatacgtttaattcggtcgttttggcgttgcgttgggcggtggtatagatttgttaattggggtcgtttttcgtcgtttcggagatcgcgacgcggttcggttcgacgaagcgcgttagattgtcgatatggtcgtcggtatgatcgttaagtatttcgtcgtttagttagattacgcgggttattttaaattttcggtttagtcgttgttcgatcgtggtttcgtttagttcggggttgcggttgaggtagaataggtattggcgcgtggttacgattagatcggtgtcgtcggtatcgatcgcgtttttttttagtatttagtcgtatgtcgtggcgtcgaagattcgattttcggttaggcgttcgcgatcgtgtcgtcgtagggtagatgtattttcgcgttttagtcgttgaattggaatagtcgggtcgagtcgtcgtcggtgacgatcggttcggtatcgcgtagttttatgtcgtcgaacggttgtattattacgttcgttatattgttcgttatggcgcgcgtcgtattcgtcgtttcgttatcggcggcgattaggattattcgttcgtttcggttatcggtatgaatcgtacgcgtaaaggttaatatttttttacgcgtaggttttagattttttttttataattcgggatggttggggaaatcgatttagacggcggtatgtcg

SEQ ID NO: 28608 - DNA, 971 bp, Artificial Sequence
  chemically treated genomic DNA (Homo sapiens) CpG-island No: 28608
cgacataccgccgtctaaatcgatttccccaaccatcccgaattataaaaaaaaaatctaaaacctacgcgtaaaaaaatattaacctttacgcgtacgattcataccgataaccgaaacgaacgaataatcctaatcgccgccgataacgaaacgacgaatacgacgcgcgccataacgaacaatataacgaacgtaataatacaaccgttcgacgacataaaactacgcgataccgaaccgatcgtcaccgacgacgactcgacccgactattccaattcaacgactaaaacgcgaaaatacatctaccctacgacgacacgatcgcgaacgcctaaccgaaaatcgaatcttcgacgccacgacatacgactaaatactaaaaaaaaacgcgatcgataccgacgacaccgatctaatcgtaaccacgcgccaatacctattctacctcaaccgcaaccccgaactaaacgaaaccacgatcgaacaacgactaaaccgaaaatttaaaataacccgcgtaatctaactaaacgacgaaatacttaacgatcataccgacgaccatatcgacaatctaacgcgcttcgtcgaaccgaaccgcgtcgcgatctccgaaacgacgaaaaacgaccccaattaacaaatctataccaccgcccaacgcaacgccaaaacgaccgaattaaacgtataaacgatccaatcgccgaactatatcctacgcgataaaaaaatcgttccgaccaacaatataaacttctatatcgacaatacgacgataatcgtacccatctataacaccgacaataacgaaaccgacgtcgcgacgatccaaacgatcttccccgatcgtcaaataataaacctacgcgccgatacgatcctaaccgacgacgacaactttcactatatttcgcaacaaattccgacctcctcgctacctctaatccaaaacaaacgcttcccc

SEQ ID NO: 28609 - DNA, 961 bp, Artificial Sequence
  chemically treated genomic DNA (Homo sapiens) CpG-island No: 28609
tcgggatgtcgggtaggatttgaagcgtgatcgcgcggaatttttttttggtgatgaagtttattattcgtatcgtcggcggatagtcgaagcgcgtcgttttttgttcgggtagtatttcgattcgttttatcgttttatagggtaggttttggaattcggcgaagttcgatatgcgtcgttcgttgagtagtattatcggttcgttttcgttcgtcgaattggttagcgattttattcgtttgagtagttcggttaggttgggcgcgtttagcgtcgtaatcgtttcggtatcgagtatcgcgatcggttcgatcgtttcgatgacggagtcgggaatgcgtttgtcggtgacggtgattttcgtagggggtgtttgttcgtcgggatcggtttgcgttatcgtttttgtcggtatcgttagttttaagacgatcgtcgattattttacgtcgtttttcggtcgcgcgcgttttttatatcgtatcgtttagttatttttatcgtcgacgtgatggtgatgtttagtgtggtaattatgttataattaaggttcgtgtttcgttatatcgacggaatatcgcggtggtcgtttgtcgtggtttttataattgacgtgaagatatggtttgtttattcgttcgacgattgtcgaataaggttaaacgatcgcgacgatatgtagggagaagcgttcgcgatgagtatgaatgtcgtcgttagagtgggcgattcgatcggttatagttttagttagggtttgttcggcgaggcgttggatggtttgttttttgttcgtcgtagcgaggtggatatgcgcgcgggtaatttcggtcggttgatcgcgcgcgggttgagcggcggacgttggacgtcggtcgatggttagttgacgttcggatcgcgcgacgtttttattaatggttttttcgttattatgacgattcggtcgatcggttaa

SEQ ID NO: 28610 - DNA, 961 bp, Artificial Sequence
  chemically treated genomic DNA (Homo sapiens) CpG-island No: 28610
ttaaccgatcgaccgaatcgtcataataacgaaaaaaccattaataaaaacgtcgcgcgatccgaacgtcaactaaccatcgaccgacgtccaacgtccgccgctcaacccgcgcgcgatcaaccgaccgaaattacccgcgcgcatatccacctcgctacgacgaacaaaaaacaaaccatccaacgcctcgccgaacaaaccctaactaaaactataaccgatcgaatcgcccactctaacgacgacattcatactcatcgcgaacgcttctccctacatatcgtcgcgatcgtttaaccttattcgacaatcgtcgaacgaataaacaaaccatatcttcacgtcaattataaaaaccacgacaaacgaccaccgcgatattccgtcgatataacgaaacacgaaccttaattataacataattaccacactaaacatcaccatcacgtcgacgataaaaataactaaacgatacgatataaaaaacgcgcgcgaccgaaaaacgacgtaaaataatcgacgatcgtcttaaaactaacgataccgacaaaaacgataacgcaaaccgatcccgacgaacaaacaccccctacgaaaatcaccgtcaccgacaaacgcattcccgactccgtcatcgaaacgatcgaaccgatcgcgatactcgataccgaaacgattacgacgctaaacgcgcccaacctaaccgaactactcaaacgaataaaatcgctaaccaattcgacgaacgaaaacgaaccgataatactactcaacgaacgacgcatatcgaacttcgccgaattccaaaacctaccctataaaacgataaaacgaatcgaaatactacccgaacaaaaaacgacgcgcttcgactatccgccgacgatacgaataataaacttcatcaccaaaaaaaaattccgcgcgatcacgcttcaaatcctacccgacatcccga

SEQ ID NO: 28611 - DNA, 961 bp, Artificial Sequence
  chemically treated genomic DNA (Homo sapiens) CpG-island No: 28611
ttggtcggtcgatcggatcgttatggtggcgggggggttattgatgaagacgtcgcgcgattcgagcgttagttggttatcggtcggcgtttagcgttcgtcgtttagttcgcgcgcgattagtcggtcgagattgttcgcgcgtatgtttatttcgttgcgacgggtaaagaataaattatttagcgtttcgtcgaataggttttggttaaagttgtggtcgatcggatcgtttattttggcggcggtatttatgtttatcgcgggcgtttttttttgtatgtcgtcgcgatcgtttgattttattcgataatcgtcggacgggtaaataagttatatttttacgttagttatgaaaattacggtaggcggttatcgcgatatttcgtcgatatggcgaagtacgagttttaattgtgatatgattgttatattaaatattattattacgtcggcgatgggagtggttggacgatgcggtatggggagcgcgcgcggtcgaggggcggcgtgggatggtcggcggtcgttttgggattggcgatatcgatagggacgatggcgtaggtcgatttcggcgaataggtattttttgcggaagttatcgttatcggtaagcgtattttcggtttcgttatcggggcggtcgagtcggtcgcggtgttcgatgtcgaggcgattgcggcgttgggcgcgtttagtttggtcgaattgtttaagcgggtgaagtcgttgattagttcggcgagcgggggcgagtcggtgatgttgtttaacgggcggcgtatatcgggtttcgtcgagttttagaatttgttttatgaggcgatggagcggatcgaagtgttgttcgagtaggaggcggcgcgtttcggttattcgtcgacggtgcgggtgatgaattttattattaagaagaaatttcgcgcggttacgttttaggttttgttcggtatttcga

SEQ ID NO: 28612 - DNA, 961 bp, Artificial Sequence
  chemically treated genomic DNA (Homo sapiens) CpG-island No: 28612
tcgaaataccgaacaaaacctaaaacgtaaccgcgcgaaatttcttcttaataataaaattcatcacccgcaccgtcgacgaataaccgaaacgcgccgcctcctactcgaacaacacttcgatccgctccatcgcctcataaaacaaattctaaaactcgacgaaacccgatatacgccgcccgttaaacaacatcaccgactcgcccccgctcgccgaactaatcaacgacttcacccgcttaaacaattcgaccaaactaaacgcgcccaacgccgcaatcgcctcgacatcgaacaccgcgaccgactcgaccgccccgataacgaaaccgaaaatacgcttaccgataacgataacttccgcaaaaaatacctattcgccgaaatcgacctacgccatcgtccctatcgatatcgccaatcccaaaacgaccgccgaccatcccacgccgcccctcgaccgcgcgcgctccccataccgcatcgtccaaccactcccatcgccgacgtaataataatatttaatataacaatcatatcacaattaaaactcgtacttcgccatatcgacgaaatatcgcgataaccgcctaccgtaattttcataactaacgtaaaaatataacttatttacccgtccgacgattatcgaataaaatcaaacgatcgcgacgacatacaaaaaaaaacgcccgcgataaacataaataccgccgccaaaataaacgatccgatcgaccacaactttaaccaaaacctattcgacgaaacgctaaataatttattctttacccgtcgcaacgaaataaacatacgcgcgaacaatctcgaccgactaatcgcgcgcgaactaaacgacgaacgctaaacgccgaccgataaccaactaacgctcgaatcgcgcgacgtcttcatcaataacccccccgccaccataacgatccgatcgaccgaccaa

SEQ ID NO: 28613 - DNA, 510 bp, Artificial Sequence
  chemically treated genomic DNA (Homo sapiens) CpG-island No: 28613
ttcgttagggttataatgagtagtttcgtcgtaaaacgatttgatattcggatcgaggtcgtttcgttaaatacgttattttgaatagcggcgtaggatgttgtcgcgaagtcggtgatcgacggttttgggcgcgataggattatgatgtttaagcgtcgtataaggatgtacgattaaatcgagcgtatttgtttttttgatattttaggcggtcgtggaaattatatattcgtatcgttaggatcgggcgtttgcggggttattatgtttcgtaacggatatgagtcgaatagattcgcgtcgtattaaaggacgatatcggttataagataatattttgtagtattttgttgatcggcgttgtcgggttcgttatcgcgtaggttttcgattatatcgataggggtgttcgggttatagcggttaggttttagtatgcgattcgttatcgggtttaggcggagtttttgttatttttttttaatttggttgttattattggtaagg

SEQ ID NO: 28614 - DNA, 510 bp, Artificial Sequence
  chemically treated genomic DNA (Homo sapiens) CpG-island No: 28614
ccttaccaataataacaaccaaattaaaaaaaaataacaaaaactccgcctaaacccgataacgaatcgcatactaaaacctaaccgctataacccgaacacccctatcgatataatcgaaaacctacgcgataacgaacccgacaacgccgatcaacaaaatactacaaaatattatcttataaccgatatcgtcctttaatacgacgcgaatctattcgactcatatccgttacgaaacataataaccccgcaaacgcccgatcctaacgatacgaatatataatttccacgaccgcctaaaatatcaaaaaaacaaatacgctcgatttaatcgtacatccttatacgacgcttaaacatcataatcctatcgcgcccaaaaccgtcgatcaccgacttcgcgacaacatcctacgccgctattcaaaataacgtatttaacgaaacgacctcgatccgaatatcaaatcgttttacgacgaaactactcattataaccctaacgaa

SEQ ID NO: 28615 - DNA, 510 bp, Artificial Sequence
  chemically treated genomic DNA (Homo sapiens) CpG-island No: 28615
ttttgttagtggtggtagttagattgagaaagagtgataggaatttcgtttgggttcggtggcggatcgtatgttgaaatttgatcgttatagttcgaatatttttgtcggtgtggtcgggagtttgcgcggtagcgggttcggtagcgtcgattagtagggtgttgtaaggtgttattttatggtcgatgtcgttttttggtgcgacgcggatttgttcggtttatgttcgttacgagatatggtaatttcgtaagcgttcgattttaacgatgcgggtatgtagtttttacggtcgtttggaatattaggaaggtagatacgttcgatttggtcgtgtatttttatgcgacgtttgagtattatgattttatcgcgtttaaaatcgtcgattatcgatttcgcggtagtattttacgtcgttgtttaggataacgtatttggcggaacggtttcggttcgggtgttaggtcgttttgcggcgggattgtttattatagttttggcgga

SEQ ID NO: 28616 - DNA, 510 bp, Artificial Sequence
  chemically treated genomic DNA (Homo sapiens) CpG-island No: 28616
tccgccaaaactataataaacaatcccgccgcaaaacgacctaacacccgaaccgaaaccgttccgccaaatacgttatcctaaacaacgacgtaaaatactaccgcgaaatcgataatcgacgattttaaacgcgataaaatcataatactcaaacgtcgcataaaaatacacgaccaaatcgaacgtatctaccttcctaatattccaaacgaccgtaaaaactacatacccgcatcgttaaaatcgaacgcttacgaaattaccatatctcgtaacgaacataaaccgaacaaatccgcgtcgcaccaaaaaacgacatcgaccataaaataacaccttacaacaccctactaatcgacgctaccgaacccgctaccgcgcaaactcccgaccacaccgacaaaaatattcgaactataacgatcaaatttcaacatacgatccgccaccgaacccaaacgaaattcctatcactctttctcaatctaactaccaccactaacaaaa

SEQ ID NO: 28617 - DNA, 637 bp, Artificial Sequence
  chemically treated genomic DNA (Homo sapiens) CpG-island No: 28617
gcggtagcgacggcgttttgaacggtaatatatagtaagtaatcgtgacgattacgttttagatgaatagcgttagtaaaggtcgttaaatttcggcgatgatgatgcgggtgcggggtacggtatcgacgattaaattaggttttttttaaacggttatttagtgttttttagggcgtagtaacgtcgggtaattcggttggatgcgttatcgaaataatagtgcgatgtagtaaaggaaggggcggacgggtatcggatattaaacgttacgaatcgttatagatttgttatcgattggatcgtcggtaattcgtttaatcgttggtattttttgggacgtttaaaatatcgttcgtatatatgatcgtcggggtcgtttttgtcgtatagaggttggttcggtaatgatagaaatataacgttttttttttcgtttcgtattttgatcgtcgtcggtttcgatttcggcggcggcgtcggtatttaggcggatatttaagattcgtgaggatgatggggcgattaatttttaatgataacgattaatcgcgattatcgcgtaaaataatttgtttcgtgtagcgggtgtattttcgtttaaaaatttgggtaatgtgtaagatgatagcggatg

SEQ ID NO: 28618 - DNA, 637 bp, Artificial Sequence
  chemically treated genomic DNA (Homo sapiens) CpG-island No: 28618
catccgctatcatcttacacattacccaaatttttaaacgaaaatacacccgctacacgaaacaaattattttacgcgataatcgcgattaatcgttatcattaaaaattaatcgccccatcatcctcacgaatcttaaatatccgcctaaataccgacgccgccgccgaaatcgaaaccgacgacgatcaaaatacgaaacgaaaaaaaaaacgttatatttctatcattaccgaaccaacctctatacgacaaaaacgaccccgacgatcatatatacgaacgatattttaaacgtcccaaaaaataccaacgattaaacgaattaccgacgatccaatcgataacaaatctataacgattcgtaacgtttaatatccgatacccgtccgccccttcctttactacatcgcactattatttcgataacgcatccaaccgaattacccgacgttactacgccctaaaaaacactaaataaccgtttaaaaaaaacctaatttaatcgtcgataccgtaccccgcacccgcatcatcatcgccgaaatttaacgacctttactaacgctattcatctaaaacgtaatcgtcacgattacttactatatattaccgttcaaaacgccgtcgctaccgc

SEQ ID NO: 28619 - DNA, 637 bp, Artificial Sequence
  chemically treated genomic DNA (Homo sapiens) CpG-island No: 28619
tattcgttgttattttgtatattatttaggtttttggacggagatgtattcgttgtacggggtagattgttttgcgcggtgatcgcggttgatcgttgttattggggattggtcgttttattatttttacgggttttggatgttcgtttggatgtcggcgtcgtcgtcggagtcggagtcggcgacgattaggatgcggggcggaggggaggacgttatgtttttgttattgtcgggttagtttttgtgcggtaagggcggtttcggcgattatgtgtacggacggtattttgggcgttttaagaaatgttaacggttgaacgggttgtcggcggtttagtcgatggtaagtttatggcggttcgtgacgtttgatgttcggtgttcgttcgtttttttttttgttgtatcgtattattatttcggtggcgtatttaatcggattgttcggcgttgttgcgttttgaggaatattgggtggtcgtttgagggagatttgatttgatcgtcgatgtcgtatttcgtattcgtattattatcgtcgaggtttggcggtttttgttggcgttgtttatttgggacgtgatcgttacgattgtttattatgtattgtcgtttaaggcgtcgtcgttgtcgt

SEQ ID NO: 28620 - DNA, 637 bp, Artificial Sequence
  chemically treated genomic DNA (Homo sapiens) CpG-island No: 28620
acgacaacgacgacgccttaaacgacaatacataataaacaatcgtaacgatcacgtcccaaataaacaacgccaacaaaaaccgccaaacctcgacgataataatacgaatacgaaatacgacatcgacgatcaaatcaaatctccctcaaacgaccacccaatattcctcaaaacgcaacaacgccgaacaatccgattaaatacgccaccgaaataataatacgatacaacaaaaaaaaaaacgaacgaacaccgaacatcaaacgtcacgaaccgccataaacttaccatcgactaaaccgccgacaacccgttcaaccgttaacatttcttaaaacgcccaaaataccgtccgtacacataatcgccgaaaccgcccttaccgcacaaaaactaacccgacaataacaaaaacataacgtcctcccctccgccccgcatcctaatcgtcgccgactccgactccgacgacgacgccgacatccaaacgaacatccaaaacccgtaaaaataataaaacgaccaatccccaataacaacgatcaaccgcgatcaccgcgcaaaacaatctaccccgtacaacgaatacatctccgtccaaaaacctaaataatatacaaaataacaacgaata

SEQ ID NO: 28621 - DNA, 792 bp, Artificial Sequence
  chemically treated genomic DNA (Homo sapiens) CpG-island No: 28621
cgattcgatcggttcgatcgaagttttcgtcgacgtttattggggcgcgtagatcgaacggagttttgagaatttttttttcggcgcgcgcgagtagatgtcgatcggtatcgtttatgcgttcgttatcgttaaaaaggtcgcggtacggattaatcgcggttatggtttcgcgggcgaaaaggtcgatgcgatcgaatcggcggcgtaggaggtgatcgaggggcggtatgacgattagttttcgttggttatttggtagatcggtttcggtatttagtttaatatgaacgttaatgaggtgatcgcgggtcgtgttaacgaaattttgatcggtacgcgtgggggaaaagtcgttcgtttattttaatgacgacgttaatcgcggttagttttttaacgatattttttcgattgcgttttatgtcgttgtcgtttttgcggtgacgaagtagtttttttttcgcgttcgatcggttttacgtcgcgttcgatgttaaggttaaggaatgggattcgatcgttaagatcggtcgtatttatttgtaggacgcgatttcgttgattttgggttaggaatttttcggttatgtttagtaattcgttaatgttcgcgatcggatcgaggggacgttttatcgtaatattttgtcgttcgcgtaagggggtacggcggtcggtatcggtttgaacgcgtcgtatggttttgtcgaggcgatcgtagtcgagatcgtcgacgcgatcgggttcgatttcgttatcgcgttttataagttttaggagtaggcgagt

SEQ ID NO: 28622 - DNA, 792 bp, Artificial Sequence
  chemically treated genomic DNA (Homo sapiens) CpG-island No: 28622
actcgcctactcctaaaacttataaaacgcgataacgaaatcgaacccgatcgcgtcgacgatctcgactacgatcgcctcgacaaaaccatacgacgcgttcaaaccgataccgaccgccgtacccccttacgcgaacgacaaaatattacgataaaacgtcccctcgatccgatcgcgaacattaacgaattactaaacataaccgaaaaattcctaacccaaaatcaacgaaatcgcgtcctacaaataaatacgaccgatcttaacgatcgaatcccattccttaaccttaacatcgaacgcgacgtaaaaccgatcgaacgcgaaaaaaaaactacttcgtcaccgcaaaaacgacaacgacataaaacgcaatcgaaaaaatatcgttaaaaaactaaccgcgattaacgtcgtcattaaaataaacgaacgacttttcccccacgcgtaccgatcaaaatttcgttaacacgacccgcgatcacctcattaacgttcatattaaactaaataccgaaaccgatctaccaaataaccaacgaaaactaatcgtcataccgcccctcgatcacctcctacgccgccgattcgatcgcatcgaccttttcgcccgcgaaaccataaccgcgattaatccgtaccgcgacctttttaacgataacgaacgcataaacgataccgatcgacatctactcgcgcgcgccgaaaaaaaaattctcaaaactccgttcgatctacgcgccccaataaacgtcgacgaaaacttcgatcgaaccgatcgaatcg

SEQ ID NO: 28623 - DNA, 792 bp, Artificial Sequence
  chemically treated genomic DNA (Homo sapiens) CpG-island No: 28623
gttcgtttgtttttggaatttgtggggcgcggtggcgaagtcgagttcggtcgcgtcggcgatttcggttgcgatcgtttcggtaaaattatgcggcgcgtttagatcggtgtcgatcgtcgtgtttttttgcgcgagcggtaggatgttgcggtgaagcgttttttcgattcggtcgcgggtattggcgagttgttggatatagtcggagaatttttggtttaaagttagcggggtcgcgttttgtaaatgggtgcggtcgattttgacgatcgaattttattttttggttttggtatcgagcgcggcgtgaagtcggtcgagcgcgggagaaaagttgtttcgttatcgtaagagcggtagcgatatggagcgtagtcgggaaggtatcgttggaggattgatcgcgattgacgtcgttattagggtgaacgggcgattttttttttacgcgtatcggttaggatttcgttggtacggttcgcgattattttattggcgtttatgttggattgggtgtcggagtcggtttgttagatgattagcgggaattggtcgttatgtcgtttttcgattattttttgcgtcgtcgattcgatcgtatcggttttttcgttcgcgaggttatggtcgcgattgattcgtgtcgcggtttttttaacgatggcgagcgtatggacgatgtcgatcggtatttgttcgcgcgcgtcgaaggggaaatttttaagatttcgttcggtttgcgcgttttaataggcgtcggcggggatttcgatcgggtcgatcgaatcg

SEQ ID NO: 28624 - DNA, 792 bp, Artificial Sequence
  chemically treated genomic DNA (Homo sapiens) CpG-island No: 28624
cgattcgatcgacccgatcgaaatccccgccgacgcctattaaaacgcgcaaaccgaacgaaatcttaaaaatttccccttcgacgcgcgcgaacaaataccgatcgacatcgtccatacgctcgccatcgttaaaaaaaccgcgacacgaatcaatcgcgaccataacctcgcgaacgaaaaaaccgatacgatcgaatcgacgacgcaaaaaataatcgaaaaacgacataacgaccaattcccgctaatcatctaacaaaccgactccgacacccaatccaacataaacgccaataaaataatcgcgaaccgtaccaacgaaatcctaaccgatacgcgtaaaaaaaaaatcgcccgttcaccctaataacgacgtcaatcgcgatcaatcctccaacgataccttcccgactacgctccatatcgctaccgctcttacgataacgaaacaacttttctcccgcgctcgaccgacttcacgccgcgctcgataccaaaaccaaaaaataaaattcgatcgtcaaaatcgaccgcacccatttacaaaacgcgaccccgctaactttaaaccaaaaattctccgactatatccaacaactcgccaatacccgcgaccgaatcgaaaaaacgcttcaccgcaacatcctaccgctcgcgcaaaaaaacacgacgatcgacaccgatctaaacgcgccgcataattttaccgaaacgatcgcaaccgaaatcgccgacgcgaccgaactcgacttcgccaccgcgccccacaaattccaaaaacaaacgaac

SEQ ID NO: 28625 - DNA, 654 bp, Artificial Sequence
  chemically treated genomic DNA (Homo sapiens) CpG-island No: 28625
atagcgttacgagtattcgcgtgaaggtaacggcggtgaatacgttggtcgcgatgtcgattagtagtacgatcgcgaaattttttatcggtttcgagtcgagtacgagtatgatgatattcgagatggcgtgggttatattcgtttcgaagatcgtacggttggtttttttgtaatttagttcgatcgattggacgacgtttcgttcgcgtcgtcgtttttcgcgaatgcgttcgttgattagtacgttcgcgtcgatttgtcgtgtcgatggttagtacgaagttcgcgatattcggtagggttagcgtcgcgttgagtatttttattacggttaggatgattagtacgttgatgacgatcgcgatgttagtatagatgtcgaagcgattataggtgagggttatgaatacgatttcggcgattttcgcgatcgaggagcggagtatgttcgcgtggatagagtcggcgtttaggttcggttcgacggtgcgtttttagtcgatttttagatcgatcggtagtttggtcgaatatagcgagatcgttagttgattggcggtatcgacggtggagttgtcgttgatcgaggcgcgttcgtttaggatcggttcgttaatatttcgggcggaaagtatttggttattataaaat

SEQ ID NO: 28626 - DNA, 654 bp, Artificial Sequence
  chemically treated genomic DNA (Homo sapiens) CpG-island No: 28626
attttataataaccaaatactttccgcccgaaatattaacgaaccgatcctaaacgaacgcgcctcgatcaacgacaactccaccgtcgataccgccaatcaactaacgatctcgctatattcgaccaaactaccgatcgatctaaaaatcgactaaaaacgcaccgtcgaaccgaacctaaacgccgactctatccacgcgaacatactccgctcctcgatcgcgaaaatcgccgaaatcgtattcataaccctcacctataatcgcttcgacatctatactaacatcgcgatcgtcatcaacgtactaatcatcctaaccgtaataaaaatactcaacgcgacgctaaccctaccgaatatcgcgaacttcgtactaaccatcgacacgacaaatcgacgcgaacgtactaatcaacgaacgcattcgcgaaaaacgacgacgcgaacgaaacgtcgtccaatcgatcgaactaaattacaaaaaaaccaaccgtacgatcttcgaaacgaatataacccacgccatctcgaatatcatcatactcgtactcgactcgaaaccgataaaaaatttcgcgatcgtactactaatcgacatcgcgaccaacgtattcaccgccgttaccttcacgcgaatactcgtaacgctat

SEQ ID NO: 28627 - DNA, 654 bp, Artificial Sequence
  chemically treated genomic DNA (Homo sapiens) CpG-island No: 28627
attttatgatggttaagtgtttttcgttcggaatattaacgaatcgattttgggcggacgcgtttcgattagcggtaattttatcgtcgatatcgttaattagttggcgatttcgttgtgttcggttaagttgtcgatcgatttgaaggtcggttaagagcgtatcgtcgggtcggatttgggcgtcgattttatttacgcgggtatatttcgtttttcgatcgcggagatcgtcgagatcgtgtttatgatttttatttatggtcgtttcggtatttatgttaatatcgcggtcgttattaacgtgttggttattttggtcgtgatggggatgtttaacgcgacgttgattttgtcgggtatcgcgggtttcgtgttgattatcggtacgatagatcgacgcgaacgtgttgattaacgagcgtattcgcgaagaacgacggcgcggacgaagcgtcgtttagtcggtcgagttgggttataaggaagttagtcgtacgattttcgaggcgaatgtgatttacgttatttcgggtgttattatgttcgtgttcggttcggggtcggtgaagggtttcgcggtcgtgttgttgatcggtatcgcgattagcgtgtttatcgtcgttatttttacgcggatgttcgtggcgttgt

SEQ ID NO: 28628 - DNA, 654 bp, Artificial Sequence
  chemically treated genomic DNA (Homo sapiens) CpG-island No: 28628
acaacgccacgaacatccgcgtaaaaataacgacgataaacacgctaatcgcgataccgatcaacaacacgaccgcgaaacccttcaccgaccccgaaccgaacacgaacataataacacccgaaataacgtaaatcacattcgcctcgaaaatcgtacgactaacttccttataacccaactcgaccgactaaacgacgcttcgtccgcgccgtcgttcttcgcgaatacgctcgttaatcaacacgttcgcgtcgatctatcgtaccgataatcaacacgaaacccgcgatacccgacaaaatcaacgtcgcgttaaacatccccatcacgaccaaaataaccaacacgttaataacgaccgcgatattaacataaataccgaaacgaccataaataaaaatcataaacacgatctcgacgatctccgcgatcgaaaaacgaaatatacccgcgtaaataaaatcgacgcccaaatccgacccgacgatacgctcttaaccgaccttcaaatcgatcgacaacttaaccgaacacaacgaaatcgccaactaattaacgatatcgacgataaaattaccgctaatcgaaacgcgtccgcccaaaatcgattcgttaatattccgaacgaaaaacacttaaccatcataaaat

SEQ ID NO: 28629 - DNA, 866 bp, Artificial Sequence
  chemically treated genomic DNA (Homo sapiens) CpG-island No: 28629
ggttacgaggcgttcgggaagtgtgtttaatgttcgaagtagtttttattcgggcggttttgagttcgggtcgcgttttggtgtattttttttgacgtttgttatttatagtttggggtaggagagtggcgacggcgaggagtaattgtacgcgatttgggattttgttttgtttcgcggttcgcgttattatggtaattgtaggtagttagtatcgacggcgggaaaacgaggatcggagtcgcgttatagttttggttttcgagtagtttagggagagtttttgcgttttttagttttcgtttttttttatgtcggaggttttaagttcgtagcgaagttcgtaaagagtttttttcgacgtttacgagatcggaagtgtttgggtttaggtggaggaaggattcgcgtggtcgttttcgcgttttttttggggttcgtgtttttttcggcgtttttttcgcgttttttattatggtaattcgggcgtcgggagcgtgggttgcgagtcgagtgggtgggggagtcgtcgggttttattcgttagtttacgagaagtgacgtaggtgacgggaggtcgtagggatttgagggcggagaggggaatttagaaagtgtcgggcggcggttttcgttttttttgcggggtttttgggtggtcgtggttgggagttgtcggggttcggtggtcgtgcgtttttgtttcgggtaagttttttttgtaaggttcgggcggcggtagggggtagtagcggttcgcgatgtttataggttcgttggtacggagttttcgggttggggcgtttagatttggagaagtcgggggttttggttatatttagagttgacgtttagtgcggtttttg

SEQ ID NO: 28630 - DNA, 866 bp, Artificial Sequence
  chemically treated genomic DNA (Homo sapiens) CpG-island No: 28630
caaaaaccgcactaaacgtcaactctaaatataaccaaaacccccgacttctccaaatctaaacgccccaacccgaaaactccgtaccaacgaacctataaacatcgcgaaccgctactaccccctaccgccgcccgaaccttacaaaaaaaacttacccgaaacaaaaacgcacgaccaccgaaccccgacaactcccaaccacgaccacccaaaaaccccgcaaaaaaaacgaaaaccgccgcccgacactttctaaattcccctctccgccctcaaatccctacgacctcccgtcacctacgtcacttctcgtaaactaacgaataaaacccgacgactcccccacccactcgactcgcaacccacgctcccgacgcccgaattaccataataaaaaacgcgaaaaaaacgccgaaaaaaacacgaaccccaaaaaaaacgcgaaaacgaccacgcgaatccttcctccacctaaacccaaacacttccgatctcgtaaacgtcgaaaaaaactctttacgaacttcgctacgaacttaaaacctccgacataaaaaaaaacgaaaactaaaaaacgcaaaaactctccctaaactactcgaaaaccaaaactataacgcgactccgatcctcgttttcccgccgtcgatactaactacctacaattaccataataacgcgaaccgcgaaacaaaacaaaatcccaaatcgcgtacaattactcctcgccgtcgccactctcctaccccaaactataaataacaaacgtcaaaaaaaatacaccaaaacgcgacccgaactcaaaaccgcccgaataaaaactacttcgaacattaaacacacttcccgaacgcctcgtaacc

SEQ ID NO: 28631 - DNA, 866 bp, Artificial Sequence
  chemically treated genomic DNA (Homo sapiens) CpG-island No: 28631
taagggtcgtattggacgttagttttgagtgtgattaaggttttcggtttttttagatttggacgttttagttcgggagtttcgtgttagcgagtttatgagtatcgcgggtcgttattgttttttgtcgtcgttcgggttttgtagggagagtttgttcggagtagaggcgtacggttatcgggtttcggtagtttttagttacgattatttagagatttcgtagaggaagcggaagtcgtcgttcggtattttttgaattttttttttcgtttttaggtttttgcggtttttcgttatttgcgttatttttcgtgggttggcggatagagttcggcggtttttttatttattcggttcgtagtttacgttttcgacgttcgagttgttatggtgaaggacgcgggagaaacgtcggaaggggtacggattttagggagagcgcggaggcggttacgcgggttttttttttatttgggtttaggtattttcggtttcgtaggcgtcggggaaagttttttgcggatttcgttgcgggtttaggattttcgatatgaagggaagcgggggttggaggacgtagagattttttttgggttgttcgaaggttaaggttgtaacgcggtttcggttttcgttttttcgtcgtcggtgttggttgtttgtagttgttatggtgacgcgggtcgcggggtagggtaaggttttaagtcgcgtgtagttgtttttcgtcgtcgttatttttttgttttaggttgtgggtagtagacgttaaaagagatatattagagcgcgattcggatttaggatcgttcgggtgggggttgtttcgggtattggatatatttttcgggcgtttcgtgatt

SEQ ID NO: 28632 - DNA, 866 bp, Artificial Sequence
  chemically treated genomic DNA (Homo sapiens) CpG-island No: 28632
aatcacgaaacgcccgaaaaatatatccaatacccgaaacaacccccacccgaacgatcctaaatccgaatcgcgctctaatatatctcttttaacgtctactacccacaacctaaaacaaaaaaataacgacgacgaaaaacaactacacgcgacttaaaaccttaccctaccccgcgacccgcgtcaccataacaactacaaacaaccaacaccgacgacgaaaaaacgaaaaccgaaaccgcgttacaaccttaaccttcgaacaacccaaaaaaaatctctacgtcctccaacccccgcttcccttcatatcgaaaatcctaaacccgcaacgaaatccgcaaaaaactttccccgacgcctacgaaaccgaaaatacctaaacccaaataaaaaaaaaacccgcgtaaccgcctccgcgctctccctaaaatccgtaccccttccgacgtttctcccgcgtccttcaccataacaactcgaacgtcgaaaacgtaaactacgaaccgaataaataaaaaaaccgccgaactctatccgccaacccacgaaaaataacgcaaataacgaaaaaccgcaaaaacctaaaaacgaaaaaaaaaattcaaaaaataccgaacgacgacttccgcttcctctacgaaatctctaaataatcgtaactaaaaactaccgaaacccgataaccgtacgcctctactccgaacaaactctccctacaaaacccgaacgacgacaaaaaacaataacgacccgcgatactcataaactcgctaacacgaaactcccgaactaaaacgtccaaatctaaaaaaaccgaaaaccttaatcacactcaaaactaacgtccaatacgaccctta

SEQ ID NO: 28633 - DNA, 673 bp, Artificial Sequence
  chemically treated genomic DNA (Homo sapiens) CpG-island No: 28633
gatacgagggcggtttcgcggcgtttcgtttgggacgtcggaaggttttcggtatttattaagatttgttttacgagtttttggtttcgttatcggggtttcgaagcgattatagttataaatttaacgttagggttatatcgttcgtgattttcgtttatttttcgattcggtttcgtttcgggagatcggcgcgtttttatcgtgggacgtttttttagggttaggcggttcgattacgtgttacgtaaacgtcgtcgttcgtatcggtcgcgattcggtaagggagcgggcggagagttgattcgcggcggaggggggttattcgtcggacggaacgttgcgcgtagttatcgttcgttgttagtcgcgttttaattcgttaggacgttgggttttgtcggcgggattttttttttattcggaaaggggaggcgtcggttatagtaggcgacgagtcgcgttcggttattatcgcggtggtcggcggaattttcgtttttttttcgttatttcgtcgagggggaagttgaggagggtttttttgtaagcgagtcgttattgtagcgttattataacggagagagagatagaggcggtaggtcgggggatttcgtattttaaggtatattttttggatcgttagagaaggtttttttatcgaggatgggtt

SEQ ID NO: 28634 - DNA, 673 bp, Artificial Sequence
  chemically treated genomic DNA (Homo sapiens) CpG-island No: 28634
aacccatcctcgataaaaaaaccttctctaacgatccaaaaaatataccttaaaatacgaaatcccccgacctaccgcctctatctctctctccgttataataacgctacaataacgactcgcttacaaaaaaaccctcctcaacttccccctcgacgaaataacgaaaaaaaaacgaaaattccgccgaccaccgcgataataaccgaacgcgactcgtcgcctactataaccgacgcctcccctttccgaataaaaaaaaaatcccgccgacaaaacccaacgtcctaacgaattaaaacgcgactaacaacgaacgataactacgcgcaacgttccgtccgacgaataacccccctccgccgcgaatcaactctccgcccgctcccttaccgaatcgcgaccgatacgaacgacgacgtttacgtaacacgtaatcgaaccgcctaaccctaaaaaaacgtcccacgataaaaacgcgccgatctcccgaaacgaaaccgaatcgaaaaataaacgaaaatcacgaacgatataaccctaacgttaaatttataactataatcgcttcgaaaccccgataacgaaaccaaaaactcgtaaaacaaatcttaataaataccgaaaaccttccgacgtcccaaacgaaacgccgcgaaaccgccctcgtatc

SEQ ID NO: 28635 - DNA, 673 bp, Artificial Sequence
  chemically treated genomic DNA (Homo sapiens) CpG-island No: 28635
gatttattttcggtgagaaagttttttttagcgatttaagaggtgtgttttggggtacgggatttttcggtttgtcgtttttgttttttttttcgttatggtagcgttgtagtagcgattcgtttgtagaggaattttttttagtttttttttcgacggggtgacggggggagagcgagggtttcgtcggttatcgcggtggtggtcgagcgcggttcgtcgtttattgtggtcggcgtttttttttttcgagtaaggggaggatttcgtcggtagggtttagcgttttagcgggttgggacgcggttgatagcgagcgatggttgcgcgtagcgtttcgttcggcgagtgattttttttcgtcgcgagttagtttttcgttcgtttttttgtcgagtcgcgatcggtgcggacgacggcgtttgcgtggtacgtggtcgggtcgtttggttttgggaaagcgttttacggtgggggcgcgtcggtttttcggagcgggatcgggtcggaggatggacgagaattacgagcgatgtggttttggcgttgagtttgtggttgtggtcgtttcggggtttcggtggcgggattaggggttcgtgaggtaggttttggtgggtgtcgagggtttttcggcgttttaggcggggcgtcgcgggatcgttttcgtgtt

SEQ ID NO: 28636 - DNA, 673 bp, Artificial Sequence
  chemically treated genomic DNA (Homo sapiens) CpG-island No: 28636
aacacgaaaacgatcccgcgacgccccgcctaaaacgccgaaaaaccctcgacacccaccaaaacctacctcacgaacccctaatcccgccaccgaaaccccgaaacgaccacaaccacaaactcaacgccaaaaccacatcgctcgtaattctcgtccatcctccgacccgatcccgctccgaaaaaccgacgcgcccccaccgtaaaacgctttcccaaaaccaaacgacccgaccacgtaccacgcaaacgccgtcgtccgcaccgatcgcgactcgacaaaaaaacgaacgaaaaactaactcgcgacgaaaaaaaatcactcgccgaacgaaacgctacgcgcaaccatcgctcgctatcaaccgcgtcccaacccgctaaaacgctaaaccctaccgacgaaatcctccccttactcgaaaaaaaaaaacgccgaccacaataaacgacgaaccgcgctcgaccaccaccgcgataaccgacgaaaccctcgctctccccccgtcaccccgtcgaaaaaaaaactaaaaaaaattcctctacaaacgaatcgctactacaacgctaccataacgaaaaaaaaaacaaaaacgacaaaccgaaaaatcccgtaccccaaaacacacctcttaaatcgctaaaaaaaactttctcaccgaaaataaatc

SEQ ID NO: 28637 - DNA, 862 bp, Artificial Sequence
  chemically treated genomic DNA (Homo sapiens) CpG-island No: 28637
gcgttcgcggttagggcggggatcggtaggtgcgagcgtgagcgtaattttataagttttcgttttttatttttttttttatttcgtttattcgttttttttttttagaggtaaagtattttcgagtaaatttatatacgatcggtcggaggtagaacggtagtttttcggcggtcggtcggcgtacgcgttattagtttaagtttatcgcgatcgtttatagggttcgtgcgtattcgttagaggggagtatcggacgtgcgttcgtcggattaggcgggcgttttttttcgcgtgggaggggcgcgtttcgttttatttaatcgtttcgaattttatatcgacgagtttttttaggatttacgcgcggatatcgaggcgtcgatcggaggagggggcgttgggggtgggaacgatatattatcgttcggtttcgggaatttgagggataattcggagcgttttaggagtatcgtaaaggtttagggggagttaacgttcgcgtaaatttttcgggagggtagtacgacgggtcggcgggatagtatttttatcgttgcggaggggggtcgttcgtaagtcgataattataggaggcgagagcgaggggtgtttgtcgcgttagaggatttttcgatttatttcgcgaggtagaaggcgggggcgggatagcgaggttaggtcgggtttcgtattttatgtttttttaacgtattattcgtaggcgaggaagaggagagataaggggttttcgcgggcgggacgagaagaagggttttattcgttacgaatgttcgtttttcgttcgtcgcggttcggatacggttagggagagtatgatattattatattttatttttat

SEQ ID NO: 28638 - DNA, 862 bp, Artificial Sequence
  chemically treated genomic DNA (Homo sapiens) CpG-island No: 28638
ataaaaataaaatataataatatcatactctccctaaccgtatccgaaccgcgacgaacgaaaaacgaacattcgtaacgaataaaacccttcttctcgtcccgcccgcgaaaaccccttatctctcctcttcctcgcctacgaataatacgttaaaaaaacataaaatacgaaacccgacctaacctcgctatcccgcccccgccttctacctcgcgaaataaatcgaaaaatcctctaacgcgacaaacacccctcgctctcgcctcctataattatcgacttacgaacgacccccctccgcaacgataaaaatactatcccgccgacccgtcgtactaccctcccgaaaaatttacgcgaacgttaactccccctaaacctttacgatactcctaaaacgctccgaattatccctcaaattcccgaaaccgaacgataatatatcgttcccacccccaacgccccctcctccgatcgacgcctcgatatccgcgcgtaaatcctaaaaaaactcgtcgatataaaattcgaaacgattaaataaaacgaaacgcgcccctcccacgcgaaaaaaaacgcccgcctaatccgacgaacgcacgtccgatactcccctctaacgaatacgcacgaaccctataaacgatcgcgataaacttaaactaataacgcgtacgccgaccgaccgccgaaaaactaccgttctacctccgaccgatcgtatataaatttactcgaaaatactttacctctaaaaaaaaaaaacgaataaacgaaataaaaaaaaaaataaaaaacgaaaacttataaaattacgctcacgctcgcacctaccgatccccgccctaaccgcgaacgc

SEQ ID NO: 28639 - DNA, 862 bp, Artificial Sequence
  chemically treated genomic DNA (Homo sapiens) CpG-island No: 28639
gtaagaatagaatatggtgatgttatgttttttttggtcgtgttcgagtcgcgacgggcgaggggcggatattcgtggcgaatgggattttttttttcgtttcgttcgcgggggttttttgttttttttttttttcgtttgcgggtggtgcgttgggaaggtatggggtgcggaattcggtttgatttcgttgtttcgttttcgttttttgtttcgcggggtgggtcggggggttttttgacgcggtaggtatttttcgttttcgttttttgtggttgtcgatttgcgggcggttttttttcgtagcggtgggggtgttgtttcgtcggttcgtcgtgttgttttttcggggagtttgcgcgagcgttggttttttttgggtttttgcggtgtttttggagcgtttcgggttgttttttaggttttcgaggtcgagcggtggtgtgtcgtttttatttttagcgttttttttttcggtcggcgtttcggtgttcgcgcgtgggttttgagggagttcgtcggtgtggggttcgaggcggttgagtgagacgagacgcgttttttttacgcggggaagggcgttcgtttggttcggcgagcgtacgttcggtgtttttttttggcgggtgcgtacgggttttgtgagcgatcgcggtgggtttgggttggtgacgcgtgcgtcggtcggtcgtcgaggggttatcgttttgttttcgatcggtcgtgtgtgggtttattcggaggtgttttgtttttgaagaaaagaggcgggtggacggggtgggggggggggtgggaggcgggggtttgtggagttgcgtttacgttcgtatttgtcggttttcgttttgatcgcgaacgt

SEQ ID NO: 28640 - DNA, 862 bp, Artificial Sequence
  chemically treated genomic DNA (Homo sapiens) CpG-island No: 28640
acgttcgcgatcaaaacgaaaaccgacaaatacgaacgtaaacgcaactccacaaacccccgcctcccacccccccccccaccccgtccacccgcctcttttcttcaaaaacaaaacacctccgaataaacccacacacgaccgatcgaaaacaaaacgataacccctcgacgaccgaccgacgcacgcgtcaccaacccaaacccaccgcgatcgctcacaaaacccgtacgcacccgccaaaaaaaaacaccgaacgtacgctcgccgaaccaaacgaacgcccttccccgcgtaaaaaaaacgcgtctcgtctcactcaaccgcctcgaaccccacaccgacgaactccctcaaaacccacgcgcgaacaccgaaacgccgaccgaaaaaaaaaacgctaaaaataaaaacgacacaccaccgctcgacctcgaaaacctaaaaaacaacccgaaacgctccaaaaacaccgcaaaaacccaaaaaaaaccaacgctcgcgcaaactccccgaaaaaacaacacgacgaaccgacgaaacaacacccccaccgctacgaaaaaaaaccgcccgcaaatcgacaaccacaaaaaacgaaaacgaaaaatacctaccgcgtcaaaaaaccccccgacccaccccgcgaaacaaaaaacgaaaacgaaacaacgaaatcaaaccgaattccgcaccccataccttcccaacgcaccacccgcaaacgaaaaaaaaaaaaaacaaaaaacccccgcgaacgaaacgaaaaaaaaaatcccattcgccacgaatatccgcccctcgcccgtcgcgactcgaacacgaccaaaaaaaacataacatcaccatattctattcttac

SEQ ID NO: 28641 - DNA, 705 bp, Artificial Sequence
  chemically treated genomic DNA (Homo sapiens) CpG-island No: 28641
ttgttcgtgtttcgttacgtcgggggttttttttacgtcgttttgtcggtttgttcgtttggttttggtcgtcgtttttattcgtcgtgtttgggttttttttggcgttttttttttttttcgttttgtcgttattttttttttcgttcgatggcgttattacgtaacggttcgattacgtatcgtttttttttaatattgcgtcgtttgtttggcgtatggcgatttgttgcggatattttttttttcgtttttgtgcggttttttatatcgattttggtgtttttttagaatatattgttttgtagtcgttttattttatttatttcgtatatcgattaatatcgatgtagcgttttgatagggtttgtttgttttcggttttcgttttacgtataattgtgtacgttttcgggtattgattgtgttcgtagtattttcgttttttacgtaaggtcgtatattacgggtttgagtatcgtttataaatatagtttagttcgtatatttaggttattaaagttcgatggttttatcgggtatgtggcgtttttattgttttttttttatttttatttttcggcgatttatttgataagtttttttgtcgtattttttttatcggtttttttttaggttattcgtttttttatttattattatttcgagcgttagtaataaaattatatttttcgtgttttaaaa

SEQ ID NO: 28642 - DNA, 705 bp, Artificial Sequence
  chemically treated genomic DNA (Homo sapiens) CpG-island No: 28642
ttttaaaacacgaaaaatataattttattactaacgctcgaaataataataaataaaaaaacgaataacctaaaaaaaaaccgataaaaaaaatacgacaaaaaaacttatcaaataaatcgccgaaaaataaaaataaaaaaaaaacaataaaaacgccacatacccgataaaaccatcgaactttaataacctaaatatacgaactaaactatatttataaacgatactcaaacccgtaatatacgaccttacgtaaaaaacgaaaatactacgaacacaatcaatacccgaaaacgtacacaattatacgtaaaacgaaaaccgaaaacaaacaaaccctatcaaaacgctacatcgatattaatcgatatacgaaataaataaaataaaacgactacaaaacaatatattctaaaaaaacaccaaaatcgatataaaaaaccgcacaaaaacgaaaaaaaaaatatccgcaacaaatcgccatacgccaaacaaacgacgcaatattaaaaaaaaacgatacgtaatcgaaccgttacgtaataacgccatcgaacgaaaaaaaaaataacgacaaaacgaaaaaaaaaaaaaacgccaaaaaaaacccaaacacgacgaataaaaacgacgaccaaaaccaaacgaacaaaccgacaaaacgacgtaaaaaaaacccccgacgtaacgaaacacgaacaa

SEQ ID NO: 28643 - DNA, 705 bp, Artificial Sequence
  chemically treated genomic DNA (Homo sapiens) CpG-island No: 28643
ttttgggatacgaggggtgtgattttgttgttgacgttcggggtggtggtgagtggggaaacgggtagtttagggggggatcggtgggaagagtgcggtaagggaatttgttaggtaggtcgtcggaaagtgaagatggaggagagataatgggggcgttatatgttcgataaggttatcgaattttagtaatttggatgtgcggattggattgtgtttataggcggtgtttaggttcgtggtgtgcggttttgcgtggaggacggggatattgcggatatagttagtgttcggagacgtgtatagttgtgcgtgaagcggaggtcgggagtagataagttttgttagggcgttgtatcggtgttggtcggtgtgcggggtgggtggaatgaggcggttgtagagtagtgtgttttgagagggtattagagtcggtgtgaaagatcgtatagaggcggaaggagaaatgttcgtagtaggtcgttatgcgttaggtaggcggcgtaatgttggggaagggcgatgcgtggtcgggtcgttgcgtgatgacgttatcgggcgaaagggggagtggcggtaaggcgaggaagggggggaacgttagggggggtttaggtacgacgggtgaaaacgacggttagggttaagcgggtaggtcggtagggcgacgtgagaggagttttcgacgtggcggggtacgggtag

SEQ ID NO: 28644 - DNA, 705 bp, Artificial Sequence
  chemically treated genomic DNA (Homo sapiens) CpG-island No: 28644
ctacccgtaccccgccacgtcgaaaactcctctcacgtcgccctaccgacctacccgcttaaccctaaccgtcgttttcacccgtcgtacctaaaccccccctaacgttcccccccttcctcgccttaccgccactccccctttcgcccgataacgtcatcacgcaacgacccgaccacgcatcgcccttccccaacattacgccgcctacctaacgcataacgacctactacgaacatttctccttccgcctctatacgatctttcacaccgactctaataccctctcaaaacacactactctacaaccgcctcattccacccaccccgcacaccgaccaacaccgatacaacgccctaacaaaacttatctactcccgacctccgcttcacgcacaactatacacgtctccgaacactaactatatccgcaatatccccgtcctccacgcaaaaccgcacaccacgaacctaaacaccgcctataaacacaatccaatccgcacatccaaattactaaaattcgataaccttatcgaacatataacgcccccattatctctcctccatcttcactttccgacgacctacctaacaaattcccttaccgcactcttcccaccgatccccccctaaactacccgtttccccactcaccaccaccccgaacgtcaacaacaaaatcacacccctcgtatcccaaaa

SEQ ID NO: 28645 - DNA, 595 bp, Artificial Sequence
  chemically treated genomic DNA (Homo sapiens) CpG-island No: 28645
ttcggttgttaacgaggtatcgtttattgatttcgcgtttcgttttttatagcgtggggttcggcgttgcgttaggttcgggtgcggggcggagttaggttgggattggttgggggtcgtttcgttcggcgtttgggttttcgcgtcggttttcggggaggagttatgataattttttttttattaaggcgttcgggtttttcggttatcgttaggatatattgttcgggcgcggtttttttcgttcgcggagcggttttgatattcgcggcggtagtatttacgttcgtagagtcgtcgatgcgtgtttagtgattcggatagtaaggttcgcgcgcggcgggggcggcggtagacgtttggttatcgtgatttcgattttggatttatcgtttgggggttggggggattttggatttaattggcgattgttttgggggacgtcggacgttatgttgtggaaaataatcgataatgttaagtacgaagaggattgcgaggtgagttggggtttcggggtgtagtttcgtttcgtcgaggatagttcgggaggtaggggttattggatcgaggtcggggacgagggtataggagt

SEQ ID NO: 28646 - DNA, 595 bp, Artificial Sequence
  chemically treated genomic DNA (Homo sapiens) CpG-island No: 28646
actcctataccctcgtccccgacctcgatccaataacccctacctcccgaactatcctcgacgaaacgaaactacaccccgaaaccccaactcacctcgcaatcctcttcgtacttaacattatcgattattttccacaacataacgtccgacgtcccccaaaacaatcgccaattaaatccaaaatccccccaacccccaaacgataaatccaaaatcgaaatcacgataaccaaacgtctaccgccgcccccgccgcgcgcgaaccttactatccgaatcactaaacacgcatcgacgactctacgaacgtaaatactaccgccgcgaatatcaaaaccgctccgcgaacgaaaaaaaccgcgcccgaacaatatatcctaacgataaccgaaaaacccgaacgccttaataaaaaaaaaattatcataactcctccccgaaaaccgacgcgaaaacccaaacgccgaacgaaacgacccccaaccaatcccaacctaactccgccccgcacccgaacctaacgcaacgccgaaccccacgctataaaaaacgaaacgcgaaatcaataaacgatacctcgttaacaaccgaa

SEQ ID NO: 28647 - DNA, 595 bp, Artificial Sequence
  chemically treated genomic DNA (Homo sapiens) CpG-island No: 28647
gtttttatgttttcgttttcgatttcggtttagtggtttttgtttttcggattgttttcggcggggcggggttgtatttcggagttttagtttatttcgtagtttttttcgtatttgatattatcggttattttttataatatggcgttcggcgttttttaaaatagtcgttagttaaatttaggatttttttagtttttaagcggtaaatttaaaatcggggttacggtgattaggcgtttgtcgtcgttttcgtcgcgcgcgggttttgttgttcgggttattggatacgtatcggcggttttgcgagcgtagatgttgtcgtcgcgagtgttaagatcgtttcgcggacggggaaagtcgcgttcgaatagtgtgttttggcgatagtcgggggattcgagcgttttaatgagaaggaaattattataattttttttcgggggtcggcgcggaggtttaggcgtcgggcggggcggtttttagttagttttagtttagtttcgtttcgtattcgggtttggcgtagcgtcgagttttacgttgtgagggacgaagcgcggagttagtgggcggtgtttcgttgatagtcgaa

SEQ ID NO: 28648 - DNA, 595 bp, Artificial Sequence
  chemically treated genomic DNA (Homo sapiens) CpG-island No: 28648
ttcgactatcaacgaaacaccgcccactaactccgcgcttcgtccctcacaacgtaaaactcgacgctacgccaaacccgaatacgaaacgaaactaaactaaaactaactaaaaaccgccccgcccgacgcctaaacctccgcgccgacccccgaaaaaaaattataataatttccttctcattaaaacgctcgaatcccccgactatcgccaaaacacactattcgaacgcgactttccccgtccgcgaaacgatcttaacactcgcgacgacaacatctacgctcgcaaaaccgccgatacgtatccaataacccgaacaacaaaacccgcgcgcgacgaaaacgacgacaaacgcctaatcaccgtaaccccgattttaaatttaccgcttaaaaactaaaaaaatcctaaatttaactaacgactattttaaaaaacgccgaacgccatattataaaaaataaccgataatatcaaatacgaaaaaaactacgaaataaactaaaactccgaaatacaaccccgccccgccgaaaacaatccgaaaaacaaaaaccactaaaccgaaatcgaaaacgaaaacataaaaac

SEQ ID NO: 28649 - DNA, 861 bp, Artificial Sequence
  chemically treated genomic DNA (Homo sapiens) CpG-island No: 28649
gggcggcgtagggtggcgggttttgtttttcgagcgtcgttcgttcggaggtttttgtttcgagggcgtggaagggagggtttcgggggcgggggaggtgcgtatttttcgcgtcgcgtattttattcgcgtttgtcgcgttgttatttttagtagtttttgcgttatgggcgggttttacgagatagttttgtatcgggcgttcggttttttcgtttcgggttttggttttttcgtttcgggtttcggttacggatttttttggtttaagatttagggttcggatttggcgtttttaagcgtttcgggtttgggagtagcgtttagattttcgtcgtcgggttttgagaattcgtttttttaggttttttattagattttttttttttttcgtattttttgtttataacgaaattttcggggcgtattgttttcgggtatttttcgattttgggtaagtttcgtcgggcggggtgcggttggtttttcggggttttttgcgtagttcggcgatgtcggttagttcgtagtagcggggtttcgtattaacggggttttttgtttttttttttttttttaggatcgttacgacgggagtagtaatgggaattcgcgggttttttatttttttttcgtcgggtagtatttttatagtttcgcgttattttttttttatattggagtcgtcgaatattagtcgttattttattttttttttttttattagtagttggtttatttttagtcggtcgatttttattcgtatttgggggaagcgtacgtcgtcgttattaattttttgtattagtcggcgtttataggtagttagtagtaggtttggttcggtcgttagagttagga

SEQ ID NO: 28650 - DNA, 861 bp, Artificial Sequence
  chemically treated genomic DNA (Homo sapiens) CpG-island No: 28650
tcctaactctaacgaccgaaccaaacctactactaactacctataaacgccgactaatacaaaaaattaataacgacgacgtacgcttcccccaaatacgaataaaaatcgaccgactaaaaataaaccaactactaataaaaaaaaaaaaaataaaataacgactaatattcgacgactccaatataaaaaaaaaataacgcgaaactataaaaatactacccgacgaaaaaaaaataaaaaacccgcgaattcccattactactcccgtcgtaacgatcctaaaaaaaaaaaaaaaaacaaaaaaccccgttaatacgaaaccccgctactacgaactaaccgacatcgccgaactacgcaaaaaaccccgaaaaaccaaccgcaccccgcccgacgaaacttacccaaaatcgaaaaatacccgaaaacaatacgccccgaaaatttcgttataaacaaaaaatacgaaaaaaaaaaaaaatctaataaaaaacctaaaaaaacgaattctcaaaacccgacgacgaaaatctaaacgctactcccaaacccgaaacgcttaaaaacgccaaatccgaaccctaaatcttaaaccaaaaaaatccgtaaccgaaacccgaaacgaaaaaaccaaaacccgaaacgaaaaaaccgaacgcccgatacaaaactatctcgtaaaacccgcccataacgcaaaaactactaaaaataacaacgcgacaaacgcgaataaaatacgcgacgcgaaaaatacgcacctcccccgcccccgaaaccctcccttccacgccctcgaaacaaaaacctccgaacgaacgacgctcgaaaaacaaaacccgccaccctacgccgccc

SEQ ID NO: 28651 - DNA, 861 bp, Artificial Sequence
  chemically treated genomic DNA (Homo sapiens) CpG-island No: 28651
ttttggttttggcggtcgggttaggtttgttgttggttgtttgtgggcgtcggttggtgtagggggttgatggcggcggcgtacgttttttttagatgcgagtaggggtcggtcgattgggagtaggttagttgttggtagggagggggaaagtagggtggcggttgatattcggcgattttagtgtgggagaggggtggcgcggggttgtagaggtgttgttcggcggaggagaggtgggggattcgcggatttttattgttgttttcgtcgtggcgattttggagggaaaaaaaaaaataggagatttcgttagtgcgaaatttcgttattgcgaattggtcggtatcgtcgggttacgtagagggtttcgggggattaatcgtatttcgttcggcggggtttgtttagggtcggaaggtattcgggggtaatgcgtttcgaggatttcgttgtaagtaaagagtgcggggagggaggagagtttggtgaaagatttgggggaacgagtttttaaagttcggcggcgaaggtttaggcgttgtttttaagttcgaggcgtttggaggcgttaagttcgaattttgggttttgggttagaaaagttcgtggtcggagttcggggcgaaggagttagagttcggggcgaaggagtcggacgttcggtgtagagttatttcgtggagttcgtttatgacgtagggattgttggaggtggtagcgcggtaggcgcggatagagtgcgcggcgcgggaaatgcgtatttttttcgttttcgggatttttttttttacgttttcgggataaagattttcgagcgggcggcgttcggaaagtagggttcgttattttgcgtcgttt

SEQ ID NO: 28652 - DNA, 861 bp, Artificial Sequence
  chemically treated genomic DNA (Homo sapiens) CpG-island No: 28652
aaacgacgcaaaataacgaaccctactttccgaacgccgcccgctcgaaaatctttatcccgaaaacgtaaaaaaaaaaatcccgaaaacgaaaaaaatacgcatttcccgcgccgcgcactctatccgcgcctaccgcgctaccacctccaacaatccctacgtcataaacgaactccacgaaataactctacaccgaacgtccgactccttcgccccgaactctaactccttcgccccgaactccgaccacgaacttttctaacccaaaacccaaaattcgaacttaacgcctccaaacgcctcgaacttaaaaacaacgcctaaaccttcgccgccgaactttaaaaactcgttcccccaaatctttcaccaaactctcctccctccccgcactctttacttacaacgaaatcctcgaaacgcattacccccgaataccttccgaccctaaacaaaccccgccgaacgaaatacgattaatcccccgaaaccctctacgtaacccgacgataccgaccaattcgcaataacgaaatttcgcactaacgaaatctcctatttttttttttccctccaaaatcgccacgacgaaaacaacaataaaaatccgcgaatcccccacctctcctccgccgaacaacacctctacaaccccgcgccacccctctcccacactaaaatcgccgaatatcaaccgccaccctactttccccctccctaccaacaactaacctactcccaatcgaccgacccctactcgcatctaaaaaaaacgtacgccgccgccatcaaccccctacaccaaccgacgcccacaaacaaccaacaacaaacctaacccgaccgccaaaaccaaaa

SEQ ID NO: 28653 - DNA, 1601 bp, Artificial Sequence
  chemically treated genomic DNA (Homo sapiens) CpG-island No: 28653
ggcgttcgtagtatttttcgacggtagttcgtattttcgcgagattggcggcgataattttttttattattttttatcgtgtttattcgatttttttttttttttttttttattagtttcgttagtagtttattaatttcgtcgatttttttaaaaaattagttttcggatttattaatttttcgaagggtttttcgcgtttttattttttttagttacgtttcgattttagttatttttcgtttttcgttagttttcgaacgcgttcgttttcgtttttttagtttttttaatcgcgacgttagggcgttaatttcggatttttttcgttttttttcgcgggtatttagcgttataaatttttttttatatatcgtttcgaacgcgttttagagatttcggtacgtcgcgttttcgtttttttcggttttaaagaatatttttattttcgtttttattttattacgtatttagtagttatttaggagtaggtcgtttagtttttatgtagtcgagtggtttcgagcgagttttttaatttcgagtcgtagttcgatcgtatcgcggttcgagagatagttcgttataattttcgtttttttatattcgtcgaggagcgttttatttttaattatgcggttattttcggaataggcgcggcgcggcgtcgaaaaaaacgtatatttcgtcgattcggggcggagagtttcgtagacgttcgttaggttcgttcggcgtagagtcgagtttaattttcgggtattttcgttaatttttcgtttcgtcgattcgtttaacgtcgatagcggggcgttaaagttttttattattatcgcgcgggagtttaagttttttcgtaggttatttatgattcgttttacgaattcgggcgttttcgcgtcggtcgtatatatatttaggatagttagtttttttcgtcgaatcgatttttttattattacgtaacggtttttttcgtttttttcgattttcgtcggtttaaagttcgttttattagagattaggatcgtaattttcgttttttttcgttttttattcgttcggtagatttttttttatttttttatttcgagtttacgcgcgttttcgtacgcgagacgggtttttcgaatatagtatatcgacgggtttcgattttttatttaatttattaattcgcgttttttaattagagtatttagtttatttatatttaaggttaatatcgttacgcgcgaattcgatttcgttattacgacgttagtcggttatttcgtttattagtcgacgtagtttttttttagtattgacggtttttataatcggtacgttttcgtagcggtcggtattagttttttttttttattcgatttttatttttttttttattttaagttcgtcgaattcgataatcgcgtttcggagtcgttttttcggaggagtattttcgcggtatttttcgtatttttcgaattcgaattcggttcgtttcgttaggtcggggaagttttttcggataatatttcgaagagcgttttttaattcggttttattttttttttattttttagtataattattttatttaaattacgtttttt

SEQ ID NO: 28654 - DNA, 1601 bp, Artificial Sequence
  chemically treated genomic DNA (Homo sapiens) CpG-island No: 28654
aaaaaacgtaatttaaataaaataattatactaaaaaataaaaaaaaaataaaaccgaattaaaaaacgctcttcgaaatattatccgaaaaaacttccccgacctaacgaaacgaaccgaattcgaattcgaaaaatacgaaaaataccgcgaaaatactcctccgaaaaaacgactccgaaacgcgattatcgaattcgacgaacttaaaataaaaaaaaaaataaaaatcgaataaaaaaaaaaaactaataccgaccgctacgaaaacgtaccgattataaaaaccgtcaatactaaaaaaaaactacgtcgactaataaacgaaataaccgactaacgtcgtaataacgaaatcgaattcgcgcgtaacgatattaaccttaaatataaataaactaaatactctaattaaaaaacgcgaattaataaattaaataaaaaatcgaaacccgtcgatatactatattcgaaaaacccgtctcgcgtacgaaaacgcgcgtaaactcgaaataaaaaaataaaaaaaaatctaccgaacgaataaaaaacgaaaaaaaacgaaaattacgatcctaatctctaataaaacgaactttaaaccgacgaaaatcgaaaaaaacgaaaaaaaccgttacgtaataataaaaaaatcgattcgacgaaaaaaactaactatcctaaatatatatacgaccgacgcgaaaacgcccgaattcgtaaaacgaatcataaataacctacgaaaaaacttaaactcccgcgcgataataataaaaaactttaacgccccgctatcgacgttaaacgaatcgacgaaacgaaaaattaacgaaaatacccgaaaattaaactcgactctacgccgaacgaacctaacgaacgtctacgaaactctccgccccgaatcgacgaaatatacgtttttttcgacgccgcgccgcgcctattccgaaaataaccgcataattaaaaataaaacgctcctcgacgaatataaaaaaacgaaaattataacgaactatctctcgaaccgcgatacgatcgaactacgactcgaaattaaaaaactcgctcgaaaccactcgactacataaaaactaaacgacctactcctaaataactactaaatacgtaataaaataaaaacgaaaataaaaatattctttaaaaccgaaaaaaacgaaaacgcgacgtaccgaaatctctaaaacgcgttcgaaacgatatataaaaaaaaatttataacgctaaatacccgcgaaaaaaaacgaaaaaaatccgaaattaacgccctaacgtcgcgattaaaaaaactaaaaaaacgaaaacgaacgcgttcgaaaactaacgaaaaacgaaaaataactaaaatcgaaacgtaactaaaaaaaataaaaacgcgaaaaacccttcgaaaaattaataaatccgaaaactaattttttaaaaaaatcgacgaaattaataaactactaacgaaactaataaaaaaaaaaaaaaaaaaaaatcgaataaacacgataaaaaataataaaaaaaattatcgccgccaatctcgcgaaaatacgaactaccgtcgaaaaatactacgaacgcc

SEQ ID NO: 28655 - DNA, 1601 bp, Artificial Sequence
  chemically treated genomic DNA (Homo sapiens) CpG-island No: 28655
agggagcgtggtttgggtgaagtaattatgttgagggatagaaaagaggtaaggtcggattaaggggcgtttttcgaaatgttgttcgaaggggttttttcggtttgacgggacgaatcgggttcgggttcgaagggtgcgagaggtatcgcgggagtgttttttcgaggagacggtttcggagcgcggttatcgagttcggcgggtttagggtaggaaggggggtaggggtcgggtagggaaagggggttaatgtcgatcgttacgggggcgtatcggttatgggagtcgttagtattgaaggagggttacgtcggttggtagacggggtggtcgattggcgtcgtggtagcgaagtcgggttcgcgcgtggcggtgttggttttgggtatgggtaaattgggtattttggttggggagcgcgagttaatgggttaagtgggagatcggagttcgtcgatatattatgttcgaagagttcgtttcgcgtacgagagcgcgcgtgaattcggggtgggaaagtaagaaggagtttgtcggacgggtaaggggcgggggggaacgaaaattacggttttgatttttagtggggcgagttttgggtcggcgggagtcggggagagcgggaggaatcgttgcgtggtaatgggaaagtcggttcggcggaggagattggttgttttgggtgtgtgtacgatcggcgcgaagacgttcgagttcgtgggacggattatagatagtttgcgggagagtttgagttttcgcgcggtggtggtaaagagttttggcgtttcgttatcggcgttgagcgagtcggcggaacgagggattggcggaagtgttcgaaggttaggttcgattttacgtcggacgagtttggcgagcgtttgcgaggtttttcgtttcgggtcggcgaggtgtgcgtttttttcgacgtcgcgtcgcgtttgtttcggggatagtcgtatgattaaggatgggacgtttttcgacgggtatggggaggcgagggttgtggcgggttatttttcgagtcgcgatacggtcgggttgcggttcgaagttggagggttcgttcggggttattcggttgtataagggttaggcggtttatttttaggtagttgttaaatgcgtggtagggtaggaacgagggtgggagtattttttagggtcgggagaggcgggagcgcggcgtgtcgaggtttttaaagcgcgttcgggacgatatatgaggaagggtttgtgacgttgggtattcgcggagagggacgaagggagttcggggttagcgttttggcgtcgcggttggggaggttgaggggacggagacgggcgcgttcggggattgacgaggaacggggggtggttggggtcgagacgtggttaggaagggtgagagcgcggggggtttttcggggggttggtaggttcgaagattaattttttagggaagtcggcggggttagtgagttattgacggagttggtgggaggaggggagagaggaggtcgggtgagtacggtggggggtagtgggaaaagttgtcgtcgttagtttcgcgagggtgcgggttgtcgtcgagaggtgttgcgggcgtt

SEQ ID NO: 28656 - DNA, 1601 bp, Artificial Sequence
  chemically treated genomic DNA (Homo sapiens) CpG-island No: 28656
aacgcccgcaacacctctcgacgacaacccgcaccctcgcgaaactaacgacgacaacttttcccactaccccccaccgtactcacccgacctcctctctcccctcctcccaccaactccgtcaataactcactaaccccgccgacttccctaaaaaattaatcttcgaacctaccaaccccccgaaaaaccccccgcgctctcacccttcctaaccacgtctcgaccccaaccaccccccgttcctcgtcaatccccgaacgcgcccgtctccgtcccctcaacctccccaaccgcgacgccaaaacgctaaccccgaactcccttcgtccctctccgcgaatacccaacgtcacaaacccttcctcatatatcgtcccgaacgcgctttaaaaacctcgacacgccgcgctcccgcctctcccgaccctaaaaaatactcccaccctcgttcctaccctaccacgcatttaacaactacctaaaaataaaccgcctaacccttatacaaccgaataaccccgaacgaaccctccaacttcgaaccgcaacccgaccgtatcgcgactcgaaaaataacccgccacaaccctcgcctccccatacccgtcgaaaaacgtcccatccttaatcatacgactatccccgaaacaaacgcgacgcgacgtcgaaaaaaacgcacacctcgccgacccgaaacgaaaaacctcgcaaacgctcgccaaactcgtccgacgtaaaatcgaacctaaccttcgaacacttccgccaatccctcgttccgccgactcgctcaacgccgataacgaaacgccaaaactctttaccaccaccgcgcgaaaactcaaactctcccgcaaactatctataatccgtcccacgaactcgaacgtcttcgcgccgatcgtacacacacccaaaacaaccaatctcctccgccgaaccgactttcccattaccacgcaacgattcctcccgctctccccgactcccgccgacccaaaactcgccccactaaaaatcaaaaccgtaattttcgttcccccccgccccttacccgtccgacaaactccttcttactttcccaccccgaattcacgcgcgctctcgtacgcgaaacgaactcttcgaacataatatatcgacgaactccgatctcccacttaacccattaactcgcgctccccaaccaaaatacccaatttacccatacccaaaaccaacaccgccacgcgcgaacccgacttcgctaccacgacgccaatcgaccaccccgtctaccaaccgacgtaaccctccttcaatactaacgactcccataaccgatacgcccccgtaacgatcgacattaaccccctttccctacccgacccctaccccccttcctaccctaaacccgccgaactcgataaccgcgctccgaaaccgtctcctcgaaaaaacactcccgcgatacctctcgcacccttcgaacccgaacccgattcgtcccgtcaaaccgaaaaaaccccttcgaacaacatttcgaaaaacgccccttaatccgaccttacctcttttctatccctcaacataattacttcacccaaaccacgctccct

SEQ ID NO: 28657 - DNA, 619 bp, Artificial Sequence
  chemically treated genomic DNA (Homo sapiens) CpG-island No: 28657
cggttattttggatagcgtatcgtcgttcgttcgggtcgtcgcgttatagtcgttgcggattatggtgagtggggtcgcgcgtcgttatcgatatcgtcgcgtttttttttttttttggatttacgtatcgggcgggaaagggtcgagcgggcgtcggcgcgggcgttgcgggttcgtcgttggaattcgttattttcggaggggtcgggttcgcgcgggtttggggagcgggagttgagcgtttgggtcgggggcgcgcgggtcggttcgaggttcgcgggtttcgggaattttgtttcggtttttttttttcggtttcgtttcggtatttcgaggcgttcgttcgcgtttagttttttgttgtatgtacggggtcgggcgttcgggatgttcgaggaagtcgtttttttttcgcggcggttattttcgcgcgtagtttatttttcgatttttcggattttcgaatttgttttcgttatcgttcgtcgacgtttggagcggagaacggcgtttttcgcgcgcggtatatattttgtttcgggagttttggggttcgggttttaacggttaagtttttgttttttttttttttttatcgcgtttgtatttcgggggtgt

SEQ ID NO: 28658 - DNA, 619 bp, Artificial Sequence
  chemically treated genomic DNA (Homo sapiens) CpG-island No: 28658
acacccccgaaatacaaacgcgataaaaaaaaaaaaaaaacaaaaacttaaccgttaaaacccgaaccccaaaactcccgaaacaaaatatataccgcgcgcgaaaaacgccgttctccgctccaaacgtcgacgaacgataacgaaaacaaattcgaaaatccgaaaaatcgaaaaataaactacgcgcgaaaataaccgccgcgaaaaaaaaacgacttcctcgaacatcccgaacgcccgaccccgtacatacaacaaaaaactaaacgcgaacgaacgcctcgaaataccgaaacgaaaccgaaaaaaaaaaaccgaaacaaaattcccgaaacccgcgaacctcgaaccgacccgcgcgcccccgacccaaacgctcaactcccgctccccaaacccgcgcgaacccgacccctccgaaaataacgaattccaacgacgaacccgcaacgcccgcgccgacgcccgctcgaccctttcccgcccgatacgtaaatccaaaaaaaaaaaaaaacgcgacgatatcgataacgacgcgcgaccccactcaccataatccgcaacgactataacgcgacgacccgaacgaacgacgatacgctatccaaaataaccg

SEQ ID NO: 28659 - DNA, 619 bp, Artificial Sequence
  chemically treated genomic DNA (Homo sapiens) CpG-island No: 28659
atattttcggggtgtaggcgcggtgaagggaggagaggggtaagagtttgatcgttagggttcgaattttagaattttcgaggtagggtgtgtgtcgcgcgcgggaaacgtcgtttttcgttttaggcgtcggcgggcggtggcgagagtaggttcgggggttcggagggtcggagggtgggttgcgcgcgggaatggtcgtcgcgaaggaggggcggttttttcgggtatttcgggcgttcggtttcgtgtatgtaataggggattgggcgcgagcgggcgtttcgaggtgtcggggcgggatcggggagaggggatcgagataaagttttcgagattcgcgggtttcgggtcgattcgcgcgttttcggtttaaacgtttagttttcgttttttaggttcgcgcggattcggttttttcgagggtagcgggttttagcggcgaattcgtagcgttcgcgtcggcgttcgttcggttttttttcgttcggtgcgtgggtttaggagagaaagaaagcgcggcggtgtcggtggcggcgcgcggttttatttattatgattcgtagcggttgtggcgcggcgattcgggcgggcggcgatgcgttgtttagggtagtcg

SEQ ID NO: 28660 - DNA, 619 bp, Artificial Sequence
  chemically treated genomic DNA (Homo sapiens) CpG-island No: 28660
cgactaccctaaacaacgcatcgccgcccgcccgaatcgccgcgccacaaccgctacgaatcataataaataaaaccgcgcgccgccaccgacaccgccgcgctttctttctctcctaaacccacgcaccgaacgaaaaaaaaccgaacgaacgccgacgcgaacgctacgaattcgccgctaaaacccgctaccctcgaaaaaaccgaatccgcgcgaacctaaaaaacgaaaactaaacgtttaaaccgaaaacgcgcgaatcgacccgaaacccgcgaatctcgaaaactttatctcgatcccctctccccgatcccgccccgacacctcgaaacgcccgctcgcgcccaatcccctattacatacacgaaaccgaacgcccgaaatacccgaaaaaaccgcccctccttcgcgacgaccattcccgcgcgcaacccaccctccgaccctccgaacccccgaacctactctcgccaccgcccgccgacgcctaaaacgaaaaacgacgtttcccgcgcgcgacacacaccctacctcgaaaattctaaaattcgaaccctaacgatcaaactcttacccctctcctcccttcaccgcgcctacaccccgaaaatat

SEQ ID NO: 28661 - DNA, 917 bp, Artificial Sequence
  chemically treated genomic DNA (Homo sapiens) CpG-island No: 28661
atcgtttttatttatcgtatattattagtagtaggacgattagtagcgtggttacgaatataagtagagttagttcgacgttgtgttatattttgggggtagaagggtagtcggttcggggcggttggcgcggacggcggtgagcgcgggcggcggcgcgttttgcgttttagcggcgggcgttaggcgcggttgggcgtcggggcggtatgggcggttggcgttttttcggtagcgtttttagggggtggggcggcgtaaaggcgggtattgtgggatcgttcgttcgttcgatttttttttcgtcggggtggttagagcgcgggaggtaggcgggttttagggcgtttttagttttttatcgtttcggagagtcgaggtcgcggtatttagagattttagcggtcggatgcgtttttatggcggacgtcgcgcgtttgtagggaggatagagggtaagtacgggtatatacggcggttataaggttttcgtcgttgtttattcgtgtttttgagattttagggatgttagatgttagcgtcgttcggtcgcggttgtagcggttttttcgttttaggttttttatcgttggggtagtttattattaagttcgtttttttcgcggcgcggggtcggttgggagatggagtgtagagtttggtggagtcgggacggcgttgtttcgtagggattataatttttagaatgtatcgttattcgggtttcgttgtttttattttcgggcggttttgtttttggttttgtttaagtcgttttagtcggacgatcgtgggttggttttttttaaagtcgcggatttggttgttcgttttgttgaggcgttagtgagattttaattattatttcgtatataaagtcgttttgtttttagtcgtaatcgatgaagtacggcgag

SEQ ID NO: 28662 - DNA, 917 bp, Artificial Sequence
  chemically treated genomic DNA (Homo sapiens) CpG-island No: 28662
ctcgccgtacttcatcgattacgactaaaaacaaaacgactttatatacgaaataataattaaaatctcactaacgcctcaacaaaacgaacaaccaaatccgcgactttaaaaaaaaccaacccacgatcgtccgactaaaacgacttaaacaaaaccaaaaacaaaaccgcccgaaaataaaaacaacgaaacccgaataacgatacattctaaaaattataatccctacgaaacaacgccgtcccgactccaccaaactctacactccatctcccaaccgaccccgcgccgcgaaaaaaacgaacttaataataaactaccccaacgataaaaaacctaaaacgaaaaaaccgctacaaccgcgaccgaacgacgctaacatctaacatccctaaaatctcaaaaacacgaataaacaacgacgaaaaccttataaccgccgtatatacccgtacttaccctctatcctccctacaaacgcgcgacgtccgccataaaaacgcatccgaccgctaaaatctctaaataccgcgacctcgactctccgaaacgataaaaaactaaaaacgccctaaaacccgcctacctcccgcgctctaaccaccccgacgaaaaaaaaatcgaacgaacgaacgatcccacaatacccgcctttacgccgccccaccccctaaaaacgctaccgaaaaaacgccaaccgcccataccgccccgacgcccaaccgcgcctaacgcccgccgctaaaacgcaaaacgcgccgccgcccgcgctcaccgccgtccgcgccaaccgccccgaaccgactacccttctacccccaaaatataacacaacgtcgaactaactctacttatattcgtaaccacgctactaatcgtcctactactaataatatacgataaataaaaacgat

SEQ ID NO: 28663 - DNA, 917 bp, Artificial Sequence
  chemically treated genomic DNA (Homo sapiens) CpG-island No: 28663
ttcgtcgtattttatcgattacggttagaaataaaacgattttgtatacggagtaatggttgaaattttattggcgttttagtaggacgggtagttagattcgcggttttggagaaggttagtttacggtcgttcgattgaggcgatttgagtaagattaaaggtagagtcgttcgagaatgaaagtagcgaagttcgagtggcggtgtattttgggagttgtagtttttgcgagataacgtcgtttcgattttattaggttttgtattttattttttagtcgatttcgcgtcgcggaggaggcgagtttggtgatgagttgttttagcggtagggggtttggggcggagaagtcgttatagtcgcggtcgggcgacgttgatatttggtatttttggggttttagagatacgggtggatagcgacgagggttttgtggtcgtcgtgtgtattcgtgtttattttttgttttttttataggcgcgcggcgttcgttatggaagcgtattcgatcgttggggtttttgggtgtcgcggtttcggtttttcggggcgatgagggattagaggcgttttgaggttcgtttgtttttcgcgttttggttatttcggcgggaaaaggatcgggcgggcgggcggttttatagtgttcgtttttgcgtcgttttattttttgggggcgttgtcgagggggcgttagtcgtttatgtcgtttcggcgtttagtcgcgtttggcgttcgtcgttgaagcgtaggacgcgtcgtcgttcgcgtttatcgtcgttcgcgttagtcgtttcgagtcgattgtttttttgtttttaagatgtggtatagcgtcgggttgattttgtttgtgttcgtggttacgttgttgatcgttttgttgttgatggtgtgcggtgagtgggggcggt

SEQ ID NO: 28664 - DNA, 917 bp, Artificial Sequence
  chemically treated genomic DNA (Homo sapiens) CpG-island No: 28664
accgcccccactcaccgcacaccatcaacaacaaaacgatcaacaacgtaaccacgaacacaaacaaaatcaacccgacgctataccacatcttaaaaacaaaaaaacaatcgactcgaaacgactaacgcgaacgacgataaacgcgaacgacgacgcgtcctacgcttcaacgacgaacgccaaacgcgactaaacgccgaaacgacataaacgactaacgccccctcgacaacgcccccaaaaaataaaacgacgcaaaaacgaacactataaaaccgcccgcccgcccgatccttttcccgccgaaataaccaaaacgcgaaaaacaaacgaacctcaaaacgcctctaatccctcatcgccccgaaaaaccgaaaccgcgacacccaaaaaccccaacgatcgaatacgcttccataacgaacgccgcgcgcctataaaaaaaacaaaaaataaacacgaatacacacgacgaccacaaaaccctcgtcgctatccacccgtatctctaaaaccccaaaaataccaaatatcaacgtcgcccgaccgcgactataacgacttctccgccccaaaccccctaccgctaaaacaactcatcaccaaactcgcctcctccgcgacgcgaaatcgactaaaaaataaaatacaaaacctaataaaatcgaaacgacgttatctcgcaaaaactacaactcccaaaatacaccgccactcgaacttcgctactttcattctcgaacgactctacctttaatcttactcaaatcgcctcaatcgaacgaccgtaaactaaccttctccaaaaccgcgaatctaactacccgtcctactaaaacgccaataaaatttcaaccattactccgtatacaaaatcgttttatttctaaccgtaatcgataaaatacgacgaa

SEQ ID NO: 28665 - DNA, 526 bp, Artificial Sequence
  chemically treated genomic DNA (Homo sapiens) CpG-island No: 28665
attttacgcggtaaaatcgagggtattgaagcggttttggtttagttgttgggtattcggggaattcgttacgattgtggttgtaatatggaacgttattataattgttttagtatttttaagggtttgttcgaggattcgaaggtcgtcggttagttgggagtttttcgtaatcgttttgtggttttcgtatcgtatattggtattagtttggagggcgatgtaatgtttttttcgggcgattttttttcgggttggttggttttttttttcgagatgcgtttgtacgaggagtaattgagattggtgtttttgtacgagaaagttttgtttgtcgtgttttttggtatacggattgagaggcgtagggtttcggagtcgggttgtgaggcgcgtgtttatgcgggtagtttgaggcgcgtgattcgtgcggttagtgagtatttgaggttggaggatagtgtttaggagttgtcggtatcgttgtaggattattatttggttattgtgtcggatagtgatatat

SEQ ID NO: 28666 - DNA, 526 bp, Artificial Sequence
  chemically treated genomic DNA (Homo sapiens) CpG-island No: 28666
atatatcactatccgacacaataaccaaataataatcctacaacgataccgacaactcctaaacactatcctccaacctcaaatactcactaaccgcacgaatcacgcgcctcaaactacccgcataaacacgcgcctcacaacccgactccgaaaccctacgcctctcaatccgtataccaaaaaacacgacaaacaaaactttctcgtacaaaaacaccaatctcaattactcctcgtacaaacgcatctcgaaaaaaaaaaccaaccaacccgaaaaaaaatcgcccgaaaaaaacattacatcgccctccaaactaataccaatatacgatacgaaaaccacaaaacgattacgaaaaactcccaactaaccgacgaccttcgaatcctcgaacaaacccttaaaaatactaaaacaattataataacgttccatattacaaccacaatcgtaacgaattccccgaatacccaacaactaaaccaaaaccgcttcaataccctcgattttaccgcgtaaaat

SEQ ID NO: 28667 - DNA, 526 bp, Artificial Sequence
  chemically treated genomic DNA (Homo sapiens) CpG-island No: 28667
gtatattattattcggtataatggttaaatgatggttttgtagcgatgtcggtaatttttggatattattttttagttttaggtgtttattgatcgtacggattacgcgttttaagttgttcgtataggtacgcgttttatagttcggtttcggaattttacgttttttaattcgtatgttaaggagtacggtagatagggttttttcgtataggggtattagttttagttgtttttcgtgtaaacgtatttcggagaggaaggttagttaattcgagggggagtcgttcgaaaagagtattatatcgttttttaagttaatattagtgtacggtgcgaagattataaaacgattgcgaagggtttttagttggtcggcgattttcggattttcggataagtttttgaggatgttgaggtagttgtggtagcgttttatgttgtagttataatcgtaacgggtttttcgaatgtttaataattggattaaagtcgttttaatgttttcgattttgtcgcgtagagt

SEQ ID NO: 28668 - DNA, 526 bp, Artificial Sequence
  chemically treated genomic DNA (Homo sapiens) CpG-island No: 28668
actctacgcgacaaaatcgaaaacattaaaacgactttaatccaattattaaacattcgaaaaacccgttacgattataactacaacataaaacgctaccacaactacctcaacatcctcaaaaacttatccgaaaatccgaaaatcgccgaccaactaaaaacccttcgcaatcgttttataatcttcgcaccgtacactaatattaacttaaaaaacgatataatactcttttcgaacgactccccctcgaattaactaaccttcctctccgaaatacgtttacacgaaaaacaactaaaactaatacccctatacgaaaaaaccctatctaccgtactccttaacatacgaattaaaaaacgtaaaattccgaaaccgaactataaaacgcgtacctatacgaacaacttaaaacgcgtaatccgtacgatcaataaacacctaaaactaaaaaataatatccaaaaattaccgacatcgctacaaaaccatcatttaaccattataccgaataataatatac

SEQ ID NO: 28669 - DNA, 781 bp, Artificial Sequence
  chemically treated genomic DNA (Homo sapiens) CpG-island No: 28669
tcggaattcgatttttgttgcgattttttcgtttttggttcgggagagacggatggcgatggcgttggtttttcgattttcgaattcgtttgttttgatgtcgtatcgttgttattattttttgtggtattgtttagggatcggggtttcggagtgggcgttttatttagaaggattttggatacgtttttattcggtgattcgttgttattgttatttatttgggtaagtggaggattggttgtcggggtaatgggtaagggagtggttattttaggcgttggttgcggaatattcggggtaggtgtgatcggtttcggtagtgaggttagtgatatattgttttttttattttgaaagttcggcggtggagtcggtgtcgttttttttttgatttgtagtaatcgttttcgaggcgttggtttcggatcgttagtaatcggaggttttagatttagtgtagtataatggttattcgttgagtttttattcggcgattttgagtcgttattattgtagtttaattttaagggatcggagaggttgggcgtggatatgtagagttgggggcgtttgataattatcgtataagcgggttcgtttttcgagttagtagttggaatattcggaatagattgttttggaatgtaaatttggtttggcggtcgaggagcggttcgttttttgcggggtggcggtgttagtatttttgttggtggtattattatcggggtacgagtgtagtttattttcgtggagtttatggagtttagtgagttgt

SEQ ID NO: 28670 - DNA, 781 bp, Artificial Sequence
  chemically treated genomic DNA (Homo sapiens) CpG-island No: 28670
acaactcactaaactccataaactccacgaaaataaactacactcgtaccccgataataataccaccaacaaaaatactaacaccgccaccccgcaaaaaacgaaccgctcctcgaccgccaaaccaaatttacattccaaaacaatctattccgaatattccaactactaactcgaaaaacgaacccgcttatacgataattatcaaacgcccccaactctacatatccacgcccaacctctccgatcccttaaaattaaactacaataataacgactcaaaatcgccgaataaaaactcaacgaataaccattatactacactaaatctaaaacctccgattactaacgatccgaaaccaacgcctcgaaaacgattactacaaatcaaaaaaaaaacgacaccgactccaccgccgaactttcaaaataaaaaaaacaatatatcactaacctcactaccgaaaccgatcacacctaccccgaatattccgcaaccaacgcctaaaataaccactcccttacccattaccccgacaaccaatcctccacttacccaaataaataacaataacaacgaatcaccgaataaaaacgtatccaaaatccttctaaataaaacgcccactccgaaaccccgatccctaaacaataccacaaaaaataataacaacgatacgacatcaaaacaaacgaattcgaaaatcgaaaaaccaacgccatcgccatccgtctctcccgaaccaaaaacgaaaaaatcgcaacaaaaatcgaattccga

SEQ ID NO: 28671 - DNA, 781 bp, Artificial Sequence
  chemically treated genomic DNA (Homo sapiens) CpG-island No: 28671
gtaatttattgaattttatggattttacgggaatgaattatattcgtatttcggtggtggtgttattagtaaaggtattagtatcgttatttcgtaaaaagcgaatcgtttttcggtcgttaagttaggtttgtattttagagtagtttgtttcggatattttagttgttaattcgaaaagcgaattcgtttatgcggtaattgttaagcgtttttagttttgtatgtttacgtttaattttttcggttttttggagttggattgtaatggtaacggtttaaagtcgtcggatgaagatttaacggatggttattatgttatattggatttgaaattttcgattgttggcggttcggagttaacgtttcgaaagcgattgttgtagattaaaaagaaaacggtatcggttttatcgtcggatttttaaagtgggggagataatatattattggttttattatcggaatcggttatatttatttcgaatatttcgtaattagcgtttaggataattatttttttgtttattgtttcgatagttaattttttatttgtttaagtaaatggtaatggtaacggattatcgaatggaaacgtgtttaaagtttttttgaatagaacgtttatttcggagtttcgatttttgggtagtgttatagaggatgatgataacgatacggtattaaagtaagcggattcgggaatcggagagttagcgttatcgttattcgtttttttcgaattagaggcggagaaatcgtagtaggaatcgagtttcga

SEQ ID NO: 28672 - DNA, 781 bp, Artificial Sequence
  chemically treated genomic DNA (Homo sapiens) CpG-island No: 28672
tcgaaactcgattcctactacgatttctccgcctctaattcgaaaaaaacgaataacgataacgctaactctccgattcccgaatccgcttactttaataccgtatcgttatcatcatcctctataacactacccaaaaatcgaaactccgaaataaacgttctattcaaaaaaactttaaacacgtttccattcgataatccgttaccattaccatttacttaaacaaataaaaaattaactatcgaaacaataaacaaaaaaataattatcctaaacgctaattacgaaatattcgaaataaatataaccgattccgataataaaaccaataatatattatctcccccactttaaaaatccgacgataaaaccgataccgttttctttttaatctacaacaatcgctttcgaaacgttaactccgaaccgccaacaatcgaaaatttcaaatccaatataacataataaccatccgttaaatcttcatccgacgactttaaaccgttaccattacaatccaactccaaaaaaccgaaaaaattaaacgtaaacatacaaaactaaaaacgcttaacaattaccgcataaacgaattcgcttttcgaattaacaactaaaatatccgaaacaaactactctaaaatacaaacctaacttaacgaccgaaaaacgattcgctttttacgaaataacgatactaatacctttactaataacaccaccaccgaaatacgaatataattcattcccgtaaaatccataaaattcaataaattac

SEQ ID NO: 28673 - DNA, 572 bp, Artificial Sequence
  chemically treated genomic DNA (Homo sapiens) CpG-island No: 28673
tttcgttttcgttagagaggttgttgtagttgttcgtttgggttaggaagagtcgcgttttttcgaatttattttcgaacgtattttcgtagttatggttattagagtggtcgtggacgtcgtttttttgattcgatagttatttttcgattgagatatggagtatattttttcgcgtttcgttaagatttttagatcgtttaatttgttttcgtttttgttggagttgtaggcggtgttgttgtcgtcggcgttttcgttttcgtcgtttattcgattagtagatttattatttgtttgaattattagttgttgttggtttattggttcgacgtcggtacgggttaaattatcgtcgagcggattgttgtcgtggttgttgttgttgcgattgttgttcggattgttgttgttggtggagtcgtttaaggcgttcgttgagagggggcggggtcggcggtttatcgtcggcgtgtttatttttgagttgcgttgttgagagtacgatatgatagttttttttggttgtattttgttcgtggttgaacgatttaataaatcgcgattcgtta

SEQ ID NO: 28674 - DNA, 572 bp, Artificial Sequence
  chemically treated genomic DNA (Homo sapiens) CpG-island No: 28674
taacgaatcgcgatttattaaatcgttcaaccacgaacaaaatacaaccaaaaaaaactatcatatcgtactctcaacaacgcaactcaaaaataaacacgccgacgataaaccgccgaccccgccccctctcaacgaacgccttaaacgactccaccaacaacaacaatccgaacaacaatcgcaacaacaacaaccacgacaacaatccgctcgacgataatttaacccgtaccgacgtcgaaccaataaaccaacaacaactaataattcaaacaaataataaatctactaatcgaataaacgacgaaaacgaaaacgccgacgacaacaacaccgcctacaactccaacaaaaacgaaaacaaattaaacgatctaaaaatcttaacgaaacgcgaaaaaatatactccatatctcaatcgaaaaataactatcgaatcaaaaaaacgacgtccacgaccactctaataaccataactacgaaaatacgttcgaaaataaattcgaaaaaacgcgactcttcctaacccaaacgaacaactacaacaacctctctaacgaaaacgaaa

SEQ ID NO: 28675 - DNA, 572 bp, Artificial Sequence
  chemically treated genomic DNA (Homo sapiens) CpG-island No: 28675
tgacgggtcgcgatttattgagtcgtttagttacgaatagggtgtagttaaaagaggttgttatatcgtatttttaataacgtaatttaaagatggatacgtcgacggtgaatcgtcggtttcgtttttttttagcgggcgttttgggcggttttattagtaatagtaattcgaataatagtcgtagtagtagtagttacggtaatagttcgttcggcggtggtttaattcgtgtcggcgtcgagttagtgggttaatagtagttggtggtttaagtaggtggtggatttgttggtcgagtaggcggcgggagcggaagcgtcggcggtaatagtatcgtttgtagttttaatagaggcgggagtaaattaggcgatttggaaattttagcgagacgcgagaagatatattttatgttttaatcgaggagtggttgtcgagttagggagacgacgtttacgattattttgatggttatggttacggagatgcgttcggggatggattcggagaaacgcgattttttttggtttaaacgagtagttgtagtagtttttttgacgaggacgagg

SEQ ID NO: 28676 - DNA, 572 bp, Artificial Sequence
  chemically treated genomic DNA (Homo sapiens) CpG-island No: 28676
cctcgtcctcgtcaaaaaaactactacaactactcgtttaaaccaaaaaaaatcgcgtttctccgaatccatccccgaacgcatctccgtaaccataaccatcaaaataatcgtaaacgtcgtctccctaactcgacaaccactcctcgattaaaacataaaatatatcttctcgcgtctcgctaaaatttccaaatcgcctaatttactcccgcctctattaaaactacaaacgatactattaccgccgacgcttccgctcccgccgcctactcgaccaacaaatccaccacctacttaaaccaccaactactattaacccactaactcgacgccgacacgaattaaaccaccgccgaacgaactattaccgtaactactactactacgactattattcgaattactattactaataaaaccgcccaaaacgcccgctaaaaaaaaacgaaaccgacgattcaccgtcgacgtatccatctttaaattacgttattaaaaatacgatataacaacctcttttaactacaccctattcgtaactaaacgactcaataaatcgcgacccgtca

SEQ ID NO: 28677 - DNA, 525 bp, Artificial Sequence
  chemically treated genomic DNA (Homo sapiens) CpG-island No: 28677
ggcggtggcggcggtataaatttcggaggtttgtcgttggttttgtcgtcggagttggtagtgtcgttcgcgttgttgattgttgaaatagtcgatgagggagttcgattcggcgttattatcgtggtcgtcgtcgttttcgttgttatcgtcgtatttatttcgatcggtgtcgttgttgttttcgtcggagatagaggcgtcggtcgagaggatgttatcgtggtggtgtttatgttttcgtcggcgagatcgcgttttggtacgttcgaggggcgttgatcgagtagatattcgtaggatgaggttattagtattgtcggcggttgaggatcgatagtcgtggtgggtagtagacgggtggtgagtaagggacgcggttttatcgtattcgtggttagattcggaagtagtcgttttacgttggagtgtaagtttttttggttttttatcgttagatttttttgttggtttttcgttgacggatttttttttcgattcggtattattggtcgaggaattagt

SEQ ID NO: 28678 - DNA, 525 bp, Artificial Sequence
  chemically treated genomic DNA (Homo sapiens) CpG-island No: 28678
actaattcctcgaccaataataccgaatcgaaaaaaaaatccgtcaacgaaaaaccaacaaaaaaatctaacgataaaaaaccaaaaaaacttacactccaacgtaaaacgactacttccgaatctaaccacgaatacgataaaaccgcgtcccttactcaccacccgtctactacccaccacgactatcgatcctcaaccgccgacaatactaataacctcatcctacgaatatctactcgatcaacgcccctcgaacgtaccaaaacgcgatctcgccgacgaaaacataaacaccaccacgataacatcctctcgaccgacgcctctatctccgacgaaaacaacaacgacaccgatcgaaataaatacgacgataacaacgaaaacgacgacgaccacgataataacgccgaatcgaactccctcatcgactatttcaacaatcaacaacgcgaacgacactaccaactccgacgacaaaaccaacgacaaacctccgaaatttataccgccgccaccgcc

SEQ ID NO: 28679 - DNA, 525 bp, Artificial Sequence
  chemically treated genomic DNA (Homo sapiens) CpG-island No: 28679
attagtttttcggttagtggtgtcggatcgggaggaggattcgttagcggagggttagtaggagaatttggcgatggaggattaggaggatttgtattttagcgtggagcgattgttttcgaatttggttacgagtgcgatggggtcgcgttttttatttattattcgtttattgtttattacggttatcgatttttagtcgtcggtagtattggtggttttattttgcgagtatttgttcgattagcgtttttcgagcgtattaggacgcgatttcgtcggcgggagtataggtattattacgatgatattttttcggtcgacgtttttgttttcggcgaaggtagtagcgatatcgatcgggatgaatgcgacgatgataacgaagacgacgacgattacgatgatgacgtcgagtcgagtttttttatcgattattttaataattagtagcgcgagcgatattattagtttcggcggtagagttagcggtagattttcgagatttgtatcgtcgttatcgtt

SEQ ID NO: 28680 - DNA, 525 bp, Artificial Sequence
  chemically treated genomic DNA (Homo sapiens) CpG-island No: 28680
aacgataacgacgatacaaatctcgaaaatctaccgctaactctaccgccgaaactaataatatcgctcgcgctactaattattaaaataatcgataaaaaaactcgactcgacgtcatcatcgtaatcgtcgtcgtcttcgttatcatcgtcgcattcatcccgatcgatatcgctactaccttcgccgaaaacaaaaacgtcgaccgaaaaaatatcatcgtaataatacctatactcccgccgacgaaatcgcgtcctaatacgctcgaaaaacgctaatcgaacaaatactcgcaaaataaaaccaccaatactaccgacgactaaaaatcgataaccgtaataaacaataaacgaataataaataaaaaacgcgaccccatcgcactcgtaaccaaattcgaaaacaatcgctccacgctaaaatacaaatcctcctaatcctccatcgccaaattctcctactaaccctccgctaacgaatcctcctcccgatccgacaccactaaccgaaaaactaat

SEQ ID NO: 28681 - DNA, 602 bp, Artificial Sequence
  chemically treated genomic DNA (Homo sapiens) CpG-island No: 28681
tttgagaagttcgggtcgagggtttcgttgatcgttagttcgcggataggttcgggcgcgtttggtttgtttttgtataggttcgtttgaacgtgggagcgtagttcgtttgacggttgagttcgaggttcgtaattttgcggcgtttattttttttcggcgcggttttttatttcggcgagtacggcggcggtgtgggttatggattaagaaggaggcggcgtgggaggaggaagatggcggtcggtaagagcggcggtagcgtaggggagattattttttttggaaggtacgtttgtttttgtttttgacggggagaagggagggtatattggaaaacgtggtttttagaatttcggatatttagttatttgcgttgggtgggtttcgggggcggtgaagtacgagggatgagcgatgacggggagggagtgtgttgcgagcgtatttggttcgagttcgtttaggtaaggggttcggttgcgagtcggttcggtttagggggcgcgggtggattgagttataagttaaagttggtgggcgttttttgagagtgcgcgttgaagtttttgatatttaaaaaattttggggtggtggttta

SEQ ID NO: 28682 - DNA, 602 bp, Artificial Sequence
  chemically treated genomic DNA (Homo sapiens) CpG-island No: 28682
taaaccaccaccccaaaattttttaaatatcaaaaacttcaacgcgcactctcaaaaaacgcccaccaactttaacttataactcaatccacccgcgccccctaaaccgaaccgactcgcaaccgaaccccttacctaaacgaactcgaaccaaatacgctcgcaacacactccctccccgtcatcgctcatccctcgtacttcaccgcccccgaaacccacccaacgcaaataactaaatatccgaaattctaaaaaccacgttttccaatataccctcccttctccccgtcaaaaacaaaaacaaacgtaccttccaaaaaaaataatctcccctacgctaccgccgctcttaccgaccgccatcttcctcctcccacgccgcctccttcttaatccataacccacaccgccgccgtactcgccgaaataaaaaaccgcgccgaaaaaaaataaacgccgcaaaattacgaacctcgaactcaaccgtcaaacgaactacgctcccacgttcaaacgaacctatacaaaaacaaaccaaacgcgcccgaacctatccgcgaactaacgatcaacgaaaccctcgacccgaacttctcaaa

SEQ ID NO: 28683 - DNA, 602 bp, Artificial Sequence
  chemically treated genomic DNA (Homo sapiens) CpG-island No: 28683
taggttattattttaaaattttttaaatgttaaagattttagcgcgtatttttaaaggacgtttattaattttggtttgtagtttaatttattcgcgttttttgggtcgaatcggttcgtaatcgagttttttgtttaggcggattcgaattaggtgcgttcgtagtatatttttttttcgttatcgtttatttttcgtattttatcgttttcgaaatttatttagcgtagataattgaatattcggggttttgggggttacgttttttagtatattttttttttttttcgttaagggtagaaatagacgtattttttagaaaagataattttttttgcgttatcgtcgtttttgtcggtcgttatttttttttttttacgtcgttttttttttaatttatggtttatatcgtcgtcgtgttcgtcgggatgaggggtcgcgtcggaggagggtagacgtcgtagggttgcgggtttcgggtttagtcgttaggcgggttgcgtttttacgtttagacgggtttatataaaggtaggttaggcgcgttcgggtttgttcgcgggttggcggttagcgaggttttcggttcgagttttttagg

SEQ ID NO: 28684 - DNA, 602 bp, Artificial Sequence
  chemically treated genomic DNA (Homo sapiens) CpG-island No: 28684
cctaaaaaactcgaaccgaaaacctcgctaaccgccaacccgcgaacaaacccgaacgcgcctaacctacctttatataaacccgtctaaacgtaaaaacgcaacccgcctaacgactaaacccgaaacccgcaaccctacgacgtctaccctcctccgacgcgacccctcatcccgacgaacacgacgacgatataaaccataaattaaaaaaaaaacgacgtaaaaaaaaaaaaataacgaccgacaaaaacgacgataacgcaaaaaaaattatcttttctaaaaaatacgtctatttctacccttaacgaaaaaaaaaaaaaatatactaaaaaacgtaacccccaaaaccccgaatattcaattatctacgctaaataaatttcgaaaacgataaaatacgaaaaataaacgataacgaaaaaaaaatatactacgaacgcacctaattcgaatccgcctaaacaaaaaactcgattacgaaccgattcgacccaaaaaacgcgaataaattaaactacaaaccaaaattaataaacgtcctttaaaaatacgcgctaaaatctttaacatttaaaaaattttaaaataataaccta

SEQ ID NO: 28685 - DNA, 522 bp, Artificial Sequence
  chemically treated genomic DNA (Homo sapiens) CpG-island No: 28685
tttttttcgggttggggcgttggatggagtatcggggtaggagggcgggtttcgggcgtcgggagcgtagttgtcgggggtcgggggggcggataggtcgggtttttgttattttagttaggttcgcgttcgcgttttcgcgtttcgcggttttagggttttatcgcgcgcgtttagttcggcggtcgttacgtgttcggtgagtattgtttcgaatcgtcgtagtcgagatacgattcgttcgtatagcgttttgttttcgcgttcgtcgcgaatgttttcgtagaagtatagggtcgggcggttaggtttttcgcgtttttagttttcgttgcgtttcggtattatggtagtagttattttttagtcgttcgcgtttttcggcgttagggggcgttagttcgcggttacgtgatttcgttcggtttagcgtagagttcggttgttgagtttatatttgtggaatggggacgacgaattgggaggatttagtcgggattttttcgggaatatatttttttt

SEQ ID NO: 28686 - DNA, 522 bp, Artificial Sequence
  chemically treated genomic DNA (Homo sapiens) CpG-island No: 28686
aaaaaaaatatattcccgaaaaaatcccgactaaatcctcccaattcgtcgtccccattccacaaatataaactcaacaaccgaactctacgctaaaccgaacgaaatcacgtaaccgcgaactaacgccccctaacgccgaaaaacgcgaacgactaaaaaataactactaccataataccgaaacgcaacgaaaactaaaaacgcgaaaaacctaaccgcccgaccctatacttctacgaaaacattcgcgacgaacgcgaaaacaaaacgctatacgaacgaatcgtatctcgactacgacgattcgaaacaatactcaccgaacacgtaacgaccgccgaactaaacgcgcgcgataaaaccctaaaaccgcgaaacgcgaaaacgcgaacgcgaacctaactaaaataacaaaaacccgacctatccgcccccccgacccccgacaactacgctcccgacgcccgaaacccgccctcctaccccgatactccatccaacgccccaacccgaaaaaaa

SEQ ID NO: 28687 - DNA, 522 bp, Artificial Sequence
  chemically treated genomic DNA (Homo sapiens) CpG-island No: 28687
aggaagggtgtgttttcgaaagggtttcggttggatttttttagttcgtcgtttttattttataggtgtggatttagtagtcgggttttgcgttgggtcgggcggggttacgtggtcgcgggttggcgttttttggcgtcggagagcgcgggcggttggggaatggttgttgttatggtgtcggggcgtagcgagagttgggagcgcggggagtttggtcgttcggttttgtatttttgcgggagtattcgcggcggacgcgaggataggacgttgtacgagcggatcgtgtttcggttgcggcgattcgggatagtgtttatcgagtacgtggcggtcgtcgagttgggcgcgcgcggtgaggttttggggtcgcgggacgcggggacgcgggcgcggatttggttggggtggtagggattcggtttgttcgttttttcgattttcggtagttgcgttttcggcgttcggagttcgtttttttatttcggtgttttatttagcgttttagttcgagaagga

SEQ ID NO: 28688 - DNA, 522 bp, Artificial Sequence
  chemically treated genomic DNA (Homo sapiens) CpG-island No: 28688
tccttctcgaactaaaacgctaaataaaacaccgaaataaaaaaacgaactccgaacgccgaaaacgcaactaccgaaaatcgaaaaaacgaacaaaccgaatccctaccaccccaaccaaatccgcgcccgcgtccccgcgtcccgcgaccccaaaacctcaccgcgcgcgcccaactcgacgaccgccacgtactcgataaacactatcccgaatcgccgcaaccgaaacacgatccgctcgtacaacgtcctatcctcgcgtccgccgcgaatactcccgcaaaaatacaaaaccgaacgaccaaactccccgcgctcccaactctcgctacgccccgacaccataacaacaaccattccccaaccgcccgcgctctccgacgccaaaaaacgccaacccgcgaccacgtaaccccgcccgacccaacgcaaaacccgactactaaatccacacctataaaataaaaacgacgaactaaaaaaatccaaccgaaaccctttcgaaaacacacccttcct

SEQ ID NO: 28689 - DNA, 1032 bp, Artificial Sequence
  chemically treated genomic DNA (Homo sapiens) CpG-island No: 28689
tcgtttacgtcgttcgtatcgcgcgtatttagtcgggttagggcgagggatttaggtttttcggttttttagggcgcgcgttcggggttcgggggtggggggcgtggaggcggtttttttggagcgtttaattagtagtaaggttcggcggtggcgttagtgacgtagatcgcgttttttttcgttttattgcgggtcgacgttcggcgtcgttagttacgcgcgttgtagcgcgaggggagagcgagaaggagggttttggggtcgatcggttgttggagggcggcgggtcgcggggagcgggggagtgagtatgcgtagcggtttcggggagcgtaggggaggaggggtcggcgttgagaggcgcgcgcgtgcgcgtgtacgagtggttcgtcggcggttgcgggtggagggggcggtttttcgagtgtcggcgattcgagggcgggtaggcgggcggtaggtgtcgtcgtagtttttggttggtttcgcgttttcgtttttcggcggcgatgagttgggttttgtcgggggttgtatttgtcggttgtttattagtatcggttttttggcgtgatttcggttttttcgcgtgtttagttttcgcggcgcggcgttgtttttgagagggagcggcggcggtttttttcgtttcgagttttcgttcgggggtcgcgcgaggacggcgttcggtttttttttttttttttttcgttcgtcgtttttaatgttttttcggcggggagggggttgtttgggagatacgttgagcggtttttttacggaggtttttcggttgtagtagtagtagcgttcggttcggcgtttcgtagtttttattagcggcggcggtttggaggagtcgcgtattcgtcgtcgtttttcgagtttcgtagtcgtcgtcgtcgttcggtattcgaggagagggcggcgggcgtttttcggggaagatgaaggcggaggggggcgattattttatgattaatttgtcggtgtagtaggttttgagtttttgggtttacgggacggtgt

SEQ ID NO: 28690 - DNA, 1032 bp, Artificial Sequence
  chemically treated genomic DNA (Homo sapiens) CpG-island No: 28690
acaccgtcccgtaaacccaaaaactcaaaacctactacaccgacaaattaatcataaaataatcgcccccctccgccttcatcttccccgaaaaacgcccgccgccctctcctcgaataccgaacgacgacgacgactacgaaactcgaaaaacgacgacgaatacgcgactcctccaaaccgccgccgctaataaaaactacgaaacgccgaaccgaacgctactactactacaaccgaaaaacctccgtaaaaaaaccgctcaacgtatctcccaaacaaccccctccccgccgaaaaaacattaaaaacgacgaacgaaaaaaaaaaaaaaaaaaaccgaacgccgtcctcgcgcgacccccgaacgaaaactcgaaacgaaaaaaaccgccgccgctccctctcaaaaacaacgccgcgccgcgaaaactaaacacgcgaaaaaaccgaaatcacgccaaaaaaccgatactaataaacaaccgacaaatacaacccccgacaaaacccaactcatcgccgccgaaaaacgaaaacgcgaaaccaaccaaaaactacgacgacacctaccgcccgcctacccgccctcgaatcgccgacactcgaaaaaccgccccctccacccgcaaccgccgacgaaccactcgtacacgcgcacgcgcgcgcctctcaacgccgacccctcctcccctacgctccccgaaaccgctacgcatactcactcccccgctccccgcgacccgccgccctccaacaaccgatcgaccccaaaaccctccttctcgctctcccctcgcgctacaacgcgcgtaactaacgacgccgaacgtcgacccgcaataaaacgaaaaaaaacgcgatctacgtcactaacgccaccgccgaaccttactactaattaaacgctccaaaaaaaccgcctccacgccccccacccccgaaccccgaacgcgcgccctaaaaaaccgaaaaacctaaatccctcgccctaacccgactaaatacgcgcgatacgaacgacgtaaacga

SEQ ID NO: 28691 - DNA, 1032 bp, Artificial Sequence
  chemically treated genomic DNA (Homo sapiens) CpG-island No: 28691
gtatcgtttcgtgggtttagaggtttaggatttgttgtatcgataggttgattatggaatggtcgttttttttcgtttttatttttttcgaggggcgttcgtcgtttttttttcgggtgtcgggcggcggcggcggttgcgaggttcggggggcggcggcgggtgcgcggtttttttaggtcgtcgtcgttggtggaggttgcgggacgtcgggtcgggcgttgttgttgttgtagtcggagggttttcgtgggggggtcgtttagcgtgttttttaggtagtttttttttcgtcggggagatattgaggacggcggacggaggaaggaggggagggggtcgggcgtcgttttcgcgcggttttcgagcgaggattcggggcggaggaggtcgtcgtcgtttttttttaggggtagcgtcgcgtcgcggggattggatacgcgaggaggtcgaggttacgttaggaggtcggtgttgatgggtagtcggtaggtgtagttttcgatagggtttagtttatcgtcgtcggaggacggagacgcgggattagttagaggttgcggcggtatttgtcgttcgtttgttcgttttcgggtcgtcgatattcgaggaatcgttttttttattcgtagtcgtcggcgggttattcgtgtacgcgtacgcgcgcgttttttagcgtcggtttttttttttttgcgtttttcggagtcgttgcgtatgtttattttttcgtttttcgcgattcgtcgttttttaatagtcggtcggttttaaagttttttttttcgtttttttttcgcgttgtagcgcgcgtggttgacggcgtcgagcgtcggttcgtagtggggcggagggaagcgcggtttacgttattggcgttatcgtcgggttttattgttgattgggcgttttaagggaatcgtttttacgttttttattttcggatttcgggcgcgcgttttgagagatcgggagatttggatttttcgttttggttcggttgggtgcgcgcggtgcgggcggcgtgggcgg

SEQ ID NO: 28692 - DNA, 1032 bp, Artificial Sequence
  chemically treated genomic DNA (Homo sapiens) CpG-island No: 28692
ccgcccacgccgcccgcaccgcgcgcacccaaccgaaccaaaacgaaaaatccaaatctcccgatctctcaaaacgcgcgcccgaaatccgaaaataaaaaacgtaaaaacgattcccttaaaacgcccaatcaacaataaaacccgacgataacgccaataacgtaaaccgcgcttccctccgccccactacgaaccgacgctcgacgccgtcaaccacgcgcgctacaacgcgaaaaaaaaacgaaaaaaaaaactttaaaaccgaccgactattaaaaaacgacgaatcgcgaaaaacgaaaaaataaacatacgcaacgactccgaaaaacgcaaaaaaaaaaaaaccgacgctaaaaaacgcgcgcgtacgcgtacacgaataacccgccgacgactacgaataaaaaaaacgattcctcgaatatcgacgacccgaaaacgaacaaacgaacgacaaataccgccgcaacctctaactaatcccgcgtctccgtcctccgacgacgataaactaaaccctatcgaaaactacacctaccgactacccatcaacaccgacctcctaacgtaacctcgacctcctcgcgtatccaatccccgcgacgcgacgctacccctaaaaaaaaacgacgacgacctcctccgccccgaatcctcgctcgaaaaccgcgcgaaaacgacgcccgaccccctcccctccttcctccgtccgccgtcctcaatatctccccgacgaaaaaaaaactacctaaaaaacacgctaaacgacccccccacgaaaaccctccgactacaacaacaacaacgcccgacccgacgtcccgcaacctccaccaacgacgacgacctaaaaaaaccgcgcacccgccgccgccccccgaacctcgcaaccgccgccgccgcccgacacccgaaaaaaaaacgacgaacgcccctcgaaaaaaataaaaacgaaaaaaaacgaccattccataatcaacctatcgatacaacaaatcctaaacctctaaacccacgaaacgatac

SEQ ID NO: 28693 - DNA, 915 bp, Artificial Sequence
  chemically treated genomic DNA (Homo sapiens) CpG-island No: 28693
tgttattttttcgcggtgtttagttttcgtttttttttggcgttcgcgtttttttttttttttttgttttttagtacggattttttttcgacgttgtttacgtgttagattcgggatcgcgagcggcgttcgtattcgtacgtatattcggttacgttcgtattcgcgcggtcgcggggtcggttgtttattttcggggttttatggtcgcgtcgttagtttgggtgtgagagggggagagggtgtgaggacgtgtgtggcgtttagtttcgaaggacggggcggaggaaggggtttggagtttgttattttttgagggagcgcggaggtcgagagatttgtgaggcgcgcggcggggtcgggagggttagtatattgtgagtcggtaaggggacgcggaatagtcgggcggcgcgcggttatcgggtacggaattcgttgtcgttattatttcgtcgtcgtagttcggcgagtggcggggcgcggggaggagggggttgagtcgggtgggggagcgcggggcgcggcggcggtattaggcggttcgattggagttttgcgttagtcggcggtacgcgtatatttgttcgtcgtcgttatcggtcgcgttattggttgtcggcgtcgagcgcgcgagattgaattttttatttattttagggtcgggcgggcgagcgcggtcgcggtggagttttatcgcgggcgttttcgaattttcgaagcgcgttttcgcgtaggtcgtgggcgcgtacggtcgttgtcgtcgtttgttttggtggaggttgcgagtgtttgggtttgtgattttcggtttttcgcgcgtagcgttagtttgggagggaagtttatatggcggtttttagggtgcgattggagggaggcgggacgatgttattttttgttttttaatttgat

SEQ ID NO: 28694 - DNA, 915 bp, Artificial Sequence
  chemically treated genomic DNA (Homo sapiens) CpG-island No: 28694
atcaaattaaaaaacaaaaaataacatcgtcccgcctccctccaatcgcaccctaaaaaccgccatataaacttccctcccaaactaacgctacgcgcgaaaaaccgaaaatcacaaacccaaacactcgcaacctccaccaaaacaaacgacgacaacgaccgtacgcgcccacgacctacgcgaaaacgcgcttcgaaaattcgaaaacgcccgcgataaaactccaccgcgaccgcgctcgcccgcccgaccctaaaataaataaaaaattcaatctcgcgcgctcgacgccgacaaccaataacgcgaccgataacgacgacgaacaaatatacgcgtaccgccgactaacgcaaaactccaatcgaaccgcctaataccgccgccgcgccccgcgctcccccacccgactcaaccccctcctccccgcgccccgccactcgccgaactacgacgacgaaataataacgacaacgaattccgtacccgataaccgcgcgccgcccgactattccgcgtccccttaccgactcacaatatactaaccctcccgaccccgccgcgcgcctcacaaatctctcgacctccgcgctccctcaaaaaataacaaactccaaaccccttcctccgccccgtccttcgaaactaaacgccacacacgtcctcacaccctctccccctctcacacccaaactaacgacgcgaccataaaaccccgaaaataaacaaccgaccccgcgaccgcgcgaatacgaacgtaaccgaatatacgtacgaatacgaacgccgctcgcgatcccgaatctaacacgtaaacaacgtcgaaaaaaaatccgtactaaaaaacaaaaaaaaaaaaaaaaacgcgaacgccaaaaaaaaacgaaaactaaacaccgcgaaaaaataaca

SEQ ID NO: 28695 - DNA, 915 bp, Artificial Sequence
  chemically treated genomic DNA (Homo sapiens) CpG-island No: 28695
gttaggttggggagtaaggagtagtatcgtttcgtttttttttagtcgtattttagggatcgttatgtgagttttttttttagattgacgttgcgcgcggagagtcgggagttataggtttaggtattcgtagtttttattagaataaacggcggtagcggtcgtgcgcgtttacggtttgcgcggggacgcgtttcgggggttcgggggcgttcgcggtaaagttttatcgcggtcgcgttcgttcgttcggttttggaatgaatggaaggtttaatttcgcgcgttcggcgtcggtagttaatgacgcggtcggtagcggcggcgggtaggtgtgcgcgtgtcgtcggttgacgtagggttttagtcgaatcgtttggtgtcgtcgtcgcgtttcgcgtttttttattcggtttagttttttttttttcgcgtttcgttattcgtcgggttgcggcggcggagtggtggcgatagcggatttcgtgttcggtggtcgcgcgtcgttcggttgtttcgcgtttttttgtcggtttataatgtgttgattttttcggtttcgtcgcgcgttttataggtttttcgattttcgcgtttttttaggaagtgatagattttaggttttttttttcgtttcgtttttcgggattgaacgttatatacgtttttatatttttttttttttttatatttaggttagcgacgcgattatgaggtttcggaggtaagtagtcggtttcgcggtcgcgcgagtgcgagcgtggtcgggtgtgcgtgcgggtgcggacgtcgttcgcggtttcgagtttggtacgtgagtaacgtcgaggggaaattcgtgttgaggagtaggaagaaaagaggaggcgcgagcgttagggaggggcgaggattgggtatcgcggggaagtgata

SEQ ID NO: 28696 - DNA, 915 bp, Artificial Sequence
  chemically treated genomic DNA (Homo sapiens) CpG-island No: 28696
tatcacttccccgcgatacccaatcctcgcccctccctaacgctcgcgcctcctcttttcttcctactcctcaacacgaatttcccctcgacgttactcacgtaccaaactcgaaaccgcgaacgacgtccgcacccgcacgcacacccgaccacgctcgcactcgcgcgaccgcgaaaccgactacttacctccgaaacctcataatcgcgtcgctaacctaaatataaaaaaaaaaaaaaatataaaaacgtatataacgttcaatcccgaaaaacgaaacgaaaaaaaaaacctaaaatctatcacttcctaaaaaaacgcgaaaatcgaaaaacctataaaacgcgcgacgaaaccgaaaaaatcaacacattataaaccgacaaaaaaacgcgaaacaaccgaacgacgcgcgaccaccgaacacgaaatccgctatcgccaccactccgccgccgcaacccgacgaataacgaaacgcgaaaaaaaaaaaactaaaccgaataaaaaaacgcgaaacgcgacgacgacaccaaacgattcgactaaaaccctacgtcaaccgacgacacgcgcacacctacccgccgccgctaccgaccgcgtcattaactaccgacgccgaacgcgcgaaattaaaccttccattcattccaaaaccgaacgaacgaacgcgaccgcgataaaactttaccgcgaacgcccccgaacccccgaaacgcgtccccgcgcaaaccgtaaacgcgcacgaccgctaccgccgtttattctaataaaaactacgaatacctaaacctataactcccgactctccgcgcgcaacgtcaatctaaaaaaaaaactcacataacgatccctaaaatacgactaaaaaaaaacgaaacgatactactccttactccccaacctaac

SEQ ID NO: 28697 - DNA, 1147 bp, Artificial Sequence
  chemically treated genomic DNA (Homo sapiens) CpG-island No: 28697
gttcgcgacgttatcgcgtttttcgtcgtcgtcgtcgtcgtcggggttttcgttgacgtacgggtttcgttttttttttttttttttttttatagttcgggcgtcgggcggcgagtgcgttagtcggtcgggacgcggagttgtgtgtattttttacgcgggttcgttcgttttcgggagtcgcgtagttttttcggcggtggtaggagcggcgaagagcgttattagcgggtttttacggttttaggtttcgcggcgcgcggttcgttcgtttttttcgttcgtttaatttgcggtttgtggaggcgtgaggcgacgataggcgagcgtttcgagtagcgttagtcgttgcggtcgtcggttttttttttatttttttttcggttttttttcgtttttttttttttatttttcgagtttcggcgtgtttcggttacgttcgacgttgttgtaggaataaaggaagatttcgcggcggcggcggcgttattttcgtttgttgtttcgattcgttttcggttcgcggcggcggtattagggcgttcggtttagttttttcggaggtttcggttcggttttatcgtgtcggtttcgcgcgcgaattcggttttcgtatttgggattttgtagggtgagtgatacggggttgcgggtgggagtcgggttttttgttgtcgggtcgggggcgggagtgaagggatcggggcgtcgcgggttaatggcgaagtcggagtaggtcgcggatggcggcgttcgggggaggggagttcgttcgttagtttaggaagtataaagacggaggcgttattttgtcgtcgtggttcgagatttggttttcggcgtttttggttcgttttatagtacggtcgggaaataatgtacggcgtgtcgtttttgcggggtcggtttttaggtcgttcgttttcgcggcggcgttcggcgtgggtattacgatttagagaaataaagaggtcgaggcggcggtcgcgttttttgttcgttgtagttttttttagtttttttttaagaggagtcgttcggggtcgggggtcgggggtcggggattcgcgtggggtttgtaggcgaagggttggtcgggtttgttgagttgttgttttgtatgatttagtggttttcggagagggtt

SEQ ID NO: 28698 - DNA, 1147 bp, Artificial Sequence
  chemically treated genomic DNA (Homo sapiens) CpG-island No: 28698
aaccctctccgaaaaccactaaatcatacaaaacaacaactcaacaaacccgaccaacccttcgcctacaaaccccacgcgaatccccgacccccgacccccgaccccgaacgactcctcttaaaaaaaaactaaaaaaaactacaacgaacaaaaaacgcgaccgccgcctcgacctctttatttctctaaatcgtaatacccacgccgaacgccgccgcgaaaacgaacgacctaaaaaccgaccccgcaaaaacgacacgccgtacattatttcccgaccgtactataaaacgaaccaaaaacgccgaaaaccaaatctcgaaccacgacgacaaaataacgcctccgtctttatacttcctaaactaacgaacgaactcccctcccccgaacgccgccatccgcgacctactccgacttcgccattaacccgcgacgccccgatcccttcactcccgcccccgacccgacaacaaaaaacccgactcccacccgcaaccccgtatcactcaccctacaaaatcccaaatacgaaaaccgaattcgcgcgcgaaaccgacacgataaaaccgaaccgaaacctccgaaaaaactaaaccgaacgccctaataccgccgccgcgaaccgaaaacgaatcgaaacaacaaacgaaaataacgccgccgccgccgcgaaatcttcctttattcctacaacaacgtcgaacgtaaccgaaacacgccgaaactcgaaaaataaaaaaaaaaaaacgaaaaaaaaccgaaaaaaaaataaaaaaaaaaccgacgaccgcaacgactaacgctactcgaaacgctcgcctatcgtcgcctcacgcctccacaaaccgcaaattaaacgaacgaaaaaaacgaacgaaccgcgcgccgcgaaacctaaaaccgtaaaaacccgctaataacgctcttcgccgctcctaccaccgccgaaaaaactacgcgactcccgaaaacgaacgaacccgcgtaaaaaatacacacaactccgcgtcccgaccgactaacgcactcgccgcccgacgcccgaactataaaaaaaaaaaaaaaaaaaaaacgaaacccgtacgtcaacgaaaaccccgacgacgacgacgacgacgaaaaacgcgataacgtcgcgaac

SEQ ID NO: 28699 - DNA, 1147 bp, Artificial Sequence
  chemically treated genomic DNA (Homo sapiens) CpG-island No: 28699
ggtttttttcgaaaattattgagttatgtagaatagtagtttagtaggttcggttagtttttcgtttgtaggttttacgcggattttcgattttcgattttcgatttcgaacggttttttttaggggagagttagggggggttgtaacgggtagggggcgcggtcgtcgtttcggtttttttgtttttttgggtcgtggtgtttacgtcgggcgtcgtcgcggaggcgagcggtttagaggtcggtttcgtagaggcggtacgtcgtgtattgtttttcgatcgtgttgtggagcgagttagggacgtcgggagttaggtttcgggttacgacgataggatgacgttttcgtttttgtgttttttgggttggcgggcgggtttttttttttcggacgtcgttattcgcggtttgtttcggtttcgttattggttcgcggcgtttcggtttttttattttcgttttcggttcggtaataaggagttcggtttttattcgtagtttcgtattatttattttgtagggttttaaatgcgaaagtcgggttcgcgcgcgaagtcggtacgatgaggtcgggtcgaggttttcgggaaggttgagtcgggcgttttggtgtcgtcgtcgcgggtcgggagcgggtcggagtagtaggcggaggtggcgtcgtcgtcgtcgcggggtttttttttgtttttgtagtagcgtcgagcgtggtcgggatacgtcggagttcgggaagtgggaggagggaagcgagggggggtcgaggaggaggtggagggaggatcggcggtcgtagcggttaacgttgttcgaggcgttcgtttgtcgtcgttttacgtttttataggtcgtaggttgggcggacgaggagggcgagcggatcgcgcgtcgcgaggtttggggtcgtaagggttcgttgatggcgtttttcgtcgtttttgttatcgtcggggaagttgcgcggttttcgggagcgagcgagttcgcgtaggagatgtatatagtttcgcgtttcggtcgattaacgtattcgtcgttcggcgttcgggttgtgagggaaaagagggggagggggcgggattcgtgcgttagcgaaaatttcggcggcggcggcggcggcggggagcgcggtgacgtcgcgggt

SEQ ID NO: 28700 - DNA, 1147 bp, Artificial Sequence
  chemically treated genomic DNA (Homo sapiens) CpG-island No: 28700
acccgcgacgtcaccgcgctccccgccgccgccgccgccgccgaaattttcgctaacgcacgaatcccgccccctccccctcttttccctcacaacccgaacgccgaacgacgaatacgttaatcgaccgaaacgcgaaactatatacatctcctacgcgaactcgctcgctcccgaaaaccgcgcaacttccccgacgataacaaaaacgacgaaaaacgccatcaacgaacccttacgaccccaaacctcgcgacgcgcgatccgctcgccctcctcgtccgcccaacctacgacctataaaaacgtaaaacgacgacaaacgaacgcctcgaacaacgttaaccgctacgaccgccgatcctccctccacctcctcctcgaccccccctcgcttccctcctcccacttcccgaactccgacgtatcccgaccacgctcgacgctactacaaaaacaaaaaaaaaccccgcgacgacgacgacgccacctccgcctactactccgacccgctcccgacccgcgacgacgacaccaaaacgcccgactcaaccttcccgaaaacctcgacccgacctcatcgtaccgacttcgcgcgcgaacccgactttcgcatttaaaaccctacaaaataaataatacgaaactacgaataaaaaccgaactccttattaccgaaccgaaaacgaaaataaaaaaaccgaaacgccgcgaaccaataacgaaaccgaaacaaaccgcgaataacgacgtccgaaaaaaaaaaacccgcccgccaacccaaaaaacacaaaaacgaaaacgtcatcctatcgtcgtaacccgaaacctaactcccgacgtccctaactcgctccacaacacgatcgaaaaacaatacacgacgtaccgcctctacgaaaccgacctctaaaccgctcgcctccgcgacgacgcccgacgtaaacaccacgacccaaaaaaacaaaaaaaccgaaacgacgaccgcgccccctacccgttacaaccccccctaactctcccctaaaaaaaaccgttcgaaatcgaaaatcgaaaatcgaaaatccgcgtaaaacctacaaacgaaaaactaaccgaacctactaaactactattctacataactcaataattttcgaaaaaaacc

SEQ ID NO: 28701 - DNA, 554 bp, Artificial Sequence
  chemically treated genomic DNA (Homo sapiens) CpG-island No: 28701
cgtttcgttcgattgtttcgtttttaacgcggatttacgttatcgcgcgttagtttgcggtcgttttgatttcgcgggatttgagtttcggtgttaataaatatttttatcgcggttgcgtttattttatttgtcggcggcgattagtttttgaagaaaagtgtttattatggtgtcgaggagttttattttcgaaatggtagtgtcgggtggtatagatttcgaagacgattttttatgttttttttttttatagtcgttgtttagattggcgttatttgtttcggttatgttgaagttgaatttttaaatttaattggttcggttttttcgtttgtcggagttttcgattggtcgttttcgcgaagggtgttttcgattggaagtagtagaacgtttgttatcgagtagggcgggggcggggaagttatcggaggttgagggtagcggggaggcgaggttttgcgcggtgggatgttcgcgatcggaaaaatacgcgtaagttaaagttcgggggtttaataaaaatttttaattatattttagagatttcg

SEQ ID NO: 28702 - DNA, 554 bp, Artificial Sequence
  chemically treated genomic DNA (Homo sapiens) CpG-island No: 28702
cgaaatctctaaaatataattaaaaatttttattaaacccccgaactttaacttacgcgtatttttccgatcgcgaacatcccaccgcgcaaaacctcgcctccccgctaccctcaacctccgataacttccccgcccccgccctactcgataacaaacgttctactacttccaatcgaaaacacccttcgcgaaaacgaccaatcgaaaactccgacaaacgaaaaaaccgaaccaattaaatttaaaaattcaacttcaacataaccgaaacaaataacgccaatctaaacaacgactataaaaaaaaaaaacataaaaaatcgtcttcgaaatctataccacccgacactaccatttcgaaaataaaactcctcgacaccataataaacacttttcttcaaaaactaatcgccgccgacaaataaaataaacgcaaccgcgataaaaatatttattaacaccgaaactcaaatcccgcgaaatcaaaacgaccgcaaactaacgcgcgataacgtaaatccgcgttaaaaacgaaacaatcgaacgaaacg

SEQ ID NO: 28703 - DNA, 554 bp, Artificial Sequence
  chemically treated genomic DNA (Homo sapiens) CpG-island No: 28703
cgaagtttttgaaatgtaattaaaagtttttattgagttttcgagttttggtttgcgcgtattttttcggtcgcggatattttatcgcgtagagtttcgttttttcgttgtttttagttttcgatgattttttcgttttcgttttgttcggtgatagacgttttattgtttttaatcggaggtatttttcgcgggagcggttaatcgggagtttcggtaggcggggaggtcgggttagttagatttggaggtttaattttaatatggtcgaagtaagtagcgttaatttaggtagcggttgtgaggaaaaaaggtatgaggggtcgttttcggaatttgtgttattcggtattattatttcgagggtgaagtttttcgatattatggtggatatttttttttagaagttggtcgtcgtcggtaggtaaagtggacgtagtcgcggtgggagtgtttgttggtatcgaagtttaaatttcgcgaggttaggacggtcgtaggttggcgcgcggtgacgtgggttcgcgttgggggcggggtagtcggacgaggcg

SEQ ID NO: 28704 - DNA, 554 bp, Artificial Sequence
  chemically treated genomic DNA (Homo sapiens) CpG-island No: 28704
cgcctcgtccgactaccccgcccccaacgcgaacccacgtcaccgcgcgccaacctacgaccgtcctaacctcgcgaaatttaaacttcgataccaacaaacactcccaccgcgactacgtccactttacctaccgacgacgaccaacttctaaaaaaaaatatccaccataatatcgaaaaacttcaccctcgaaataataataccgaataacacaaattccgaaaacgacccctcataccttttttcctcacaaccgctacctaaattaacgctacttacttcgaccatattaaaattaaacctccaaatctaactaacccgacctccccgcctaccgaaactcccgattaaccgctcccgcgaaaaatacctccgattaaaaacaataaaacgtctatcaccgaacaaaacgaaaacgaaaaaatcatcgaaaactaaaaacaacgaaaaaacgaaactctacgcgataaaatatccgcgaccgaaaaaatacgcgcaaaccaaaactcgaaaactcaataaaaacttttaattacatttcaaaaacttcg

SEQ ID NO: 28705 - DNA, 1240 bp, Artificial Sequence
  chemically treated genomic DNA (Homo sapiens) CpG-island No: 28705
atcgttttaggcgcggatattcgggttttttcgttttattttacgggttaaggagacgttagtaggattttattttttatagtagtcgagtaagagagtacgcggaatagaggagttttgcgtgattttatataagagttattcggattttttttaaatttgaggtaaagcgtattttttttcgcggtttcgggtagttttcgagtatcgggttttcggtattattttttttgggtcgtggggtggtagtaaacgttaagggggatgcgtatgttttgtgtggggtttcgcgtttcgttttcgcggtcgtcgagtgacggaagcgcgtgtttaggtttatgggaaatgtggtttttaaatcgcgggcgttttttgtttgggtttagagcgggattttagttttcggtcggttggttggcgcgtgtggaaacgcgggaggagagggcggggcgagtgggagaaaaggtgggcggagtcggtgggaaggttaggcggagggggcggggtttcggtcggttaagtcgcggttattcgcggtttgagggatcggaggagcggggtcgggagttgcgaggagttttttagacgtcgtcgagcgcgagggcgggcgtgttcggagtggtcgttcgttagtcgtcgttttttagttttcgtatttgtaggtttttttttttttcgtcgggacgcgggagagttcggttcgcggcgggggcggttaatgcgaaattggttggtgttgttgtgttcgtgtgtgttcggggtcgcgttgtatttttggttgcggttgcgtttttcgtcgttcgtttgcgttttcggggtcggttttgtaggtgaggttttggggtcgggcgggttggcggtcgtcgggggggtgggaggttcggtttggtgtcgcggggtttcgtcgggaattgttggaggcgggggaagggttaaacgcgacggtttttagacgaaataaacggttttttttatttttggagcgttaatatcgggtaaatttgagggagttttttttttttcgtgttttcgtcgttttttattttttcgtttgttttaacgttcgtagagtcggcgttcgtagttgtaagtttttcgttcgtttttaggtttggttagtgatgttcgacgtcgttcgttcgttcgggagcggaatttcgtgtgttttttagtcgttagcgttttttgttttgggagttttggttttgaagttgttttttttttttttaagttgttggtt

SEQ ID NO: 28706 - DNA, 1240 bp, Artificial Sequence
  chemically treated genomic DNA (Homo sapiens) CpG-island No: 28706
aaccaacaacttaaaaaaaaaaaaaacaacttcaaaaccaaaactcccaaaacaaaaaacgctaacgactaaaaaacacacgaaattccgctcccgaacgaacgaacgacgtcgaacatcactaaccaaacctaaaaacgaacgaaaaacttacaactacgaacgccgactctacgaacgttaaaacaaacgaaaaaataaaaaacgacgaaaacacgaaaaaaaaaaaactccctcaaatttacccgatattaacgctccaaaaataaaaaaaaccgtttatttcgtctaaaaaccgtcgcgtttaacccttcccccgcctccaacaattcccgacgaaaccccgcgacaccaaaccgaacctcccacccccccgacgaccgccaacccgcccgaccccaaaacctcacctacaaaaccgaccccgaaaacgcaaacgaacgacgaaaaacgcaaccgcaaccaaaaatacaacgcgaccccgaacacacacgaacacaacaacaccaaccaatttcgcattaaccgcccccgccgcgaaccgaactctcccgcgtcccgacgaaaaaaaaaaaaacctacaaatacgaaaactaaaaaacgacgactaacgaacgaccactccgaacacgcccgccctcgcgctcgacgacgtctaaaaaactcctcgcaactcccgaccccgctcctccgatccctcaaaccgcgaataaccgcgacttaaccgaccgaaaccccgccccctccgcctaaccttcccaccgactccgcccaccttttctcccactcgccccgccctctcctcccgcgtttccacacgcgccaaccaaccgaccgaaaactaaaatcccgctctaaacccaaacaaaaaacgcccgcgatttaaaaaccacatttcccataaacctaaacacgcgcttccgtcactcgacgaccgcgaaaacgaaacgcgaaaccccacacaaaacatacgcatcccccttaacgtttactaccaccccacgacccaaaaaaaataataccgaaaacccgatactcgaaaactacccgaaaccgcgaaaaaaaatacgctttacctcaaatttaaaaaaaatccgaataactcttatataaaatcacgcaaaactcctctattccgcgtactctcttactcgactactataaaaaataaaatcctactaacgtctccttaacccgtaaaataaaacgaaaaaacccgaatatccgcgcctaaaacgat

SEQ ID NO: 28707 - DNA, 1240 bp, Artificial Sequence
  chemically treated genomic DNA (Homo sapiens) CpG-island No: 28707
gattaataatttgggggggaagaaaataattttagagttagagtttttaaagtagaaagcgttggcggttgaagggtatacgaggtttcgttttcgggcgaacgggcggcgtcggatattattaattaggtttggggacgggcgaaggatttgtagttgcgggcgtcggttttgcgggcgttaaggtaaacggggaagtgagaagcggcggggatacgaaaagagaaaagtttttttaagtttgttcgatgttaacgttttaaggatgaaaagagtcgtttgtttcgtttggggatcgtcgcgtttggtttttttttcgtttttaataattttcggcgaagtttcgcggtattaagtcgggttttttattttttcggcggtcgttaattcgttcggttttaggattttatttgtagggtcggtttcggaggcgtaggcgggcggcggggagcgtagtcgtagttagaggtgtagcgcggtttcgagtatatacgggtatagtagtattagttagtttcgtattggtcgttttcgtcgcgagtcgggttttttcgcgtttcggcggagagggaggggatttgtaagtgcggagattgaggggcggcggttgacgagcgattatttcgagtacgttcgttttcgcgttcggcgacgtttggagggtttttcgtagttttcggtttcgttttttcggttttttagatcgcgggtggtcgcggtttagtcggtcgaagtttcgtttttttcgtttggtttttttatcggtttcgtttatttttttttttattcgtttcgtttttttttttcgcgtttttatacgcgttagttagtcggtcgggagttgaagtttcgttttgggtttaggtagggggcgttcgcggtttagaaattatattttttatgagtttaagtacgcgttttcgttattcggcggtcgcgggggcgaagcgcgaggttttatatagagtatgcgtattttttttgacgtttgttgttattttacggtttaggggaggtagtgtcggagattcggtgttcggaggttgttcggagtcgcgaagggaaatgcgttttgttttagatttgaaggaaattcgagtggtttttgtgtgaaattacgtagagtttttttgtttcgcgtgtttttttgttcgattgttgtgggaggtgggattttgttgacgtttttttggttcgtagagtggggcgaggaagttcgagtgttcgcgtttggagcggt

SEQ ID NO: 28708 - DNA, 1240 bp, Artificial Sequence
  chemically treated genomic DNA (Homo sapiens) CpG-island No: 28708
accgctccaaacgcgaacactcgaacttcctcgccccactctacgaaccaaaaaaacgtcaacaaaatcccacctcccacaacaatcgaacaaaaaaacacgcgaaacaaaaaaactctacgtaatttcacacaaaaaccactcgaatttccttcaaatctaaaacaaaacgcatttcccttcgcgactccgaacaacctccgaacaccgaatctccgacactacctcccctaaaccgtaaaataacaacaaacgtcaaaaaaaatacgcatactctatataaaacctcgcgcttcgcccccgcgaccgccgaataacgaaaacgcgtacttaaactcataaaaaatataatttctaaaccgcgaacgccccctacctaaacccaaaacgaaacttcaactcccgaccgactaactaacgcgtataaaaacgcgaaaaaaaaaaacgaaacgaataaaaaaaaaaataaacgaaaccgataaaaaaaccaaacgaaaaaaacgaaacttcgaccgactaaaccgcgaccacccgcgatctaaaaaaccgaaaaaacgaaaccgaaaactacgaaaaaccctccaaacgtcgccgaacgcgaaaacgaacgtactcgaaataatcgctcgtcaaccgccgcccctcaatctccgcacttacaaatcccctccctctccgccgaaacgcgaaaaaacccgactcgcgacgaaaacgaccaatacgaaactaactaatactactatacccgtatatactcgaaaccgcgctacacctctaactacgactacgctccccgccgcccgcctacgcctccgaaaccgaccctacaaataaaatcctaaaaccgaacgaattaacgaccgccgaaaaaataaaaaacccgacttaataccgcgaaacttcgccgaaaattattaaaaacgaaaaaaaaaccaaacgcgacgatccccaaacgaaacaaacgactcttttcatccttaaaacgttaacatcgaacaaacttaaaaaaacttttctcttttcgtatccccgccgcttctcacttccccgtttaccttaacgcccgcaaaaccgacgcccgcaactacaaatccttcgcccgtccccaaacctaattaataatatccgacgccgcccgttcgcccgaaaacgaaacctcgtatacccttcaaccgccaacgctttctactttaaaaactctaactctaaaattattttcttcccccccaaattattaatc

SEQ ID NO: 28709 - DNA, 939 bp, Artificial Sequence
  chemically treated genomic DNA (Homo sapiens) CpG-island No: 28709
ttcgcgttgttatttagttgggtagtcgggggagcgcgcgtgggggtttcgcgagtcgttcgtttttggtttttggggaagtttgggggacgcggttgtggcggaggcgttttgggatttaggtcgtttggagcgtggtacgtagagttttaggcgcggagttgaggtcgcgcggtcgcgtttggttttagcgggcgtgggattgagtagtttgttgtttttcgatatgtgatttagtttcgtcgtttatgcgggttttcggtcgttcggttttgcggtcgttgtcgttgtcgtcgttgttgttgttgtttttggcggcgttttggggacgggtaggtaggtgggtcgcgtcgttaggtgcgggtcggggatgtttttaggtcggggtttcgttaggtagagttcgaggtcgagttttttttttttgttcgtcggttaggtttcgttttcgggcgggtagaggacgaggtgcgcggaggtcggagtttttagtttcggggttgtagggagttcgggggatattcgtcgtcgtttcgcgtattttggttcggggttaagtttgtaggatttcgcgtttcgtattttcggtttcgagaattgaggtggggtggggggagttcggtggggggtgcgttttgcgcggtgtttatagtttatgatttgcggtcggggacggttattatgcggggtttttcgtcggttagttttaggttttcgttattatcgtcgcggtcgcgcggaggggtttttgtggatgtcgcgtttcggtcgtcgggtttcgtagttttgtaagtcgcgcgtcgcgagattcgcgttttaaaagttaaatttttcgaaagggttagtttcgaaggaatatgatttagaaagacgtagttttttaaagtaagttttttttgttttgggtacgtcgttgttttttttgtagttatgattatg

SEQ ID NO: 28710 - DNA, 939 bp, Artificial Sequence
  chemically treated genomic DNA (Homo sapiens) CpG-island No: 28710
cataatcataactacaaaaaaaacaacgacgtacccaaaacaaaaaaaacttactttaaaaaactacgtctttctaaatcatattccttcgaaactaaccctttcgaaaaatttaacttttaaaacgcgaatctcgcgacgcgcgacttacaaaactacgaaacccgacgaccgaaacgcgacatccacaaaaacccctccgcgcgaccgcgacgataataacgaaaacctaaaactaaccgacgaaaaaccccgcataataaccgtccccgaccgcaaatcataaactataaacaccgcgcaaaacgcaccccccaccgaactccccccaccccacctcaattctcgaaaccgaaaatacgaaacgcgaaatcctacaaacttaaccccgaaccaaaatacgcgaaacgacgacgaatatcccccgaactccctacaaccccgaaactaaaaactccgacctccgcgcacctcgtcctctacccgcccgaaaacgaaacctaaccgacgaacaaaaaaaaaaaactcgacctcgaactctacctaacgaaaccccgacctaaaaacatccccgacccgcacctaacgacgcgacccacctacctacccgtccccaaaacgccgccaaaaacaacaacaacaacgacgacaacgacaacgaccgcaaaaccgaacgaccgaaaacccgcataaacgacgaaactaaatcacatatcgaaaaacaacaaactactcaatcccacgcccgctaaaaccaaacgcgaccgcgcgacctcaactccgcgcctaaaactctacgtaccacgctccaaacgacctaaatcccaaaacgcctccgccacaaccgcgtcccccaaacttccccaaaaaccaaaaacgaacgactcgcgaaacccccacgcgcgctcccccgactacccaactaaataacaacgcgaa

SEQ ID NO: 28711 - DNA, 939 bp, Artificial Sequence
  chemically treated genomic DNA (Homo sapiens) CpG-island No: 28711
tatggttataattgtaaaggaaataacggcgtatttaggatagggggagtttattttaagaagttgcgtttttttggattatgttttttcggggttgattttttcggggagtttggtttttaaagcgcggatttcgcgacgcgcggtttgtaggattgcggggttcggcggtcgagacgcggtatttataggggttttttcgcgcggtcgcggcggtggtggcgggaatttgggattggtcggcgaggggtttcgtatggtaatcgttttcgatcgtaagttataggttgtgggtatcgcgtagagcgtattttttatcgaattttttttattttattttaattttcgagatcgaaagtgcggagcgcggagttttgtaaatttgatttcgagttaaggtgcgcgaggcgacggcgagtgtttttcgggttttttgtagtttcggggttggaagtttcggttttcgcgtatttcgttttttgttcgttcgaaagcgaaatttggtcggcgggtaggaggggagagttcggtttcgagttttgtttggcggggtttcggtttggaggtattttcgattcgtatttggcggcgcgatttatttatttgttcgtttttaaggcgtcgttaggagtaatagtagtagcggcggtagcggtagcggtcgtagggtcgggcggtcgggagttcgtatgggcggcggggttgggttatatgtcggggggtagtagattgtttagttttacgttcgttggggttaagcgcggtcgcgcggttttagtttcgcgtttggggttttgcgtgttacgttttaggcgatttgagttttagggcgttttcgttatagtcgcgttttttaggtttttttagaaattaagggcgagcgattcgcggagtttttacgcgcgttttttcggttatttagttggatggtagcgcgag

SEQ ID NO: 28712 - DNA, 939 bp, Artificial Sequence
  chemically treated genomic DNA (Homo sapiens) CpG-island No: 28712
ctcgcgctaccatccaactaaataaccgaaaaaacgcgcgtaaaaactccgcgaatcgctcgcccttaatttctaaaaaaacctaaaaaacgcgactataacgaaaacgccctaaaactcaaatcgcctaaaacgtaacacgcaaaaccccaaacgcgaaactaaaaccgcgcgaccgcgcttaaccccaacgaacgtaaaactaaacaatctactaccccccgacatataacccaaccccgccgcccatacgaactcccgaccgcccgaccctacgaccgctaccgctaccgccgctactactattactcctaacgacgccttaaaaacgaacaaataaataaatcgcgccgccaaatacgaatcgaaaatacctccaaaccgaaaccccgccaaacaaaactcgaaaccgaactctcccctcctacccgccgaccaaatttcgctttcgaacgaacaaaaaacgaaatacgcgaaaaccgaaacttccaaccccgaaactacaaaaaacccgaaaaacactcgccgtcgcctcgcgcaccttaactcgaaatcaaatttacaaaactccgcgctccgcactttcgatctcgaaaattaaaataaaataaaaaaaattcgataaaaaatacgctctacgcgatacccacaacctataacttacgatcgaaaacgattaccatacgaaacccctcgccgaccaatcccaaattcccgccaccaccgccgcgaccgcgcgaaaaaacccctataaataccgcgtctcgaccgccgaaccccgcaatcctacaaaccgcgcgtcgcgaaatccgcgctttaaaaaccaaactccccgaaaaaatcaaccccgaaaaaacataatccaaaaaaacgcaacttcttaaaataaactccccctatcctaaatacgccgttatttcctttacaattataaccata

SEQ ID NO: 28713 - DNA, 1188 bp, Artificial Sequence
  chemically treated genomic DNA (Homo sapiens) CpG-island No: 28713
tgggcgcggaattgtagttcgtggttttgtttggtttgcggttgttcgtcggttattttaatatcgtttataaggatcgcgttgttagtattaatggcgatatttttaatattttgtttaatcgaattttttatggcggcgttattatcgttagttttagcgcgtcggcggtcgacggttattacgttagttcgtatttttataattcgtcggttttggacgcgggtagtattcgttatattatcgacgcgcgggtgaagaatatttcgcgggtcgagtaggacggtatcgatttcgacgttatttatcgcggcggtttgggcggtagcgtttacgaggtcggtttgagcgggatttatattttgtcgatgacgcgaggcgttatcgtcggcgtttttatggttagtattttggatatagtcggtaattttagcgcgttgcgtttgcgaggtcggttgttttggcggcgtggatcggtggaagtcggtgtttttgttaatttcgtcgatggttatattaattagacggttaattcggtagagtatgttcgtagttggattattatggatttttaggtcgggtatcgttttgatgcggcgttcggttttttgaagtaattgcgtgttagtttcgcggttagtaatttgttcgattaggattcgttttatgcggtgttgcgaatttcgattttcgtcgtcggtttcgacgtcgataaagttagtttcgtcggtcggttgattttcgtgacggtgattaagggatggtgaggttttgggcgttcgttttggtcgttttaatcggcggcgcggtttcggtcgtatcgacgacgatcgatttattggttttgaaagatgttttggcgtcgtttttgttattcgacggacgttacgtcgtttatcggatcgattaggcggatgttatcgttaatcgtagaacggttttttggtggatcgcgttaatcgatcggttagagttttcgcgtcgcgttttcgacggtgggatcgcgatatggtaaagttcgggcggggcggtgatcgaggcgtttatttgggtttttgacggtaaggttttttattttcgtgttttgatcggcggcgtcgtttaggtttggcgtagttttattgaaggcggttaggtcgcgtttattatcgatgacgcggcggacgttcgttttttttaatttttagt

SEQ ID NO: 28714 - DNA, 1188 bp, Artificial Sequence
  chemically treated genomic DNA (Homo sapiens) CpG-island No: 28714
actaaaaattaaaaaaaacgaacgtccgccgcgtcatcgataataaacgcgacctaaccgccttcaataaaactacgccaaacctaaacgacgccgccgatcaaaacacgaaaataaaaaaccttaccgtcaaaaacccaaataaacgcctcgatcaccgccccgcccgaactttaccatatcgcgatcccaccgtcgaaaacgcgacgcgaaaactctaaccgatcgattaacgcgatccaccaaaaaaccgttctacgattaacgataacatccgcctaatcgatccgataaacgacgtaacgtccgtcgaataacaaaaacgacgccaaaacatctttcaaaaccaataaatcgatcgtcgtcgatacgaccgaaaccgcgccgccgattaaaacgaccaaaacgaacgcccaaaacctcaccatcccttaatcaccgtcacgaaaatcaaccgaccgacgaaactaactttatcgacgtcgaaaccgacgacgaaaatcgaaattcgcaacaccgcataaaacgaatcctaatcgaacaaattactaaccgcgaaactaacacgcaattacttcaaaaaaccgaacgccgcatcaaaacgatacccgacctaaaaatccataataatccaactacgaacatactctaccgaattaaccgtctaattaatataaccatcgacgaaattaacaaaaacaccgacttccaccgatccacgccgccaaaacaaccgacctcgcaaacgcaacgcgctaaaattaccgactatatccaaaatactaaccataaaaacgccgacgataacgcctcgcgtcatcgacaaaatataaatcccgctcaaaccgacctcgtaaacgctaccgcccaaaccgccgcgataaataacgtcgaaatcgataccgtcctactcgacccgcgaaatattcttcacccgcgcgtcgataatataacgaatactacccgcgtccaaaaccgacgaattataaaaatacgaactaacgtaataaccgtcgaccgccgacgcgctaaaactaacgataataacgccgccataaaaaattcgattaaacaaaatattaaaaatatcgccattaatactaacaacgcgatccttataaacgatattaaaataaccgacgaacaaccgcaaaccaaacaaaaccacgaactacaattccgcgccca

SEQ ID NO: 28715 - DNA, 1188 bp, Artificial Sequence
  chemically treated genomic DNA (Homo sapiens) CpG-island No: 28715
gttgaaagttggaaggagcggacgttcgtcgcgttatcggtgatgggcgcggtttggtcgtttttaatagggttgcgttagatttggacggcgtcgtcgattagagtacgaaagtaaaaggttttgtcgttaggggtttaggtgggcgtttcgattatcgtttcgttcgagttttgttatatcgcgattttatcgtcggaaacgcggcgcgggggttttgatcgatcggttggcgcgatttattaggaagtcgttttgcggttggcggtgatattcgtttgatcgattcgataggcgacgtagcgttcgtcgggtgatagggacggcgttaggatattttttagggttagtaggtcggtcgtcgtcggtgcggtcgaagtcgcgtcgtcgattagggcgattaagacgagcgtttagagttttattattttttggttatcgttacggagattaatcggtcgacgggattggttttgtcggcgtcgaagtcgacggcggaggtcggggttcgtagtatcgtatagggcgggttttggtcgaatagattgttggtcgcgaggttgatacgtagttgttttaagggatcggacgtcgtattaaagcgatattcgatttgaagatttatggtggtttagttgcgaatatgttttgtcggattgatcgtttggttggtatagttatcgacgaagttgataaaggtatcgatttttatcggtttacgtcgttaggataatcgatttcgtagacgtagcgcgttgggattgtcgattgtgtttagaatgttggttatgggagcgtcggcggtgacgtttcgcgttatcgataggatgtaggtttcgtttaggtcggtttcgtagacgttgtcgtttaggtcgtcgcgataggtggcgtcgaagtcgatgtcgttttgttcgattcgcgagatgttttttattcgcgcgtcgatgatgtagcggatgttgttcgcgtttagggtcgacggattatagaagtacgggttggcgtagtagtcgtcgatcgtcgacgcgttgggattggcggtgatgacgtcgttatagagggttcggttgagtaaggtattgaaaatgtcgttattgatgttggtaacgcgatttttgtaggcggtgttgaagtagtcgacggataatcgtagattaggtagggttacgggttgtaatttcgcgttta

SEQ ID NO: 28716 - DNA, 1188 bp, Artificial Sequence
  chemically treated genomic DNA (Homo sapiens) CpG-island No: 28716
taaacgcgaaattacaacccgtaaccctacctaatctacgattatccgtcgactacttcaacaccgcctacaaaaatcgcgttaccaacatcaataacgacattttcaataccttactcaaccgaaccctctataacgacgtcatcaccgccaatcccaacgcgtcgacgatcgacgactactacgccaacccgtacttctataatccgtcgaccctaaacgcgaacaacatccgctacatcatcgacgcgcgaataaaaaacatctcgcgaatcgaacaaaacgacatcgacttcgacgccacctatcgcgacgacctaaacgacaacgtctacgaaaccgacctaaacgaaacctacatcctatcgataacgcgaaacgtcaccgccgacgctcccataaccaacattctaaacacaatcgacaatcccaacgcgctacgtctacgaaatcgattatcctaacgacgtaaaccgataaaaatcgatacctttatcaacttcgtcgataactataccaaccaaacgatcaatccgacaaaacatattcgcaactaaaccaccataaatcttcaaatcgaatatcgctttaatacgacgtccgatcccttaaaacaactacgtatcaacctcgcgaccaacaatctattcgaccaaaacccgccctatacgatactacgaaccccgacctccgccgtcgacttcgacgccgacaaaaccaatcccgtcgaccgattaatctccgtaacgataaccaaaaaataataaaactctaaacgctcgtcttaatcgccctaatcgacgacgcgacttcgaccgcaccgacgacgaccgacctactaaccctaaaaaatatcctaacgccgtccctatcacccgacgaacgctacgtcgcctatcgaatcgatcaaacgaatatcaccgccaaccgcaaaacgacttcctaataaatcgcgccaaccgatcgatcaaaacccccgcgccgcgtttccgacgataaaatcgcgatataacaaaactcgaacgaaacgataatcgaaacgcccacctaaacccctaacgacaaaaccttttactttcgtactctaatcgacgacgccgtccaaatctaacgcaaccctattaaaaacgaccaaaccgcgcccatcaccgataacgcgacgaacgtccgctccttccaactttcaac

SEQ ID NO: 28717 - DNA, 1053 bp, Artificial Sequence
  chemically treated genomic DNA (Homo sapiens) CpG-island No: 28717
gcgcgttcgtttgcgcgttagggcgttcgtttggtttagtttcgtttgtatcgttttttagaagcgttagtagcgtcgggcgttcgggttcgtttcgcgcgcgtcgcgggcgcggtcgtcgtcgggttcgggtaatagtttttcggttagggcgtttaggattagtagttttttttttacgcggtcggattttagggacgttttaggcgcggttagttcgttttatacggttcgtagcgtcgtttcgttatattggattagtattggtagtagtcgttcggttattagcgtcgtcgcgttttcggtaggttcggttttattttcgttttcgttttcgtttagcgttagggcgacggcggttttcgttacgcgttttagtagcggttcgttttcgcggggtcgtaaatatggttcgacggttgttagtatttttacggtagtttcggcgttaggcgcgcgttattcggcgagtagatcgcgtagcgtttttttagttagcgcggtcgttagttgcggacgttcggttaggcggacgtacgagcgtagggtcgcgttcgtcgtttttagtacgcgtcggcggtggcgaggttgtagattggggttcgggtcgttcgcggggcgttcgcgtaggtttcgtagtagtggtacgaggtattttgtagttatttcgcgcgtcgttttcgggagcgcgtttgcgttttcgttgtcgcgcgttttttcgttttcgagtcgttgtagaaggaagcgtagcgtttttacgcgtttcgcggatgtttttttttggtatagcgttttaagtagggttcgggggtttcggttttgcgagagtagcgttttcgcgagtatttattttatttgtcgagcgttcgcgttatcggttcgggtttttaaaggaaggcgtcggcgtgtgcgatgcgtgcgtataggatcggtcggtttttacgtgcgcgtgcgtcgacggagtcgggcgcgcggtcgtagagagggggattttagttcggtttggtgtagtttagttttttttgggtttttgttattaattttgtttagata

SEQ ID NO: 28718 - DNA, 1053 bp, Artificial Sequence
  chemically treated genomic DNA (Homo sapiens) CpG-island No: 28718
tatctaaacaaaattaataacaaaaacccaaaaaaaactaaactacaccaaaccgaactaaaatccccctctctacgaccgcgcgcccgactccgtcgacgcacgcgcacgtaaaaaccgaccgatcctatacgcacgcatcgcacacgccgacgccttcctttaaaaacccgaaccgataacgcgaacgctcgacaaataaaataaatactcgcgaaaacgctactctcgcaaaaccgaaacccccgaaccctacttaaaacgctataccaaaaaaaaacatccgcgaaacgcgtaaaaacgctacgcttccttctacaacgactcgaaaacgaaaaaacgcgcgacaacgaaaacgcaaacgcgctcccgaaaacgacgcgcgaaataactacaaaatacctcgtaccactactacgaaacctacgcgaacgccccgcgaacgacccgaaccccaatctacaacctcgccaccgccgacgcgtactaaaaacgacgaacgcgaccctacgctcgtacgtccgcctaaccgaacgtccgcaactaacgaccgcgctaactaaaaaaacgctacgcgatctactcgccgaataacgcgcgcctaacgccgaaactaccgtaaaaatactaacaaccgtcgaaccatatttacgaccccgcgaaaacgaaccgctactaaaacgcgtaacgaaaaccgccgtcgccctaacgctaaacgaaaacgaaaacgaaaataaaaccgaacctaccgaaaacgcgacgacgctaataaccgaacgactactaccaatactaatccaatataacgaaacgacgctacgaaccgtataaaacgaactaaccgcgcctaaaacgtccctaaaatccgaccgcgtaaaaaaaaaactactaatcctaaacgccctaaccgaaaaactattacccgaacccgacgacgaccgcgcccgcgacgcgcgcgaaacgaacccgaacgcccgacgctactaacgcttctaaaaaacgatacaaacgaaactaaaccaaacgaacgccctaacgcgcaaacgaacgcgc

SEQ ID NO: 28719 - DNA, 1053 bp, Artificial Sequence
  chemically treated genomic DNA (Homo sapiens) CpG-island No: 28719
tatttaggtagggttggtggtaggaatttaagggaagttgagttgtattaagtcgggttgggatttttttttttgcggtcgcgcgttcggtttcgtcggcgtacgcgtacgtaggggtcggtcggttttgtgcgtacgtatcgtatacgtcggcgtttttttttgggagttcgggtcggtggcgcgggcgttcggtaaatggagtgggtgttcgcggaagcgttgttttcgtagagtcgggattttcgggttttgtttggggcgttgtgttaaggggaggtattcgcggagcgcgtggagacgttgcgtttttttttgtagcggttcgaggacgaggaggcgcgcggtagcgggggcgtaggcgcgttttcggaggcggcgcgcgaggtggttgtagggtatttcgtgttattgttgcggagtttgcgcggacgtttcgcgggcggttcggattttagtttgtagtttcgttatcgtcggcgcgtgttgagggcggcgggcgcggttttgcgttcgtgcgttcgtttggtcgggcgttcgtagttggcggtcgcgttggttgaggaggcgttgcgcgatttgttcgtcgggtggcgcgcgtttggcgtcgaggttgtcgtggaagtgttagtagtcgtcgggttatgtttgcggtttcgcgaggacgggtcgttattggagcgcgtggcggggatcgtcgtcgttttggcgttgggcgggggcggggacggggatgaggtcgggtttgtcgaggacgcggcggcgttggtggtcgggcgattgttgttagtgttggtttaatgtggcggggcggcgttgcgggtcgtgtggggcgggttggtcgcgtttggggcgtttttggggttcggtcgcgtagaggagaagttgttggttttgagcgttttggtcgagaagttgttgttcgagttcggcggcgatcgcgttcgcggcgcgcgcgaggcgggttcggacgttcggcgttgttggcgtttttggaggacggtgtaggcggggttgggttaggcggacgttttgacgcgtaagcgagcgcgt

SEQ ID NO: 28720 - DNA, 1053 bp, Artificial Sequence
  chemically treated genomic DNA (Homo sapiens) CpG-island No: 28720
acgcgctcgcttacgcgtcaaaacgtccgcctaacccaaccccgcctacaccgtcctccaaaaacgccaacaacgccgaacgtccgaacccgcctcgcgcgcgccgcgaacgcgatcgccgccgaactcgaacaacaacttctcgaccaaaacgctcaaaaccaacaacttctcctctacgcgaccgaaccccaaaaacgccccaaacgcgaccaacccgccccacacgacccgcaacgccgccccgccacattaaaccaacactaacaacaatcgcccgaccaccaacgccgccgcgtcctcgacaaacccgacctcatccccgtccccgcccccgcccaacgccaaaacgacgacgatccccgccacgcgctccaataacgacccgtcctcgcgaaaccgcaaacataacccgacgactactaacacttccacgacaacctcgacgccaaacgcgcgccacccgacgaacaaatcgcgcaacgcctcctcaaccaacgcgaccgccaactacgaacgcccgaccaaacgaacgcacgaacgcaaaaccgcgcccgccgccctcaacacgcgccgacgataacgaaactacaaactaaaatccgaaccgcccgcgaaacgtccgcgcaaactccgcaacaataacacgaaataccctacaaccacctcgcgcgccgcctccgaaaacgcgcctacgcccccgctaccgcgcgcctcctcgtcctcgaaccgctacaaaaaaaaacgcaacgtctccacgcgctccgcgaatacctccccttaacacaacgccccaaacaaaacccgaaaatcccgactctacgaaaacaacgcttccgcgaacacccactccatttaccgaacgcccgcgccaccgacccgaactcccaaaaaaaaacgccgacgtatacgatacgtacgcacaaaaccgaccgacccctacgtacgcgtacgccgacgaaaccgaacgcgcgaccgcaaaaaaaaaaatcccaacccgacttaatacaactcaacttcccttaaattcctaccaccaaccctacctaaata

SEQ ID NO: 28721 - DNA, 744 bp, Artificial Sequence
  chemically treated genomic DNA (Homo sapiens) CpG-island No: 28721
gtttcgcgggttaggagcgtagcggtttcggacgtttggtcgttgatcgttaggcgtcgcgagttttcggggcgtgggtaagcggagtggtagttagtttgggaaatttgggtttagattttggtcgcgtttagtttcgttggtttttcgcgtcgtttgcgttcgttaggttttgttcgatagtatcgcgttgggttttgtttgagcgttagtttttcggtttttagtcgagaggtcgtttttatagttatttttattgatttttttttcgcggagtttttgacgttcgcgcggtatcgaagttttttttttcgtttttcgatgaaatttttttttacgcgttttcgttttgtttaagtggggcgggggttttgtgttcgggtcggatcggggcgggttttggcggcggttttgggagacgtagatttgagttcgcggagttcgggtgcgtagagtttcgttcgtagtagttaggtgagggcgttggaggttaggattcggtggagcggtcgcggcggatcgcggagagtaagttttcgggtttttaggagtcgggtcgttcgtgtttcgttcgcgtttcggggcgttttgcgaggtaaagaggtagtggaggataggagaaaaggtttgcgtttgttatagaatcgtcgcgagtcggggttttaggttaaggtttaggatttttttttaatttagtagtaaaagagtgtttcgagaaagagattttggtattggtttattagt

SEQ ID NO: 28722 - DNA, 744 bp, Artificial Sequence
  chemically treated genomic DNA (Homo sapiens) CpG-island No: 28722
actaataaaccaataccaaaatctctttctcgaaacactcttttactactaaattaaaaaaaaatcctaaaccttaacctaaaaccccgactcgcgacgattctataacaaacgcaaaccttttctcctatcctccactacctctttacctcgcaaaacgccccgaaacgcgaacgaaacacgaacgacccgactcctaaaaacccgaaaacttactctccgcgatccgccgcgaccgctccaccgaatcctaacctccaacgccctcacctaactactacgaacgaaactctacgcacccgaactccgcgaactcaaatctacgtctcccaaaaccgccgccaaaacccgccccgatccgacccgaacacaaaacccccgccccacttaaacaaaacgaaaacgcgtaaaaaaaaatttcatcgaaaaacgaaaaaaaaaacttcgataccgcgcgaacgtcaaaaactccgcgaaaaaaaaatcaataaaaataactataaaaacgacctctcgactaaaaaccgaaaaactaacgctcaaacaaaacccaacgcgatactatcgaacaaaacctaacgaacgcaaacgacgcgaaaaaccaacgaaactaaacgcgaccaaaatctaaacccaaatttcccaaactaactaccactccgcttacccacgccccgaaaactcgcgacgcctaacgatcaacgaccaaacgtccgaaaccgctacgctcctaacccgcgaaac

SEQ ID NO: 28723 - DNA, 744 bp, Artificial Sequence
  chemically treated genomic DNA (Homo sapiens) CpG-island No: 28723
attgataggttaatattaaaatttttttttcggggtatttttttgttgttgagttaaaaagagattttgagttttagtttgggatttcgattcgcggcgattttgtggtaggcgtagatttttttttttgttttttattgtttttttgtttcgtagggcgtttcggggcgcgagcggggtacgggcgattcggtttttggaggttcggggatttgtttttcgcggttcgtcgcggtcgttttatcgagttttggtttttagcgtttttatttggttgttgcgggcgggattttgcgtattcgggtttcgcgggtttaggtttgcgttttttagagtcgtcgttagagttcgtttcggttcggttcgggtatagggttttcgttttatttgggtaaggcgggggcgcgtggagggaagttttatcggggggcgagggagggagtttcggtgtcgcgcgggcgttaggggtttcgcgggggaggagttagtaaaagtggttataaaagcggtttttcggttgagggtcggggagttagcgtttaagtagagtttagcgcggtgttatcggatagagtttggcgagcgtaagcggcgcggggagttagcggggttgagcgcggttagggtttgaatttagattttttagattagttattatttcgtttgtttacgtttcgggagttcgcggcgtttggcggttagcgattagacgttcggggtcgttgcgtttttggttcgcgaggt

SEQ ID NO: 28724 - DNA, 744 bp, Artificial Sequence
  chemically treated genomic DNA (Homo sapiens) CpG-island No: 28724
acctcgcgaaccaaaaacgcaacgaccccgaacgtctaatcgctaaccgccaaacgccgcgaactcccgaaacgtaaacaaacgaaataataactaatctaaaaaatctaaattcaaaccctaaccgcgctcaaccccgctaactccccgcgccgcttacgctcgccaaactctatccgataacaccgcgctaaactctacttaaacgctaactccccgaccctcaaccgaaaaaccgcttttataaccacttttactaactcctcccccgcgaaacccctaacgcccgcgcgacaccgaaactccctccctcgccccccgataaaacttccctccacgcgcccccgccttacccaaataaaacgaaaaccctatacccgaaccgaaccgaaacgaactctaacgacgactctaaaaaacgcaaacctaaacccgcgaaacccgaatacgcaaaatcccgcccgcaacaaccaaataaaaacgctaaaaaccaaaactcgataaaacgaccgcgacgaaccgcgaaaaacaaatccccgaacctccaaaaaccgaatcgcccgtaccccgctcgcgccccgaaacgccctacgaaacaaaaaaacaataaaaaacaaaaaaaaaaatctacgcctaccacaaaatcgccgcgaatcgaaatcccaaactaaaactcaaaatctctttttaactcaacaacaaaaaaataccccgaaaaaaaaattttaatattaacctatcaat

SEQ ID NO: 28725 - DNA, 733 bp, Artificial Sequence
  chemically treated genomic DNA (Homo sapiens) CpG-island No: 28725
tttttgggttattagcgacgttttttaagcgggtcgagcggaggcgcgttcgcgatttaggggtagcgtgtcgagttcgggcgtgggggggcgtggtttttttattcggcgattttcggttatcgtttatttcgcgcgtgggggcgtgcgcgattgcggggcgcggagaggggtgatttcggattattttaggcgttcgtagtacgttttgtatatagacgcgaggcgttgttttgaggtgatatcggttgtacggtataagtagtaggcgtcgtcgattaattagttcgtatcgaggattttttttggtgcgtggtttagttttttttaggacgggttttaatttttttttgatatcgttttttttatcgttacgtttcgaggtttttttcggggaagtttcgcgtttttttttcgcggtttcgggtcgtacgcgcgcgatttttcgattttataggcggttcgcgtcgcgggtgggggcggggcgcgcggggagggggttggcggtcgttaggggaggggggtcggggttcggggggcggaggagggtcggcgtggggagtttttcgttcgcggattatacgtttcgcgggttaatttcgagttagtttttagtagtgtcgtacgcgggatacgtttaagcgtttgttggtacggttagtgagggggagggggcgaggaggagggaggggagttgagtgataggttttgcggggtaggttgggaattgtag

SEQ ID NO: 28726 - DNA, 733 bp, Artificial Sequence
  chemically treated genomic DNA (Homo sapiens) CpG-island No: 28726
ctacaattcccaacctaccccgcaaaacctatcactcaactcccctccctcctcctcgccccctccccctcactaaccgtaccaacaaacgcttaaacgtatcccgcgtacgacactactaaaaactaactcgaaattaacccgcgaaacgtataatccgcgaacgaaaaactccccacgccgaccctcctccgccccccgaaccccgacccccctcccctaacgaccgccaaccccctccccgcgcgccccgcccccacccgcgacgcgaaccgcctataaaatcgaaaaatcgcgcgcgtacgacccgaaaccgcgaaaaaaaaacgcgaaacttccccgaaaaaaacctcgaaacgtaacgataaaaaaaacgatatcaaaaaaaaattaaaacccgtcctaaaaaaaactaaaccacgcaccaaaaaaaatcctcgatacgaactaattaatcgacgacgcctactacttataccgtacaaccgatatcacctcaaaacaacgcctcgcgtctatatacaaaacgtactacgaacgcctaaaataatccgaaatcacccctctccgcgccccgcaatcgcgcacgcccccacgcgcgaaataaacgataaccgaaaatcgccgaataaaaaaaccacgcccccccacgcccgaactcgacacgctacccctaaatcgcgaacgcgcctccgctcgacccgcttaaaaaacgtcgctaataacccaaaaa

SEQ ID NO: 28727 - DNA, 733 bp, Artificial Sequence
  chemically treated genomic DNA (Homo sapiens) CpG-island No: 28727
ttataatttttagtttgtttcgtaaagtttgttatttaatttttttttttttttttcgtttttttttttttattggtcgtgttaataaacgtttggacgtgtttcgcgtgcgatattgttagaggttggttcgggattggttcgcggagcgtgtggttcgcgagcgaggaattttttacgtcggttttttttcgtttttcgggtttcggttttttttttttggcggtcgttagtttttttttcgcgcgtttcgtttttattcgcggcgcgaatcgtttgtggaatcgaggaatcgcgcgcgtgcggttcggagtcgcgggggagggacgcgaggttttttcggggaaggtttcggagcgtggcggtgaggggggcggtgttagggaggggttggagttcgttttaaggaaaattgggttacgtattaagaggaattttcggtgcgaattagttgatcggcggcgtttgttgtttgtgtcgtgtagtcggtgttattttaggatagcgtttcgcgtttgtgtatagagcgtgttgcgggcgtttagggtagttcgaggttattttttttcgcgtttcgtagtcgcgtacgtttttacgcgcggggtgggcggtggtcgggggtcgtcgagtggaaaggttacgtttttttacgttcgggttcggtacgttgtttttgggtcgcgaacgcgttttcgttcgattcgtttggaggacgtcgttggtggtttaggag

SEQ ID NO: 28728 - DNA, 733 bp, Artificial Sequence
  chemically treated genomic DNA (Homo sapiens) CpG-island No: 28728
ctcctaaaccaccaacgacgtcctccaaacgaatcgaacgaaaacgcgttcgcgacccaaaaacaacgtaccgaacccgaacgtaaaaaaacgtaacctttccactcgacgacccccgaccaccgcccaccccgcgcgtaaaaacgtacgcgactacgaaacgcgaaaaaaaataacctcgaactaccctaaacgcccgcaacacgctctatacacaaacgcgaaacgctatcctaaaataacaccgactacacgacacaaacaacaaacgccgccgatcaactaattcgcaccgaaaattcctcttaatacgtaacccaattttccttaaaacgaactccaacccctccctaacaccgcccccctcaccgccacgctccgaaaccttccccgaaaaaacctcgcgtccctcccccgcgactccgaaccgcacgcgcgcgattcctcgattccacaaacgattcgcgccgcgaataaaaacgaaacgcgcgaaaaaaaaactaacgaccgccaaaaaaaaaaaaccgaaacccgaaaaacgaaaaaaaaccgacgtaaaaaattcctcgctcgcgaaccacacgctccgcgaaccaatcccgaaccaacctctaacaatatcgcacgcgaaacacgtccaaacgtttattaacacgaccaataaaaaaaaaaaaacgaaaaaaaaaaaaaaaaattaaataacaaactttacgaaacaaactaaaaattataa

SEQ ID NO: 28729 - DNA, 522 bp, Artificial Sequence
  chemically treated genomic DNA (Homo sapiens) CpG-island No: 28729
  unsure (493, 499, 521)
ggtacgttcgtttcggatgtagttataaagtaaatggggtagaatttggacgagaatcgtatttcgttttttatttcggatttcgttgaggtggagagtagcgtggggtgggtttttttttttattgcgggcgtttagcggatcgtgttttcgagttcgggcgttcggttgtaagttcgtggttggcggcggttgcgggaggtacggtacgagttaatgtatcgggagtagagtcggtgttttcgacgttttcgagtcggttgcgaaagggacggttcgcgggggtcgcggtaggttgggtcggggttgggcgggcgggcgcgcgcgcgcggtttatagggggtatatttcgggttttaggcgggcgcgcgaggcgggtatcggtttattcgggtcggtttgtaggcgggtaggagggcgggtggggcgcgggggtggcgcggtttgcggggcgcggggaggggagagcgcgcggggagggggtgggagcggnggcggnggcgtgggcgtgtcggggaggng

SEQ ID NO: 28730 - DNA, 522 bp, Artificial Sequence
  chemically treated genomic DNA (Homo sapiens) CpG-island No: 28730
  unsure (2, 24, 30)
cncctccccgacacgcccacgccnccgccnccgctcccaccccctccccgcgcgctctcccctccccgcgccccgcaaaccgcgccacccccgcgccccacccgccctcctacccgcctacaaaccgacccgaataaaccgatacccgcctcgcgcgcccgcctaaaacccgaaatataccccctataaaccgcgcgcgcgcgcccgcccgcccaaccccgacccaacctaccgcgacccccgcgaaccgtccctttcgcaaccgactcgaaaacgtcgaaaacaccgactctactcccgatacattaactcgtaccgtacctcccgcaaccgccgccaaccacgaacttacaaccgaacgcccgaactcgaaaacacgatccgctaaacgcccgcaataaaaaaaaaaacccaccccacgctactctccacctcaacgaaatccgaaataaaaaacgaaatacgattctcgtccaaattctaccccatttactttataactacatccgaaacgaacgtacc

SEQ ID NO: 28731 - DNA, 522 bp, Artificial Sequence
  chemically treated genomic DNA (Homo sapiens) CpG-island No: 28731
  unsure (2, 24, 30)
tnttttttcggtacgtttacgttntcgttntcgtttttatttttttttcgcgcgttttttttttttcgcgtttcgtaggtcgcgttattttcgcgttttattcgtttttttgttcgtttgtaagtcggttcgggtagatcggtgttcgtttcgcgcgttcgtttagagttcggagtatgttttttataggtcgcgcgcgcgcgttcgttcgtttagtttcggtttagtttgtcgcgattttcgcgggtcgtttttttcgtagtcggttcgaggacgtcgggaatatcggttttgttttcggtgtattaattcgtgtcgtgtttttcgtagtcgtcgttagttacgggtttgtagtcggacgttcggattcggagatacgattcgttgaacgttcgtaataagaaagaaaatttattttacgttgttttttattttaacgaggttcggaatgggaggcggggtgcggttttcgtttaagttttattttatttgttttgtggttgtattcgaaacggacgtgtt

SEQ ID NO: 28732 - DNA, 522 bp, Artificial Sequence
  chemically treated genomic DNA (Homo sapiens) CpG-island No: 28732
  unsure (493, 499, 521)
aacacgtccgtttcgaatacaaccacaaaacaaataaaataaaacttaaacgaaaaccgcaccccgcctcccattccgaacctcgttaaaataaaaaacaacgtaaaataaattttctttcttattacgaacgttcaacgaatcgtatctccgaatccgaacgtccgactacaaacccgtaactaacgacgactacgaaaaacacgacacgaattaatacaccgaaaacaaaaccgatattcccgacgtcctcgaaccgactacgaaaaaaacgacccgcgaaaatcgcgacaaactaaaccgaaactaaacgaacgaacgcgcgcgcgcgacctataaaaaacatactccgaactctaaacgaacgcgcgaaacgaacaccgatctacccgaaccgacttacaaacgaacaaaaaaacgaataaaacgcgaaaataacgcgacctacgaaacgcgaaaaaaaaaaaacgcgcgaaaaaaaaataaaaacganaacganaacgtaaacgtaccgaaaaaana

SEQ ID NO: 28733 - DNA, 625 bp, Artificial Sequence
  chemically treated genomic DNA (Homo sapiens) CpG-island No: 28733
gttggcgattgcggacgcgaaggatatgttttgttaagggttggtttgcgtatttataggttttcgtaagaattgattggttttaatttttggagtggtgaattcgttagcgaggtgtcgtcggtttttatttaagtcgaggtggttcggttttatgtatcgcgacgtaacgcggggaggtagataaggtatagggcggtgtttataatttatgttaattcgttttatgtgttcgtcgagcggtataaatcgtcgcgacgattatgcggtttaatgatcgaagttaggttggttagagacgcgtagcgatttttgaagttgtttttgatggtcgttatttatttgtttggatagtattgttttgtaacgcgggttatttcgatgttttcggaagcgagaagaattatattgtggaagttatttagtttttcgtcgcgaacgtttttaagatttaattttatcgcgtttgtcggtatgttcgcggatatgggttttttttttttcgaaatttttgttggtcggattatcgaataaagttttgattaaggtttgttaatatttaaatttcgtttgttataggtcggtttttgttgcgtttttaataaatacggttttttcgaaaatg

SEQ ID NO: 28734 - DNA, 625 bp, Artificial Sequence
  chemically treated genomic DNA (Homo sapiens) CpG-island No: 28734
cattttcgaaaaaaccgtatttattaaaaacgcaacaaaaaccgacctataacaaacgaaatttaaatattaacaaaccttaatcaaaactttattcgataatccgaccaacaaaaatttcgaaaaaaaaaaaacccatatccgcgaacataccgacaaacgcgataaaattaaatcttaaaaacgttcgcgacgaaaaactaaataacttccacaatataattcttctcgcttccgaaaacatcgaaataacccgcgttacaaaacaatactatccaaacaaataaataacgaccatcaaaaacaacttcaaaaatcgctacgcgtctctaaccaacctaacttcgatcattaaaccgcataatcgtcgcgacgatttataccgctcgacgaacacataaaacgaattaacataaattataaacaccgccctataccttatctacctccccgcgttacgtcgcgatacataaaaccgaaccacctcgacttaaataaaaaccgacgacacctcgctaacgaattcaccactccaaaaattaaaaccaatcaattcttacgaaaacctataaatacgcaaaccaacccttaacaaaacatatccttcgcgtccgcaatcgccaac

SEQ ID NO: 28735 - DNA, 625 bp, Artificial Sequence
  chemically treated genomic DNA (Homo sapiens) CpG-island No: 28735
tattttcggagaggtcgtatttgttggaggcgtaataaagatcggtttgtagtaagcggaatttgaatattggtaggttttggttagagttttgttcggtggttcgattaataaaggtttcggggaagaagaagtttatattcgcgggtatgtcggtaaacgcgatgggattaggttttgggggcgttcgcgacgagaggttggatggtttttataatatgatttttttcgttttcggaggtatcgggatggttcgcgttgtaaggtaatgttgtttaggtaggtagatgacgattattagggatagttttaaggatcgttgcgcgtttttaattagtttaatttcgattattgggtcgtatgatcgtcgcggcgatttatgtcgttcggcgagtatatggaacgggttggtatggattgtaggtatcgttttatattttgtttgttttttcgcgttgcgtcgcggtgtatggagtcgggttatttcgatttgaatggaagtcggcggtatttcgttaacggatttattattttaagaattggagttaattaatttttgcggagatttgtgaatgcgtaaattaatttttggtagaatatatttttcgcgttcgtaatcgttagt

SEQ ID NO: 28736 - DNA, 625 bp, Artificial Sequence
  chemically treated genomic DNA (Homo sapiens) CpG-island No: 28736
actaacgattacgaacgcgaaaaatatattctaccaaaaattaatttacgcattcacaaatctccgcaaaaattaattaactccaattcttaaaataataaatccgttaacgaaataccgccgacttccattcaaatcgaaataacccgactccatacaccgcgacgcaacgcgaaaaaacaaacaaaatataaaacgatacctacaatccataccaacccgttccatatactcgccgaacgacataaatcgccgcgacgatcatacgacccaataatcgaaattaaactaattaaaaacgcgcaacgatccttaaaactatccctaataatcgtcatctacctacctaaacaacattaccttacaacgcgaaccatcccgatacctccgaaaacgaaaaaaatcatattataaaaaccatccaacctctcgtcgcgaacgcccccaaaacctaatcccatcgcgtttaccgacatacccgcgaatataaacttcttcttccccgaaacctttattaatcgaaccaccgaacaaaactctaaccaaaacctaccaatattcaaattccgcttactacaaaccgatctttattacgcctccaacaaatacgacctctccgaaaata

SEQ ID NO: 28737 - DNA, 706 bp, Artificial Sequence
  chemically treated genomic DNA (Homo sapiens) CpG-island No: 28737
tgattgggaaaattttggcgttatttaatttaatcgttttgtaatatatgatttttttttttcgttcgtttttttatttaataggttttttttttttttttttttttttatttttttttttttttacgttcgtacgattttttgtgcgtttttttttttttttttcgtttttttttttttttttatttatttatttttttcgtgtttttatttattttgttttaatatttattttttttttttttatttttttttttacgtttttttttttttatttttttttttttttttttttttttattcgttttaattatttttcgtcgtttgttttttttttcgtttttgttttattttttttttttcgatcgttattttttttatcgttatataagtttttttttttcgttcgcgtttacgtttatattttatattcgtacgttcgttatttcgttttttttttcgtatatttatttatatttttacgttatttaattttttttttttttaatattttttttttttattataatttaaatttttattttttatttttattatttttttttttatttcgtatttatattttatgttttatcgttttattatttttttttttttttttgtgttttcgttcgtattcgttttttatttattttcgttttttattttgttatttagttttttttttattttttttcgttattcg

SEQ ID NO: 28738 - DNA, 706 bp, Artificial Sequence
  chemically treated genomic DNA (Homo sapiens) CpG-island No: 28738
cgaataacgaaaaaaaataaaaaaaaaactaaataacaaaataaaaaacgaaaataaataaaaaacgaatacgaacgaaaacacaaaaaaaaaaaaaaaaataataaaacgataaaacataaaatataaatacgaaataaaaaaaaaaataataaaaataaaaaataaaaatttaaattataataaaaaaaaaaaatattaaaaaaaaaaaaaattaaataacgtaaaaatataaataaatatacgaaaaaaaaaacgaaataacgaacgtacgaatataaaatataaacgtaaacgcgaacgaaaaaaaaaaacttatataacgataaaaaaaataacgatcgaaaaaaaaaaaataaaacaaaaacgaaaaaaaaaacaaacgacgaaaaataattaaaacgaataaaaaaaaaaaaaaaaaaaaaaaaataaaaaaaaaaaaacgtaaaaaaaaaaataaaaaaaaaaaaaataaatattaaaacaaaataaataaaaacacgaaaaaaataaataaataaaaaaaaaaaaaaaaacgaaaaaaaaaaaaaaaaacgcacaaaaaatcgtacgaacgtaaaaaaaaaaaaaaataaaaaaaaaaaaaaaaaaaaaaaacctattaaataaaaaaacgaacgaaaaaaaaaaatcatatattacaaaacgattaaattaaataacgccaaaattttcccaatca

SEQ ID NO: 28739 - DNA, 706 bp, Artificial Sequence
  chemically treated genomic DNA (Homo sapiens) CpG-island No: 28739
cgagtggcggaggggggtgagagagaaattgaatgataaaataaagggcgaagatagataaagagcgggtgcggacgaggatataggagaaagggggagggtgatggggcggtgaagtatagggtataggtacggggtagaggaaagggtggtagggatagggagtgaagatttgagttgtagtaggggagggaggtgttgaaggggaggggggttgggtggcgtaggggtgtgagtggatgtgcgagagaaggagcggagtgacgggcgtacgggtatgggatgtgggcgtgggcgcgggcggagaggagagatttatgtagcgatagggaaaataacggtcgagggaaaggaggtgggataaaggcggggggggagatagacgacgggaggtgattggggcgggtaggagggaggagggggggggaggagtaggggggaagaggcgtaggggggggggtgggaggaggaaaggtaggtgttgggataagatgaataaaaatacgagaggggtgggtggatgggggggagggaaggggcggggggagagaaaaggggcgtatagaaggtcgtgcgggcgtggaggggggggggggtggggaggaggggggagggagagggtttgttgggtggaggggcggacggaagaggggggttatgtattgtaaggcgattaagttgggtgacgttagggtttttttagtta

SEQ ID NO: 28740 - DNA, 706 bp, Artificial Sequence
  chemically treated genomic DNA (Homo sapiens) CpG-island No: 28740
taactaaaaaaaccctaacgtcacccaacttaatcgccttacaatacataacccccctcttccgtccgcccctccacccaacaaaccctctccctcccccctcctccccacccccccccccctccacgcccgcacgaccttctatacgccccttttctctccccccgccccttccctcccccccatccacccacccctctcgtatttttattcatcttatcccaacacctacctttcctcctcccacccccccccctacgcctcttcccccctactcctccccccccctcctccctcctacccgccccaatcacctcccgtcgtctatctccccccccgcctttatcccacctcctttccctcgaccgttattttccctatcgctacataaatctctcctctccgcccgcgcccacgcccacatcccatacccgtacgcccgtcactccgctccttctctcgcacatccactcacacccctacgccacccaacccccctccccttcaacacctccctcccctactacaactcaaatcttcactccctatccctaccaccctttcctctaccccgtacctataccctatacttcaccgccccatcaccctccccctttctcctatatcctcgtccgcacccgctctttatctatcttcgccctttattttatcattcaatttctctctcacccccctccgccactcg

SEQ ID NO: 28741 - DNA, 996 bp, Artificial Sequence
  chemically treated genomic DNA (Homo sapiens) CpG-island No: 28741
gtggcggtgggaaggaggaggggttgggggagggcggcggaggtgttgggttcggtcggtttacgagggagttgtagaagagttggtttagattttaattagagttgtcgtcggttttttgtagtcgtcgtagcgttttcgcgaaggaggacgtgtcgattcggttgcgcgtttaaggtagaggttcgcgtcggcgttggttgggcgtgagttgggaggtcgagttgtgagcgcgaagggagttggagagacgattgcggtattttcggtcgtttcggagtatatacgattatcggggttgcgggattaagggtcgcgtcgttcggaggtcgtttttgagcgggtttcgtagtttcgtcgtttagcgttttttggttttttttcgtagttaggttgttaatttattcgggagttcggggtatgaacggttacggttttttttatttgtatatgggcggttcggtgtcgtagtcgttacgggcgtttttgtagcgtacgtttaagtgcgcgcgttgtcgtaattatggcgttttgttttggtttaagggttataagcgttattgtcgttttaaggattgtatttgcgagaagtgtatttttattatcgagcggtagcgggttatggttgcgtaggtggcgttgcgtcggtagtaggttaacgagagtttggagagttttattttcgattcgttgcgcgttttgttagggttttcgtcgtcgggggacgtcgtcgtcgtttcgtagtcgtcgttagttttttagtcgtcgtagtcgtagtcgtcgcgttttgttgtcgagttggtcgcggtcgtcgcgttgcgttggattgtcgagtcgtagttcggggttttgtaggcgtagttcgttaagttaggtaagagcgtttgaggtgcgggagtttggtcgggcgcgggggtaatttcggagtgttagttgtagttttatttgggaggattggaggtaaagttttgggacgtgggtttgtcggggtttttt

SEQ ID NO: 28742 - DNA, 996 bp, Artificial Sequence
  chemically treated genomic DNA (Homo sapiens) CpG-island No: 28742
aaaaaaccccgacaaacccacgtcccaaaactttacctccaatcctcccaaataaaactacaactaacactccgaaattacccccgcgcccgaccaaactcccgcacctcaaacgctcttacctaacttaacgaactacgcctacaaaaccccgaactacgactcgacaatccaacgcaacgcgacgaccgcgaccaactcgacaacaaaacgcgacgactacgactacgacgactaaaaaactaacgacgactacgaaacgacgacgacgtcccccgacgacgaaaaccctaacaaaacgcgcaacgaatcgaaaataaaactctccaaactctcgttaacctactaccgacgcaacgccacctacgcaaccataacccgctaccgctcgataataaaaatacacttctcgcaaatacaatccttaaaacgacaataacgcttataacccttaaaccaaaacaaaacgccataattacgacaacgcgcgcacttaaacgtacgctacaaaaacgcccgtaacgactacgacaccgaaccgcccatatacaaataaaaaaaaccgtaaccgttcataccccgaactcccgaataaattaacaacctaactacgaaaaaaaaccaaaaaacgctaaacgacgaaactacgaaacccgctcaaaaacgacctccgaacgacgcgacccttaatcccgcaaccccgataatcgtatatactccgaaacgaccgaaaataccgcaatcgtctctccaactcccttcgcgctcacaactcgacctcccaactcacgcccaaccaacgccgacgcgaacctctaccttaaacgcgcaaccgaatcgacacgtcctccttcgcgaaaacgctacgacgactacaaaaaaccgacgacaactctaattaaaatctaaaccaactcttctacaactccctcgtaaaccgaccgaacccaacacctccgccgccctcccccaacccctcctccttcccaccgccac

SEQ ID NO: 28743 - DNA, 996 bp, Artificial Sequence
  chemically treated genomic DNA (Homo sapiens) CpG-island No: 28743
ggaaagtttcgataggtttacgttttaaaattttgtttttagtttttttaagtggagttgtagttggtatttcgaagttgttttcgcgttcggttaaattttcgtattttagacgtttttatttggtttggcgagttgcgtttgtagagtttcgggttgcggttcggtagtttaacgtagcgcggcggtcgcggttaattcggtagtagggcgcggcggttgcggttgcgacggttgagaggttggcggcggttgcggggcggcgacggcgtttttcggcggcgggggttttggtagagcgcgtagcgagtcggggatgaggttttttaagttttcgttggtttgttgtcggcgtagcgttatttgcgtagttatgattcgttgtcgttcgatgatgaggatgtatttttcgtaggtgtagtttttgaagcggtagtaacgtttgtggtttttgagttaggataggacgttatggttgcggtagcgcgcgtatttgggcgtgcgttgtaggggcgttcgtggcggttgcgatatcgggtcgtttatgtataggtagggggagtcgtagtcgtttatgtttcgggttttcgaatgagttggtagtttggttgcgggagagggttagggagcgttggacggcggggttgcgaggttcgtttaggggcggttttcgggcgacgcggtttttggtttcgtagtttcggtggtcgtgtgtgtttcggggcggtcggaggtgtcgtagtcgtttttttagtttttttcgcgtttatagttcggttttttagtttacgtttagttaacgtcgacgcgggtttttgttttgggcgcgtagtcgggtcggtacgttttttttcgcggaggcgttgcggcggttgtaaggagtcggcgatagttttgattaaggtttgagttagtttttttgtagttttttcgtgagtcggtcggatttaatattttcgtcgtttttttttaatttttttttttttttatcgttat

SEQ ID NO: 28744 - DNA, 996 bp, Artificial Sequence
  chemically treated genomic DNA (Homo sapiens) CpG-island No: 28744
ataacgataaaaaaaaaaaaaaattaaaaaaaaacgacgaaaatattaaatccgaccgactcacgaaaaaactacaaaaaaactaactcaaaccttaatcaaaactatcgccgactccttacaaccgccgcaacgcctccgcgaaaaaaaacgtaccgacccgactacgcgcccaaaacaaaaacccgcgtcgacgttaactaaacgtaaactaaaaaaccgaactataaacgcgaaaaaaactaaaaaaacgactacgacacctccgaccgccccgaaacacacacgaccaccgaaactacgaaaccaaaaaccgcgtcgcccgaaaaccgcccctaaacgaacctcgcaaccccgccgtccaacgctccctaaccctctcccgcaaccaaactaccaactcattcgaaaacccgaaacataaacgactacgactccccctacctatacataaacgacccgatatcgcaaccgccacgaacgcccctacaacgcacgcccaaatacgcgcgctaccgcaaccataacgtcctatcctaactcaaaaaccacaaacgttactaccgcttcaaaaactacacctacgaaaaatacatcctcatcatcgaacgacaacgaatcataactacgcaaataacgctacgccgacaacaaaccaacgaaaacttaaaaaacctcatccccgactcgctacgcgctctaccaaaacccccgccgccgaaaaacgccgtcgccgccccgcaaccgccgccaacctctcaaccgtcgcaaccgcaaccgccgcgccctactaccgaattaaccgcgaccgccgcgctacgttaaactaccgaaccgcaacccgaaactctacaaacgcaactcgccaaaccaaataaaaacgtctaaaatacgaaaatttaaccgaacgcgaaaacaacttcgaaataccaactacaactccacttaaaaaaactaaaaacaaaattttaaaacgtaaacctatcgaaactttcc

SEQ ID NO: 28745 - DNA, 726 bp, Artificial Sequence
  chemically treated genomic DNA (Homo sapiens) CpG-island No: 28745
gggttttttgttcgcggcgcgtcgtagatatacggtcgggaagtataaaggcgcgcggagtttgggtagtagttttcgagacggttacgttttcgtcgtttttcggttttatgcggtcgtataaagattagagttttatcgttatttacgtatttatttacgttcgagaggggcgtcgcgcggcgtaggtcgttatatttattcgggttcgttttcgtttttcgggtttcgggcgttttgatgaatatgtatcgcggcgcgttcgttttcggttttttttttcggtttttttttcgtcgttaggcggaagcgaagagtcgcgtttttcgcgcgtttaggtcggtcgtggtagggtggggcggggcgggtcgcgagtcggagaaagagaaagttagggaggcgattgtaggaggagcgcgggtcgggcgcggaagggtgcgttgttgggtggcggtttcggggtagtttcgtcgcgggttaggttaattcgagggcggggaaggggcgatcgcgcgatttcggggtcgtgtcggttgtatttgatcggcgtagttttatttttggagtagtttcgttaaaataataataaaatttattatatatatatatatatgtatatacgtatacgcgggcgtatatatatatattattttggacggcgtttaagttaagtacgagaaatagttttttgtaagggagaggaaagaaagttggaaatttagatag

SEQ ID NO: 28746 - DNA, 726 bp, Artificial Sequence
  chemically treated genomic DNA (Homo sapiens) CpG-island No: 28746
ctatctaaatttccaactttctttcctctcccttacaaaaaactatttctcgtacttaacttaaacgccgtccaaaataatatatatatatacgcccgcgtatacgtatatacatatatatatatatataataaattttattattattttaacgaaactactccaaaaataaaactacgccgatcaaatacaaccgacacgaccccgaaatcgcgcgatcgccccttccccgccctcgaattaacctaacccgcgacgaaactaccccgaaaccgccacccaacaacgcacccttccgcgcccgacccgcgctcctcctacaatcgcctccctaactttctctttctccgactcgcgacccgccccgccccaccctaccacgaccgacctaaacgcgcgaaaaacgcgactcttcgcttccgcctaacgacgaaaaaaaaaccgaaaaaaaaaaccgaaaacgaacgcgccgcgatacatattcatcaaaacgcccgaaacccgaaaaacgaaaacgaacccgaataaatataacgacctacgccgcgcgacgcccctctcgaacgtaaataaatacgtaaataacgataaaactctaatctttatacgaccgcataaaaccgaaaaacgacgaaaacgtaaccgtctcgaaaactactacccaaactccgcgcgcctttatacttcccgaccgtatatctacgacgcgccgcgaacaaaaaaccc

SEQ ID NO: 28747 - DNA, 726 bp, Artificial Sequence
  chemically treated genomic DNA (Homo sapiens) CpG-island No: 28747
ttgtttggatttttagttttttttttttttttttgtagaaggttgtttttcgtgtttgatttgaacgtcgtttaggatggtgtgtgtgtgtgcgttcgcgtgtgcgtgtgtgtatgtatgtgtgtgtgtggtgggttttattgttgttttagcggggttgttttaggagtggggttgcgtcggttagatgtagtcggtacggtttcggggtcgcgcgatcgtttttttttcgttttcggattggtttggttcgcggcggggttgtttcggaatcgttatttagtagcgtattttttcgcgttcggttcgcgttttttttgtagtcgtttttttggtttttttttttttcggttcgcggttcgtttcgttttattttattacggtcggtttgggcgcgcgggaagcgcggtttttcgttttcgtttggcggcgggaaggaaatcgaaaggaggagtcgggggcgggcgcgtcgcgatgtatatttattagggcgttcgggattcgggaggcgggagcgggttcgagtgggtgtggcggtttgcgtcgcgcggcgtttttttcgagcgtgggtgggtgcgtgggtagcggtggggttttggtttttgtgcggtcgtatggggtcggagagcggcgagggcgtgatcgtttcgggggttgttgtttaggtttcgcgcgtttttgtgtttttcgatcgtgtgtttgcggcgcgtcgcgggtaaggggttt

SEQ ID NO: 28748 - DNA, 726 bp, Artificial Sequence
  chemically treated genomic DNA (Homo sapiens) CpG-island No: 28748
aaaccccttacccgcgacgcgccgcaaacacacgatcgaaaaacacaaaaacgcgcgaaacctaaacaacaacccccgaaacgatcacgccctcgccgctctccgaccccatacgaccgcacaaaaaccaaaaccccaccgctacccacgcacccacccacgctcgaaaaaaacgccgcgcgacgcaaaccgccacacccactcgaacccgctcccgcctcccgaatcccgaacgccctaataaatatacatcgcgacgcgcccgcccccgactcctcctttcgatttccttcccgccgccaaacgaaaacgaaaaaccgcgcttcccgcgcgcccaaaccgaccgtaataaaataaaacgaaacgaaccgcgaaccgaaaaaaaaaaaaaccaaaaaaacgactacaaaaaaaacgcgaaccgaacgcgaaaaaatacgctactaaataacgattccgaaacaaccccgccgcgaaccaaaccaatccgaaaacgaaaaaaaaacgatcgcgcgaccccgaaaccgtaccgactacatctaaccgacgcaaccccactcctaaaacaaccccgctaaaacaacaataaaacccaccacacacacacatacatacacacacgcacacgcgaacgcacacacacacaccatcctaaacgacgttcaaatcaaacacgaaaaacaaccttctacaaaaaaaaaaaaaaaaaactaaaaatccaaacaa

SEQ ID NO: 28749 - DNA, 1369 bp, Artificial Sequence
  chemically treated genomic DNA (Homo sapiens) CpG-island No: 28749
gttgcgattttattttttcggtaaggggtcgaagttttcgggcggggcggggcggaggatagtacgaggtttaggatttttacgttatttttgtagtttcgcgtttttttttttagttttggtcgggttttcgcgttttttcgattttcgatcgtaaagtcggggtgcgagagggaaagggaagtgaggcggtacgcgtatggagggtgtgagtgcggatatatatatagggtggttaggtacgaaaaatttcgttttttttcgaattttcgtttcggattagttgtagttttattattttagggttttttgcgtcgggataaagttgtcgcggtttttttgcgttcgcggagcgcgtcgtcgttcgatttttttagtttttttcggtcgtaatttcgttttaaaggattcgtgggtcgttttagggacggaggggattcggagtcgggcgttcgtagttttcgtttttcgcgttttcgttcggcgtcgtcgtttatttgtttagtattttgcggattttttggcgtacgttagttcgggaggaggcggataggttttcgtcgtcgtcgttgttttcggtcggtaggttttcgatggtggttattatatggttcggcggggttggcgacggcggttgtagttgttgttgcggttgtttaggggggattatcgcggtagaggttgaggcgcggcggcgattagaacgtagtcgggtgtatcgtgtgtcggtttcgggttcgggaacgcgtagaggattcggtcgggcggtcgcggttcgggaggcggtgttgtttgcgaagcggtgaggcggggaggtattcgcggttacggtcgtcgtcgtttagttcgttatttatttttttttagttttagtgcgcgtattttcgcgttcgtgtcgtcgtcgtcgtcgttcgtttcggtttttttcgagtcgcgtttttaagttttggttcgtttcgcgaagtggttgcgaagggtgtcgcgcgggggcgcggagttgtcggtcggtttcggggaaggagttttgatttttttttgttttttcgtgttcgggttttttcggggcgcgcggcggtagttgtgttggcgtcgttttagtttgtgtttcgttcggtcggaaagttatcgtttgtgttttacggagtgagagatcgagggtgaattcggagagtcgggcgggggcgtcggcggcggcggcggcggcggcggcggcggcggtattttggggcgcgggcgggggatttgcgcgtttttttttcgttagagggcgttgtcgaggtgttttgttgttttcgattttttattgtttcgttcgtaaaggtttacggattaggttgtggtgattgttttggtttgggtgttttttagg

SEQ ID NO: 28750 - DNA, 1369 bp, Artificial Sequence
  chemically treated genomic DNA (Homo sapiens) CpG-island No: 28750
cctaaaaaacacccaaaccaaaacaatcaccacaacctaatccgtaaacctttacgaacgaaacaataaaaaatcgaaaacaacaaaacacctcgacaacgccctctaacgaaaaaaaaacgcgcaaatcccccgcccgcgccccaaaataccgccgccgccgccgccgccgccgccgccgccgacgcccccgcccgactctccgaattcaccctcgatctctcactccgtaaaacacaaacgataactttccgaccgaacgaaacacaaactaaaacgacgccaacacaactaccgccgcgcgccccgaaaaaacccgaacacgaaaaaacaaaaaaaaatcaaaactccttccccgaaaccgaccgacaactccgcgcccccgcgcgacacccttcgcaaccacttcgcgaaacgaaccaaaacttaaaaacgcgactcgaaaaaaaccgaaacgaacgacgacgacgacgacacgaacgcgaaaatacgcgcactaaaactaaaaaaaaataaataacgaactaaacgacgacgaccgtaaccgcgaatacctccccgcctcaccgcttcgcaaacaacaccgcctcccgaaccgcgaccgcccgaccgaatcctctacgcgttcccgaacccgaaaccgacacacgatacacccgactacgttctaatcgccgccgcgcctcaacctctaccgcgataatcccccctaaacaaccgcaacaacaactacaaccgccgtcgccaaccccgccgaaccatataataaccaccatcgaaaacctaccgaccgaaaacaacgacgacgacgaaaacctatccgcctcctcccgaactaacgtacgccaaaaaatccgcaaaatactaaacaaataaacgacgacgccgaacgaaaacgcgaaaaacgaaaactacgaacgcccgactccgaatcccctccgtccctaaaacgacccacgaatcctttaaaacgaaattacgaccgaaaaaaactaaaaaaatcgaacgacgacgcgctccgcgaacgcaaaaaaaccgcgacaactttatcccgacgcaaaaaaccctaaaataataaaactacaactaatccgaaacgaaaattcgaaaaaaaacgaaatttttcgtacctaaccaccctatatatatatccgcactcacaccctccatacgcgtaccgcctcacttccctttccctctcgcaccccgactttacgatcgaaaatcgaaaaaacgcgaaaacccgaccaaaactaaaaaaaaaaacgcgaaactacaaaaataacgtaaaaatcctaaacctcgtactatcctccgccccgccccgcccgaaaacttcgaccccttaccgaaaaaataaaatcgcaac

SEQ ID NO: 28751 - DNA, 1369 bp, Artificial Sequence
  chemically treated genomic DNA (Homo sapiens) CpG-island No: 28751
tttaaaaaatatttaaattaaaataattattataatttagttcgtgggtttttacggacggggtagtagagggtcgggggtaataaggtatttcggtagcgttttttggcgagaggagagcgcgtaggtttttcgttcgcgttttaaaatgtcgtcgtcgtcgtcgtcgtcgtcgtcgtcgtcggcgttttcgttcggtttttcgggtttattttcggttttttatttcgtgagatatagacggtagtttttcgatcgagcggggtataggttgaggcggcgttagtataattgtcgtcgcgcgtttcgaggagattcgggtacgaggaaataaggagaaattaggatttttttttcggaatcgatcggtagtttcgcgttttcgcgcgatatttttcgtagttatttcgcggggcgggttaggatttggggacgcggttcgggaagagtcggggcgggcggcggcggcggcggtacgggcgcgagggtgcgcgtattgggattggagaggagtgagtggcgggttgggcggcggcggtcgtagtcgcgggtgttttttcgttttatcgtttcgtaggtagtatcgtttttcgggtcgcggtcgttcggtcgggttttttgcgcgttttcgggttcggaatcggtatacgatgtattcggttgcgttttgatcgtcgtcgcgttttagtttttgtcgcgatgattttttttgagtagtcgtagtagtagttgtagtcgtcgtcgttagtttcgtcgaattatgtggtgattattatcgagaatttgtcggtcgagggtagcggcggcggcgggagtttgttcgttttttttcgggttggcgtgcgttagaggattcgtaaagtgttgaataggtgagcggcggcgtcgggcgagggcgcggggggcgggggttgcgggcgttcggtttcgggtttttttcgtttttggggcggtttacgggttttttgggacggggttgcggtcggaggagattgaggagatcgggcgacgacgcgtttcgcgggcgtagagaggtcgcggtagttttgtttcggcgtagggagttttggagtggtggagttgtagttggttcgaggcgggagttcggggagaggcggggtttttcgtatttagttattttgtatgtgtgttcgtatttatattttttatacgcgtgtcgttttatttttttttttttttcgtatttcggttttgcgatcgggggtcggggggacgcggggattcggttagggttgaggagggaggcgcggggttgtagagatggcgtggaagttttgggtttcgtgttgtttttcgtttcgtttcgttcgggggtttcgattttttgtcgggggaatggggtcgtagt

SEQ ID NO: 28752 - DNA, 1369 bp, Artificial Sequence
  chemically treated genomic DNA (Homo sapiens) CpG-island No: 28752
actacgaccccattcccccgacaaaaaatcgaaacccccgaacgaaacgaaacgaaaaacaacacgaaacccaaaacttccacgccatctctacaaccccgcgcctccctcctcaaccctaaccgaatccccgcgtccccccgacccccgatcgcaaaaccgaaatacgaaaaaaaaaaaaaaataaaacgacacgcgtataaaaaatataaatacgaacacacatacaaaataactaaatacgaaaaaccccgcctctccccgaactcccgcctcgaaccaactacaactccaccactccaaaactccctacgccgaaacaaaactaccgcgacctctctacgcccgcgaaacgcgtcgtcgcccgatctcctcaatctcctccgaccgcaaccccgtcccaaaaaacccgtaaaccgccccaaaaacgaaaaaaacccgaaaccgaacgcccgcaacccccgccccccgcgccctcgcccgacgccgccgctcacctattcaacactttacgaatcctctaacgcacgccaacccgaaaaaaaacgaacaaactcccgccgccgccgctaccctcgaccgacaaattctcgataataatcaccacataattcgacgaaactaacgacgacgactacaactactactacgactactcaaaaaaaatcatcgcgacaaaaactaaaacgcgacgacgatcaaaacgcaaccgaatacatcgtataccgattccgaacccgaaaacgcgcaaaaaacccgaccgaacgaccgcgacccgaaaaacgatactacctacgaaacgataaaacgaaaaaacacccgcgactacgaccgccgccgcccaacccgccactcactcctctccaatcccaatacgcgcaccctcgcgcccgtaccgccgccgccgccgcccgccccgactcttcccgaaccgcgtccccaaatcctaacccgccccgcgaaataactacgaaaaatatcgcgcgaaaacgcgaaactaccgatcgattccgaaaaaaaaatcctaatttctccttatttcctcgtacccgaatctcctcgaaacgcgcgacgacaattatactaacgccgcctcaacctataccccgctcgatcgaaaaactaccgtctatatctcacgaaataaaaaaccgaaaataaacccgaaaaaccgaacgaaaacgccgacgacgacgacgacgacgacgacgacgacgacattttaaaacgcgaacgaaaaacctacgcgctctcctctcgccaaaaaacgctaccgaaataccttattacccccgaccctctactaccccgtccgtaaaaacccacgaactaaattataataattattttaatttaaatattttttaaa

SEQ ID NO: 28753 - DNA, 599 bp, Artificial Sequence
  chemically treated genomic DNA (Homo sapiens) CpG-island No: 28753
ggacgacgtttataggtttcggcgtcgggcgggggtcgtagggtagggcggttcggtttatttttttgagttgttttatttcgttgcggatagttttatagtttatttcgagtttttcgaattgtagtttgagttggtgttttttttcgagtatcgttagttcgtattcggtcgtttggatttttttacgcgtggtttcggttagttcgtgggatagtcgttttatttcggcgcgtagttatttcggttgcgtttttattattagtcgcgcgtattttttttttttcgacggcgtcgatatggtggtcgagggttgagtcggtttttattgaggttttcgtaggtcgggttttttttagtcgtcgtcgttgtcgtcgtcgtcgtcgttttgtttcgacggtcgttcgttcgttcgcgtcgtcgtacggtttttttttttcggcgcgcggggttcgttgggggttggagttttgtttgcgtttcgattataaggtttattatgttcggcgttcgttcggttttcggttatgattggtttatgttttgtgaggggcgggttttcgggcgtagttattgacgttaatgtggtttagggggtt

SEQ ID NO: 28754 - DNA, 599 bp, Artificial Sequence
  chemically treated genomic DNA (Homo sapiens) CpG-island No: 28754
aaccccctaaaccacattaacgtcaataactacgcccgaaaacccgcccctcacaaaacataaaccaatcataaccgaaaaccgaacgaacgccgaacataataaaccttataatcgaaacgcaaacaaaactccaacccccaacgaaccccgcgcgccgaaaaaaaaaaaccgtacgacgacgcgaacgaacgaacgaccgtcgaaacaaaacgacgacgacgacgacaacgacgacgactaaaaaaaacccgacctacgaaaacctcaataaaaaccgactcaaccctcgaccaccatatcgacgccgtcgaaaaaaaaaaaatacgcgcgactaataataaaaacgcaaccgaaataactacgcgccgaaataaaacgactatcccacgaactaaccgaaaccacgcgtaaaaaaatccaaacgaccgaatacgaactaacgatactcgaaaaaaaacaccaactcaaactacaattcgaaaaactcgaaataaactataaaactatccgcaacgaaataaaacaactcaaaaaaataaaccgaaccgccctaccctacgacccccgcccgacgccgaaacctataaacgtcgtcc

SEQ ID NO: 28755 - DNA, 599 bp, Artificial Sequence
  chemically treated genomic DNA (Homo sapiens) CpG-island No: 28755
agttttttgggttatattggcgttagtggttgcgttcgagggttcgttttttatagagtatgggttaattatagtcgggggtcgggcgggcgtcgggtatgatggattttgtggtcggagcgtaggtaggattttagtttttagcgggtttcgcgcgtcggaggggaggagtcgtgcggcggcgcgggcgggcgggcggtcgtcggggtagggcggcggcggcggcggtagcggcggcggttgaggagggttcggtttgcgagagttttagtgggagtcggtttagttttcggttattatgtcggcgtcgtcggaggaggaggagtacgcgcggttggtgatggaggcgtagtcggagtggttgcgcgtcgaggtgaagcggttgttttacgagttggtcgagattacgcgtgagaagatttaggcggtcgagtacgggttggcggtgttcgaggagaagtattagtttaagttgtagttcgaggagttcgaggtggattatgaggttattcgtagcgagatggagtagtttaaggaggtgagtcgagtcgttttgttttgcgattttcgttcggcgtcggggtttgtgggcgtcgttt

SEQ ID NO: 28756 - DNA, 599 bp, Artificial Sequence
  chemically treated genomic DNA (Homo sapiens) CpG-island No: 28756
aaacgacgcccacaaaccccgacgccgaacgaaaatcgcaaaacaaaacgactcgactcacctccttaaactactccatctcgctacgaataacctcataatccacctcgaactcctcgaactacaacttaaactaatacttctcctcgaacaccgccaacccgtactcgaccgcctaaatcttctcacgcgtaatctcgaccaactcgtaaaacaaccgcttcacctcgacgcgcaaccactccgactacgcctccatcaccaaccgcgcgtactcctcctcctccgacgacgccgacataataaccgaaaactaaaccgactcccactaaaactctcgcaaaccgaaccctcctcaaccgccgccgctaccgccgccgccgccgccctaccccgacgaccgcccgcccgcccgcgccgccgcacgactcctcccctccgacgcgcgaaacccgctaaaaactaaaatcctacctacgctccgaccacaaaatccatcatacccgacgcccgcccgacccccgactataattaacccatactctataaaaaacgaaccctcgaacgcaaccactaacgccaatataacccaaaaaact

SEQ ID NO: 28757 - DNA, 604 bp, Artificial Sequence
  chemically treated genomic DNA (Homo sapiens) CpG-island No: 28757
  unsure (415, 470)
atgtacgtttgcgatttcgagacgtttcgcgcgagtttaggagaattcgtaagttagtagcgtttgcgttcgagttgtagtagttttttgtaggttacgcgggttcgggagcggttttcggagttcgagttggcgttgagttgtaggcgcgagtttaaaggtttagtcggggtttacgttgtttgagagatcggagcgtttagttataggtacgcgtttaacggtttcgtggagtttattcggtttgagaggtcggaggttgcgagtgtcgttgttgaaggttgtggtggattaggttggatcgcggattttgagttatatcgcgggtttggtggtggattttggatttgggggtggatcgcgggtttgggggtggattttggatttggggggtggatttcggggatgtgggggngatggcggaatttggggttgggtgggggttggaaaaaagttacgaggagtcgcgncggtttaggagcgggtggtgggcgtttgaaaagtcgttattatgaggaagttttttagtttcgggagacgtttgggttaggcgtttttggattttatggattaagagtacgttggtcgggggtattatattcgg

SEQ ID NO: 28758 - DNA, 604 bp, Artificial Sequence
  chemically treated genomic DNA (Homo sapiens) CpG-island No: 28758
  unsure (135, 190)
ccgaatataatacccccgaccaacgtactcttaatccataaaatccaaaaacgcctaacccaaacgtctcccgaaactaaaaaacttcctcataataacgacttttcaaacgcccaccacccgctcctaaaccgncgcgactcctcgtaacttttttccaacccccacccaaccccaaattccgccatcncccccacatccccgaaatccaccccccaaatccaaaatccacccccaaacccgcgatccacccccaaatccaaaatccaccaccaaacccgcgatataactcaaaatccgcgatccaacctaatccaccacaaccttcaacaacgacactcgcaacctccgacctctcaaaccgaataaactccacgaaaccgttaaacgcgtacctataactaaacgctccgatctctcaaacaacgtaaaccccgactaaacctttaaactcgcgcctacaactcaacgccaactcgaactccgaaaaccgctcccgaacccgcgtaacctacaaaaaactactacaactcgaacgcaaacgctactaacttacgaattctcctaaactcgcgcgaaacgtctcgaaatcgcaaacgtacat

SEQ ID NO: 28759 - DNA, 604 bp, Artificial Sequence
  chemically treated genomic DNA (Homo sapiens) CpG-island No: 28759
  unsure (135, 190)
tcggatgtggtattttcgattagcgtatttttggtttatggagtttaggagcgtttggtttaggcgtttttcgaagttgaagagtttttttatggtggcgattttttagacgtttattattcgtttttgagtcgncgcggtttttcgtggtttttttttaatttttatttagttttaaatttcgttattntttttatattttcgggatttattttttaaatttaagatttatttttaaattcgcgatttatttttaaatttaagatttattattaaattcgcgatgtagtttagaattcgcgatttagtttggtttattatagtttttagtagcgatattcgtagttttcgattttttagatcgagtgagttttacgaagtcgttaagcgcgtgtttgtagttgaacgtttcgattttttagatagcgtgggtttcggttaagtttttaggttcgcgtttgtagtttagcgttagttcggatttcggaaatcgttttcgagttcgcgtggtttgtagggggttgttgtagttcgggcgtaggcgttgttggtttgcgggtttttttgggttcgcgcgggacgtttcggaatcgtagacgtgtat

SEQ ID NO: 28760 - DNA, 604 bp, Artificial Sequence
  chemically treated genomic DNA (Homo sapiens) CpG-island No: 28760
  unsure (415, 470)
atacacgtctacgattccgaaacgtcccgcgcgaacccaaaaaaacccgcaaaccaacaacgcctacgcccgaactacaacaaccccctacaaaccacgcgaactcgaaaacgatttccgaaatccgaactaacgctaaactacaaacgcgaacctaaaaacttaaccgaaacccacgctatctaaaaaatcgaaacgttcaactacaaacacgcgcttaacgacttcgtaaaactcactcgatctaaaaaatcgaaaactacgaatatcgctactaaaaactataataaaccaaactaaatcgcgaattctaaactacatcgcgaatttaataataaatcttaaatttaaaaataaatcgcgaatttaaaaataaatcttaaatttaaaaaataaatcccgaaaatataaaaanaataacgaaatttaaaactaaataaaaattaaaaaaaaaccacgaaaaaccgcgncgactcaaaaacgaataataaacgtctaaaaaatcgccaccataaaaaaactcttcaacttcgaaaaacgcctaaaccaaacgctcctaaactccataaaccaaaaatacgctaatcgaaaataccacatccga

SEQ ID NO: 28761 - DNA, 626 bp, Artificial Sequence
  chemically treated genomic DNA (Homo sapiens) CpG-island No: 28761
cgttttcggaatatttacgttttcgggatatttacgttttcgggatatttacgttttcgggatacgtatattttcgggatattttcgttttcggaatatttatattttcgggatatttatattttcgggatatttacgttttcgggatatttatattttcgggatatttacgttttcgggatatttatattttcgggatatttacgttttcgggatatttacgttttcgggatatttacgttttcgggatatttatattttcgggatattttcgttttcgggatatttatattttcgggatatttattttttcgggatatttatattttcgggatattttcgttttcgggatatttatattttcgggatatttattttttcgggatatttatattttcgggatatttacgttttcgggatatttatattttcgggatattttcgttttcgggatatttatattttcgggatatttattttttcgggatatttatattttcgggatatttacgttttcgggatatttacgttttcgggatatttacggtttcgggatatttacgtttttgggatatttaggttttcggaatatttatattttcgggatatttattttttcgggatat

SEQ ID NO: 28762 - DNA, 626 bp, Artificial Sequence
  chemically treated genomic DNA (Homo sapiens) CpG-island No: 28762
atatcccgaaaaaataaatatcccgaaaatataaatattccgaaaacctaaatatcccaaaaacgtaaatatcccgaaaccgtaaatatcccgaaaacgtaaatatcccgaaaacgtaaatatcccgaaaatataaatatcccgaaaaaataaatatcccgaaaatataaatatcccgaaaacgaaaatatcccgaaaatataaatatcccgaaaacgtaaatatcccgaaaatataaatatcccgaaaaaataaatatcccgaaaatataaatatcccgaaaacgaaaatatcccgaaaatataaatatcccgaaaaaataaatatcccgaaaatataaatatcccgaaaacgaaaatatcccgaaaatataaatatcccgaaaacgtaaatatcccgaaaacgtaaatatcccgaaaacgtaaatatcccgaaaatataaatatcccgaaaacgtaaatatcccgaaaatataaatatcccgaaaacgtaaatatcccgaaaatataaatatcccgaaaatataaatattccgaaaacgaaaatatcccgaaaatatacgtatcccgaaaacgtaaatatcccgaaaacgtaaatatcccgaaaacgtaaatattccgaaaacg

SEQ ID NO: 28763 - DNA, 626 bp, Artificial Sequence
  chemically treated genomic DNA (Homo sapiens) CpG-island No: 28763
gtgtttcgggggagtgggtgtttcgggagtgtgggtgtttcgggggtttgggtgttttaggagcgtgggtgtttcggggtcgtgggtgtttcgggagcgtgggtgtttcgggggcgtgggtgtttcgggagtgtgggtgtttcgggggagtgggtgtttcgggagtgtgggtgtttcggaggcgagggtgtttcgggagtgtgggtgtttcgggggcgtgggtgtttcgggagtgtgggtgtttcgggggagtgggtgtttcgggagtgtgggtgtttcggaggcgagggtgtttcgggagtgtgggtgtttcgggggagtgggtgtttcgggagtgtgggtgtttcggaggcgagggtgtttcgggagtgtgggtgtttcgggggcgtgggtgtttcgggagcgtgggtgtttcgggggcgtgggtgtttcgggagtgtgggtgtttcgggggcgtgggtgtttcgggagtgtgggtgtttcgggggcgtgggtgtttcgggagtgtgggtgtttcgggagtgtgggtgtttcggaggcgagggtgtttcgggagtgtgcgtgtttcgggggcgtgggtgtttcgggggcgtgggtgtttcgggggcgtgggtgtttcggaggcg

SEQ ID NO: 28764 - DNA, 626 bp, Artificial Sequence
  chemically treated genomic DNA (Homo sapiens) CpG-island No: 28764
cgcctccgaaacacccacgcccccgaaacacccacgcccccgaaacacccacgcccccgaaacacgcacactcccgaaacaccctcgcctccgaaacacccacactcccgaaacacccacactcccgaaacacccacgcccccgaaacacccacactcccgaaacacccacgcccccgaaacacccacactcccgaaacacccacgcccccgaaacacccacgctcccgaaacacccacgcccccgaaacacccacactcccgaaacaccctcgcctccgaaacacccacactcccgaaacacccactcccccgaaacacccacactcccgaaacaccctcgcctccgaaacacccacactcccgaaacacccactcccccgaaacacccacactcccgaaacacccacgcccccgaaacacccacactcccgaaacaccctcgcctccgaaacacccacactcccgaaacacccactcccccgaaacacccacactcccgaaacacccacgcccccgaaacacccacgctcccgaaacacccacgaccccgaaacacccacgctcctaaaacacccaaacccccgaaacacccacactcccgaaacacccactcccccgaaacac

SEQ ID NO: 28765 - DNA, 600 bp, Artificial Sequence
  chemically treated genomic DNA (Homo sapiens) CpG-island No: 28765
cggttatttgtggataaataggatcgtcgttttgtttatgggaagacggggttggtgagggttagagacgtttagggcgaggtaatttcgtgcgtttagtttcgagtaggtcgttttttaggacgttttatagtcgaggggatcgttattcgggagcgtcgtgagttgtgggtattacgcggtggtggagagtgattttcgtttcggggcggtcgtgttgttcgaatttgttttagttcgcgaggggagacgggtttgggggtaggcgggagagggaggtttcgggaggaggcgagcggggttgagaggacgcgcgggaggggttttggagaggtcgtaggaggcgcgtttcggagggacgatttttgttgggaggacgaggttttaggtggacgttgtgggtcggtgggtaggagttcgagttttgtaggagcggtttaaattggttattgagcgcggaagaagggacggaaggtgagcgttattgggttacgtggggtcgagagaaaggttattgtttgttttttttaaaattagttttatacgtcgacgtttttagagaattggtttggtttggaaggaggttgaggatgtaggcgg

SEQ ID NO: 28766 - DNA, 600 bp, Artificial Sequence
  chemically treated genomic DNA (Homo sapiens) CpG-island No: 28766
ccgcctacatcctcaacctccttccaaaccaaaccaattctctaaaaacgtcgacgtataaaactaattttaaaaaaaacaaacaataacctttctctcgaccccacgtaacccaataacgctcaccttccgtcccttcttccgcgctcaataaccaatttaaaccgctcctacaaaactcgaactcctacccaccgacccacaacgtccacctaaaacctcgtcctcccaacaaaaatcgtccctccgaaacgcgcctcctacgacctctccaaaacccctcccgcgcgtcctctcaaccccgctcgcctcctcccgaaacctccctctcccgcctacccccaaacccgtctcccctcgcgaactaaaacaaattcgaacaacacgaccgccccgaaacgaaaatcactctccaccaccgcgtaatacccacaactcacgacgctcccgaataacgatcccctcgactataaaacgtcctaaaaaacgacctactcgaaactaaacgcacgaaattacctcgccctaaacgtctctaaccctcaccaaccccgtcttcccataaacaaaacgacgatcctatttatccacaaataaccg

SEQ ID NO: 28767 - DNA, 600 bp, Artificial Sequence
  chemically treated genomic DNA (Homo sapiens) CpG-island No: 28767
tcgtttgtatttttagtttttttttaaattagattagttttttaggggcgtcgacgtgtgaaattgattttaaagaaaataggtagtggtttttttttcggttttacgtggtttagtagcgtttatttttcgttttttttttcgcgtttagtaattaatttaggtcgtttttgtagaattcgggtttttgtttatcggtttatagcgtttatttgaggtttcgtttttttagtaaaggtcgttttttcggaacgcgttttttgcggtttttttagagtttttttcgcgcgtttttttagtttcgttcgttttttttcggggtttttttttttcgtttgtttttaggttcgttttttttcgcgggttgaggtaggttcgggtagtacggtcgtttcggggcgggggttattttttattatcgcgtggtgtttatagtttacggcgttttcgggtgacggttttttcggttgtagggcgttttgaagagcggtttgttcggagttgagcgtacggggttgtttcgttttgggcgtttttggtttttattagtttcgtttttttatgggtaaaacggcggttttgtttgtttataagtaatcg

SEQ ID NO: 28768 - DNA, 600 bp, Artificial Sequence
  chemically treated genomic DNA (Homo sapiens) CpG-island No: 28768
cgattacttataaacaaacaaaaccgccgttttacccataaaaaaacgaaactaataaaaaccaaaaacgcccaaaacgaaacaaccccgtacgctcaactccgaacaaaccgctcttcaaaacgccctacaaccgaaaaaaccgtcacccgaaaacgccgtaaactataaacaccacgcgataataaaaaataacccccgccccgaaacgaccgtactacccgaacctacctcaacccgcgaaaaaaaacgaacctaaaaacaaacgaaaaaaaaaaaccccgaaaaaaaacgaacgaaactaaaaaaacgcgcgaaaaaaactctaaaaaaaccgcaaaaaacgcgttccgaaaaaacgacctttactaaaaaaacgaaacctcaaataaacgctataaaccgataaacaaaaacccgaattctacaaaaacgacctaaattaattactaaacgcgaaaaaaaaaacgaaaaataaacgctactaaaccacgtaaaaccgaaaaaaaaaccactacctattttctttaaaatcaatttcacacgtcgacgcccctaaaaaactaatctaatttaaaaaaaaactaaaaatacaaacga

SEQ ID NO: 28769 - DNA, 670 bp, Artificial Sequence
  chemically treated genomic DNA (Homo sapiens) CpG-island No: 28769
cgacgttcgggaggtaagagtcgcggcggtcgtttttcgattcgatattcggcgttttttagattcggtcgtaggcgtcgttttattcgcgattttcgggttatttttggaagggacggggcggtttcgtcggttcgaagtcgcggggataacggcgcggggtagatgttcggggttgggcggcggcggtcgggggtcgggttagtttttggaggtttttcggttcgcgtttggcggaggcgtcgaggatagcgtagtttcgcgggtttcgttcgtagttcgtatcgaggattcggcgaggttgcggagggaggaggagacggggcgggttgcggcggggataggcggggatatggaggaggacgcgggagtcgtcgttattagggcgcgcgcggggacggcgacgttattttttcgtagttaagtttcgtttagtttcgcgtagtcgtcgtcgtcgtcgttagtttcgtagtttcgcggttagtgcgggcgtttcgcgaggtcgattcgggatcgtgtcgttagtgtttttttcgtgtggcggggatttagtagtttagttttggcggcgattttcgtgtagcgagcgtgaggtttgacgtaaaaaaaaaaagtatttttaagaagacggtgttgtaattattttcggttagtagaacgggtgtcgatt

SEQ ID NO: 28770 - DNA, 670 bp, Artificial Sequence
  chemically treated genomic DNA (Homo sapiens) CpG-island No: 28770
aatcgacacccgttctactaaccgaaaataattacaacaccgtcttcttaaaaatactttttttttttacgtcaaacctcacgctcgctacacgaaaatcgccgccaaaactaaactactaaatccccgccacacgaaaaaaacactaacgacacgatcccgaatcgacctcgcgaaacgcccgcactaaccgcgaaactacgaaactaacgacgacgacgacgactacgcgaaactaaacgaaacttaactacgaaaaaataacgtcgccgtccccgcgcgcgccctaataacgacgactcccgcgtcctcctccatatccccgcctatccccgccgcaacccgccccgtctcctcctccctccgcaacctcgccgaatcctcgatacgaactacgaacgaaacccgcgaaactacgctatcctcgacgcctccgccaaacgcgaaccgaaaaacctccaaaaactaacccgacccccgaccgccgccgcccaaccccgaacatctaccccgcgccgttatccccgcgacttcgaaccgacgaaaccgccccgtcccttccaaaaataacccgaaaatcgcgaataaaacgacgcctacgaccgaatctaaaaaacgccgaatatcgaatcgaaaaacgaccgccgcgactcttacctcccgaacgtcg

SEQ ID NO: 28771 - DNA, 670 bp, Artificial Sequence
  chemically treated genomic DNA (Homo sapiens) CpG-island No: 28771
aatcgatattcgttttgttaatcgaaggtgattatagtatcgtttttttggggatattttttttttttacgttaggttttacgttcgttgtacggggatcgtcgttagggttgggttgttggattttcgttatacgggggaagtattggcggtacgatttcggatcgatttcgcgaggcgttcgtattggtcgcggggttgcgggattggcggcggcggcggcggttgcgcggggttgggcggggtttggttgcggggaaatgacgtcgtcgttttcgcgcgcgttttggtaacggcggttttcgcgtttttttttatgttttcgtttattttcgtcgtagttcgtttcgttttttttttttttcgtagtttcgtcgagttttcggtgcgggttgcgagcgggattcgcggagttgcgttgttttcgacgttttcgttaggcgcgggtcgaggagtttttaagagttggttcggttttcggtcgtcgtcgtttaatttcgggtatttgtttcgcgtcgttgttttcgcggtttcgggtcggcgggatcgtttcgttttttttaggggtgattcgggggtcgcgggtgggacggcgtttgcggtcgagtttggggggcgtcgggtgtcgggtcgggaagcggtcgtcgcgatttttgtttttcgggcgtcg

SEQ ID NO: 28772 - DNA, 670 bp, Artificial Sequence
  chemically treated genomic DNA (Homo sapiens) CpG-island No: 28772
cgacgcccgaaaaacaaaaatcgcgacgaccgcttcccgacccgacacccgacgccccccaaactcgaccgcaaacgccgtcccacccgcgacccccgaatcacccctaaaaaaaacgaaacgatcccgccgacccgaaaccgcgaaaacaacgacgcgaaacaaatacccgaaattaaacgacgacgaccgaaaaccgaaccaactcttaaaaactcctcgacccgcgcctaacgaaaacgtcgaaaacaacgcaactccgcgaatcccgctcgcaacccgcaccgaaaactcgacgaaactacgaaaaaaaaaaaaaacgaaacgaactacgacgaaaataaacgaaaacataaaaaaaaacgcgaaaaccgccgttaccaaaacgcgcgcgaaaacgacgacgtcatttccccgcaaccaaaccccgcccaaccccgcgcaaccgccgccgccgccgccaatcccgcaaccccgcgaccaatacgaacgcctcgcgaaatcgatccgaaatcgtaccgccaatacttcccccgtataacgaaaatccaacaacccaaccctaacgacgatccccgtacaacgaacgtaaaacctaacgtaaaaaaaaaaaatatccccaaaaaaacgatactataatcaccttcgattaacaaaacgaatatcgatt

SEQ ID NO: 28773 - DNA, 649 bp, Artificial Sequence
  chemically treated genomic DNA (Homo sapiens) CpG-island No: 28773
agaagcgtcgttcggtttcgtttaagcgtatacgaaggggtcgtttttcgtttttcgtattttagattaggcggtttacggaatatcgttttttagttttggttcgggattaggcggttttttagtcggtttcggcgtcgcggtcggggacgcgcgttttttttttttaggcgtcggacgtggaatttgcgagtttttggcggcgttttaagttatgtataggtcgtagttgtttattaagttttttttgggaggtcgttttggttttcgagaggggcgcgcgggagtggacgttttcgtattttcgttttatttatatttgtcgtcgtcgtcggggtcgttagcgtcgtggtttcgtttcggtttcgtttttcgtcgttttcggttttcgttttagtcgtcgtcgcgatcgtcgcggaaaggagggggagggaagaggcgtttggacggggttgcgggagcggtcgtgttgagtttttttttttgggttcggacgggatttaggtttttttattgtaacgtagttttcgagtgacggaattttgtgggggaagcggcggttattacgttcgtttttggtatagtagttttttgcgggtgggagtttttcgtagttagagttaagggagagggagtttatttgtaagag

SEQ ID NO: 28774 - DNA, 649 bp, Artificial Sequence
  chemically treated genomic DNA (Homo sapiens) CpG-island No: 28774
ctcttacaaataaactccctctcccttaactctaactacgaaaaactcccacccgcaaaaaactactataccaaaaacgaacgtaataaccgccgcttcccccacaaaattccgtcactcgaaaactacgttacaataaaaaaacctaaatcccgtccgaacccaaaaaaaaaaactcaacacgaccgctcccgcaaccccgtccaaacgcctcttccctccccctcctttccgcgacgatcgcgacgacgactaaaacgaaaaccgaaaacgacgaaaaacgaaaccgaaacgaaaccacgacgctaacgaccccgacgacgacgacaaatataaataaaacgaaaatacgaaaacgtccactcccgcgcgcccctctcgaaaaccaaaacgacctcccaaaaaaaacttaataaacaactacgacctatacataacttaaaacgccgccaaaaactcgcaaattccacgtccgacgcctaaaaaaaaaaaacgcgcgtccccgaccgcgacgccgaaaccgactaaaaaaccgcctaatcccgaaccaaaactaaaaaacgatattccgtaaaccgcctaatctaaaatacgaaaaacgaaaaacgaccccttcgtatacgcttaaacgaaaccgaacgacgcttct

SEQ ID NO: 28775 - DNA, 649 bp, Artificial Sequence
  chemically treated genomic DNA (Homo sapiens) CpG-island No: 28775
tttttgtaggtggatttttttttttttagttttgattgcgagaagtttttattcgtaaagggttattgtgttaaaagcgagcgtagtggtcgtcgttttttttataaaatttcgttattcgggagttgcgttgtagtggagaaatttgggtttcgttcgggtttaagggaggaggtttagtacggtcgttttcgtagtttcgtttaggcgttttttttttttttttttttttcgcggcggtcgcggcggcggttggagcgggagtcgggggcggcgaggggcggagtcggggcggagttacggcgttggcggtttcggcgacgacggtaggtgtggatggggcgaaggtgcgggaacgtttattttcgcgcgtttttttcggggattagggcggttttttaggaggagtttggtgagtagttgcgatttgtgtataatttggggcgtcgttaggggttcgtaggttttacgttcggcgtttggagaaggaagacgcgcgttttcggtcgcggcgtcgaagtcggttgggggatcgtttggtttcgggttagagttgggaggcggtgtttcgtgagtcgtttggtttggggtgcggggggcgggaagcggttttttcgtgtgcgtttgggcgaggtcgggcggcgttttt

SEQ ID NO: 28776 - DNA, 649 bp, Artificial Sequence
  chemically treated genomic DNA (Homo sapiens) CpG-island No: 28776
aaaaacgccgcccgacctcgcccaaacgcacacgaaaaaaccgcttcccgccccccgcaccccaaaccaaacgactcacgaaacaccgcctcccaactctaacccgaaaccaaacgatcccccaaccgacttcgacgccgcgaccgaaaacgcgcgtcttccttctccaaacgccgaacgtaaaacctacgaacccctaacgacgccccaaattatacacaaatcgcaactactcaccaaactcctcctaaaaaaccgccctaatccccgaaaaaaacgcgcgaaaataaacgttcccgcaccttcgccccatccacacctaccgtcgtcgccgaaaccgccaacgccgtaactccgccccgactccgcccctcgccgcccccgactcccgctccaaccgccgccgcgaccgccgcgaaaaaaaaaaaaaaaaaaaaaacgcctaaacgaaactacgaaaacgaccgtactaaacctcctcccttaaacccgaacgaaacccaaatttctccactacaacgcaactcccgaataacgaaattttataaaaaaaacgacgaccactacgctcgcttttaacacaataaccctttacgaataaaaacttctcgcaatcaaaactaaaaaaaaaaaaatccacctacaaaaa

SEQ ID NO: 28777 - DNA, 1084 bp, Artificial Sequence
  chemically treated genomic DNA (Homo sapiens) CpG-island No: 28777
atttttgttattttggagtttaggtcgagtagcgagtaggggttgttcgcggcggcggcggcggcggtagcggcggcggtagcggtcgattgcgggaagaagacgcgtgcggcggtagcggcggcggtcgcggtcgttttttcgggattggcgagtagcgatttaggtattaggtcgtcgttcgttttcgcgtgtagttcggcgttcgttttgagcgtagggtgttcggcgttcgttacgtcgtttaggtcgtagggtatcgggaaggcgaatttgttttttttgagtagcgttttgggtttgcgtcgcggtcggtatttgtagtcggggtgtttttttatgtgtatggcgcgtagacgtttggtttcgtcgatgaacggtcgttttttcgattttgtgagtagtttttattcggcgtttaagcgtttgttgattttcgagttgtgtattttggggtttttttgggttattttgcgtcgttgagttcgcgattatattatgaaggcgtttatgggtcgtttgacgtggtttatcggtttggatatgttttcgttttgtcgcggttgtagttcgtcgtttttcgggttttcgttttcggttcggaggaaattaatgttggttgttcgcggagattcgttcggtcggtcggggttcgtcgcgtttcggcgtcgttttcgtttcggaggagggggttgggggattagtttagggttacgtcgcgtttcgggtcgttttagtgttttcggtcgagcgttcgagtaggttgtttttgggatattttaatttttcggcggtgtttttttttcgcggcggtagtttgttttttacgttttttgggtttttcgtttgtagtggcgtttgttggtgagtttttcgtaggtagcggcggtcgggtagagcgtttttttttttcggtcgtttttttttaaatgtaaagcgtttttaaaagttgcgtcgcggagatttttcgaagttgagtcgaggagttcgtcgtcgcgtgttgttaagtgttaaagggggtttttagcggttggagtgtttgggtttttttcggtgatttttttatttgatagaagtagatggg

SEQ ID NO: 28778 - DNA, 1084 bp, Artificial Sequence
  chemically treated genomic DNA (Homo sapiens) CpG-island No: 28778
cccatctacttctatcaaataaaaaaatcaccgaaaaaaacccaaacactccaaccgctaaaaaccccctttaacacttaacaacacgcgacgacgaactcctcgactcaacttcgaaaaatctccgcgacgcaacttttaaaaacgctttacatttaaaaaaaaacgaccgaaaaaaaaaaacgctctacccgaccgccgctacctacgaaaaactcaccaacaaacgccactacaaacgaaaaacccaaaaaacgtaaaaaacaaactaccgccgcgaaaaaaaaacaccgccgaaaaattaaaatatcccaaaaacaacctactcgaacgctcgaccgaaaacactaaaacgacccgaaacgcgacgtaaccctaaactaatcccccaaccccctcctccgaaacgaaaacgacgccgaaacgcgacgaaccccgaccgaccgaacgaatctccgcgaacaaccaacattaatttcctccgaaccgaaaacgaaaacccgaaaaacgacgaactacaaccgcgacaaaacgaaaacatatccaaaccgataaaccacgtcaaacgacccataaacgccttcataatataatcgcgaactcaacgacgcaaaataacccaaaaaaaccccaaaatacacaactcgaaaatcaacaaacgcttaaacgccgaataaaaactactcacaaaatcgaaaaaacgaccgttcatcgacgaaaccaaacgtctacgcgccatacacataaaaaaacaccccgactacaaataccgaccgcgacgcaaacccaaaacgctactcaaaaaaaacaaattcgccttcccgataccctacgacctaaacgacgtaacgaacgccgaacaccctacgctcaaaacgaacgccgaactacacgcgaaaacgaacgacgacctaatacctaaatcgctactcgccaatcccgaaaaaacgaccgcgaccgccgccgctaccgccgcacgcgtcttcttcccgcaatcgaccgctaccgccgccgctaccgccgccgccgccgccgcgaacaacccctactcgctactcgacctaaactccaaaataacaaaaat

SEQ ID NO: 28779 - DNA, 1084 bp, Artificial Sequence
  chemically treated genomic DNA (Homo sapiens) CpG-island No: 28779
tttatttgtttttgttaaatgagaaagttatcgaggagaatttaaatattttagtcgttgagagttttttttggtatttggtagtacgcggcggcgggtttttcggtttaatttcgaggagttttcgcgacgtaatttttggggacgttttgtatttaagagagaacgatcgaggaggaggagcgttttgttcggtcgtcgttatttgcggggagtttattagtaaacgttattgtagacgaaggatttaaagaacgtaaagggtaaattgtcgtcgcggggagggggtatcgtcgagaagttagagtgttttagagataatttgttcgagcgttcggtcggagatattaaggcggttcggggcgcggcgtggttttgggttggttttttagttttttttttcggggcgggagcgacgtcggggcgcgacgagtttcggtcggtcgagcgggttttcgcgggtagttaatattgatttttttcgggtcgagggcgagggttcgggaggcggcgggttgtagtcgcggtagggcgagagtatgtttaagtcggtggattacgttaagcggtttatgaacgtttttatggtgtggtcgcgggtttagcggcgtaagatggtttaggagaattttaagatgtataattcggagattagtaagcgtttgggcgtcgagtggaaattgtttatagagtcggagaagcggtcgtttatcgacgaggttaagcgtttacgcgttatgtatatgaaggagtatttcgattataagtatcggtcgcggcgtaagtttaagacgttgtttaagaaggataagttcgttttttcggtgttttacggtttgggcggcgtggcggacgtcgagtattttgcgtttaaggcgggcgtcgggttgtacgcgggggcgggcggcggtttggtgtttgagtcgttgttcgttaatttcgagaaggcggtcgcggtcgtcgtcgttgtcgtcgtacgcgtttttttttcgtagtcggtcgttgtcgtcgtcgttgtcgtcgtcgtcgtcgtcgcgggtagtttttattcgttgttcgatttgggttttaaaatggtagagat

SEQ ID NO: 28780 - DNA, 1084 bp, Artificial Sequence
  chemically treated genomic DNA (Homo sapiens) CpG-island No: 28780
atctctaccattttaaaacccaaatcgaacaacgaataaaaactacccgcgacgacgacgacgacgacaacgacgacgacaacgaccgactacgaaaaaaaaacgcgtacgacgacaacgacgacgaccgcgaccgccttctcgaaattaacgaacaacgactcaaacaccaaaccgccgcccgcccccgcgtacaacccgacgcccgccttaaacgcaaaatactcgacgtccgccacgccgcccaaaccgtaaaacaccgaaaaaacgaacttatccttcttaaacaacgtcttaaacttacgccgcgaccgatacttataatcgaaatactccttcatatacataacgcgtaaacgcttaacctcgtcgataaacgaccgcttctccgactctataaacaatttccactcgacgcccaaacgcttactaatctccgaattatacatcttaaaattctcctaaaccatcttacgccgctaaacccgcgaccacaccataaaaacgttcataaaccgcttaacgtaatccaccgacttaaacatactctcgccctaccgcgactacaacccgccgcctcccgaaccctcgccctcgacccgaaaaaaatcaatattaactacccgcgaaaacccgctcgaccgaccgaaactcgtcgcgccccgacgtcgctcccgccccgaaaaaaaaaactaaaaaaccaacccaaaaccacgccgcgccccgaaccgccttaatatctccgaccgaacgctcgaacaaattatctctaaaacactctaacttctcgacgataccccctccccgcgacgacaatttaccctttacgttctttaaatccttcgtctacaataacgtttactaataaactccccgcaaataacgacgaccgaacaaaacgctcctcctcctcgatcgttctctcttaaatacaaaacgtccccaaaaattacgtcgcgaaaactcctcgaaattaaaccgaaaaacccgccgccgcgtactaccaaataccaaaaaaaactctcaacgactaaaatatttaaattctcctcgataactttctcatttaacaaaaacaaataaa

SEQ ID NO: 28781 - DNA, 510 bp, Artificial Sequence
  chemically treated genomic DNA (Homo sapiens) CpG-island No: 28781
tggtcgttcggttttagaggaagttttttcggttcgtcgaggagtcgcgttcggtcgttttttgggttatgtcggttttgttcgtttcgagtttttttaggcgcgtttgtcgatttagggttttcggagttcgtcggtcgcggagggtagcgtagtttttacgcggcgtcgtaggtttggtatcggtcgcgttttcgtttcgtttttttcggtagtcgtttggtatttgtaattaatttcgtttaagttttttgcgtcgcggcgtttttttcggcgcgtttttgggagcgtgcgttcgcgagttcgtcgcgttcggggtttttttgttttcgttgttgtggttagagtcgagtcggcgtaggggcggaggtgttgtaggagagttaaggaaaacgggttattattttagttcgtaggttcgcgttgtggtatttttcgttttttttattttcgcggcgtagggggtttttttttagtttaggtcgttttttgtatcggtttaggtgagtg

SEQ ID NO: 28782 - DNA, 510 bp, Artificial Sequence
  chemically treated genomic DNA (Homo sapiens) CpG-island No: 28782
cactcacctaaaccgatacaaaaaacgacctaaactaaaaaaaaaccccctacgccgcgaaaataaaaaaaacgaaaaataccacaacgcgaacctacgaactaaaataataacccgttttccttaactctcctacaacacctccgcccctacgccgactcgactctaaccacaacaacgaaaacaaaaaaaccccgaacgcgacgaactcgcgaacgcacgctcccaaaaacgcgccgaaaaaaacgccgcgacgcaaaaaacttaaacgaaattaattacaaataccaaacgactaccgaaaaaaacgaaacgaaaacgcgaccgataccaaacctacgacgccgcgtaaaaactacgctaccctccgcgaccgacgaactccgaaaaccctaaatcgacaaacgcgcctaaaaaaactcgaaacgaacaaaaccgacataacccaaaaaacgaccgaacgcgactcctcgacgaaccgaaaaaacttcctctaaaaccgaacgacca

SEQ ID NO: 28783 - DNA, 510 bp, Artificial Sequence
  chemically treated genomic DNA (Homo sapiens) CpG-island No: 28783
tatttatttgagtcggtgtagagggcggtttgggttgggaaggggttttttgcgtcgcgggagtggggagagcgggaggtgttatagcgcggatttgcgaattgaggtgatggttcgttttttttaatttttttgtagtattttcgtttttgcgtcggttcggttttggttatagtagcgaggatagaggggtttcgggcgcggcggattcgcgggcgtacgtttttaggagcgcgtcgagaggggcgtcgcggcgtaggaaatttgggcgaagttagttgtaagtgttaggcggttgtcgagaagagcgaggcggggacgcggtcggtgttaggtttgcggcgtcgcgtggaggttgcgttgtttttcgcggtcggcgagtttcgggagttttaagtcggtaggcgcgtttgaaggggttcggagcgaatagagtcggtatggtttaggggacggtcggacgcggtttttcggcgagtcgggagaattttttttgaggtcgggcgatta

SEQ ID NO: 28784 - DNA, 510 bp, Artificial Sequence
  chemically treated genomic DNA (Homo sapiens) CpG-island No: 28784
taatcgcccgacctcaaaaaaaattctcccgactcgccgaaaaaccgcgtccgaccgtcccctaaaccataccgactctattcgctccgaaccccttcaaacgcgcctaccgacttaaaactcccgaaactcgccgaccgcgaaaaacaacgcaacctccacgcgacgccgcaaacctaacaccgaccgcgtccccgcctcgctcttctcgacaaccgcctaacacttacaactaacttcgcccaaatttcctacgccgcgacgcccctctcgacgcgctcctaaaaacgtacgcccgcgaatccgccgcgcccgaaacccctctatcctcgctactataaccaaaaccgaaccgacgcaaaaacgaaaatactacaaaaaaattaaaaaaaacgaaccatcacctcaattcgcaaatccgcgctataacacctcccgctctccccactcccgcgacgcaaaaaaccccttcccaacccaaaccgccctctacaccgactcaaataaata

SEQ ID NO: 28785 - DNA, 609 bp, Artificial Sequence
  chemically treated genomic DNA (Homo sapiens) CpG-island No: 28785
ggttttttcgtcgttggaggatttggatttgagcggagaggaggtttagcggtttattttcgttttttaggattcggagtttcggcgaatgtttttttagtacgtcgaggagtttatcgattcggagaatcggcggcgttacgaggcggagattatcgcgttagagcgtgagcgcggggtggaagtgcggttcgtgtattcggagttcggttatgtgttgcgtattagtttggacggggcgcggcgttgttttgtgaatgtttgtagtaacgcgttggtgggcgcgtttagtagtcggttcggtttcggtggcgatcggggcgtagtttttggtagttattggtttttgttttatagtttggcgttcggtcgcgagtacgcggggcgtagtagtagtcgttatatggtttacgacgtggttttttatttagacgcgtttgcgttggttcggcggtacgagggttttcgttagatgttggacgttacggttttggaggtcgtcgagaagtagttcggcgtgaagttggatcgtaggaatgttaagattttgaaggttaagtataaggggattttagaggttgcggtgttgcgtacgtttttgttcggggt

SEQ ID NO: 28786 - DNA, 609 bp, Artificial Sequence
  chemically treated genomic DNA (Homo sapiens) CpG-island No: 28786
accccgaacaaaaacgtacgcaacaccgcaacctctaaaatccccttatacttaaccttcaaaatcttaacattcctacgatccaacttcacgccgaactacttctcgacgacctccaaaaccgtaacgtccaacatctaacgaaaaccctcgtaccgccgaaccaacgcaaacgcgtctaaataaaaaaccacgtcgtaaaccatataacgactactactacgccccgcgtactcgcgaccgaacgccaaactataaaacaaaaaccaataactaccaaaaactacgccccgatcgccaccgaaaccgaaccgactactaaacgcgcccaccaacgcgttactacaaacattcacaaaacaacgccgcgccccgtccaaactaatacgcaacacataaccgaactccgaatacacgaaccgcacttccaccccgcgctcacgctctaacgcgataatctccgcctcgtaacgccgccgattctccgaatcgataaactcctcgacgtactaaaaaaacattcgccgaaactccgaatcctaaaaaacgaaaataaaccgctaaacctcctctccgctcaaatccaaatcctccaacgacgaaaaaacc

SEQ ID NO: 28787 - DNA, 609 bp, Artificial Sequence
  chemically treated genomic DNA (Homo sapiens) CpG-island No: 28787
atttcgggtaggggcgtgcgtagtatcgtagtttttggggtttttttatatttggtttttagggttttggtatttttgcggtttagttttacgtcgaattgtttttcgacggtttttagggtcgtggcgtttagtatttggcggaagttttcgtgtcgtcgggttagcgtaagcgcgtttggatggaagattacgtcgtagattatgtagcggttgttgttgcgtttcgcgtattcgcggtcgggcgttaggttgtagggtagggattagtggttgttaggagttgcgtttcggtcgttatcggagtcgggtcggttgttgggcgcgtttattaacgcgttgttgtagatatttataaagtagcgtcgcgtttcgtttaggttggtgcgtagtatatggtcgggtttcgggtgtacgaatcgtatttttatttcgcgtttacgttttagcgcggtgattttcgtttcgtagcgtcgtcggtttttcgggtcggtgagtttttcggcgtattgggagaatattcgtcggaatttcgggttttggaaggcggaggtgagtcgttggatttttttttcgtttaggtttaagttttttagcgacgaggaggtt

SEQ ID NO: 28788 - DNA, 609 bp, Artificial Sequence
  chemically treated genomic DNA (Homo sapiens) CpG-island No: 28788
aacctcctcgtcgctaaaaaacttaaacctaaacgaaaaaaaaatccaacgactcacctccgccttccaaaacccgaaattccgacgaatattctcccaatacgccgaaaaactcaccgacccgaaaaaccgacgacgctacgaaacgaaaatcaccgcgctaaaacgtaaacgcgaaataaaaatacgattcgtacacccgaaacccgaccatatactacgcaccaacctaaacgaaacgcgacgctactttataaatatctacaacaacgcgttaataaacgcgcccaacaaccgacccgactccgataacgaccgaaacgcaactcctaacaaccactaatccctaccctacaacctaacgcccgaccgcgaatacgcgaaacgcaacaacaaccgctacataatctacgacgtaatcttccatccaaacgcgcttacgctaacccgacgacacgaaaacttccgccaaatactaaacgccacgaccctaaaaaccgtcgaaaaacaattcgacgtaaaactaaaccgcaaaaataccaaaaccctaaaaaccaaatataaaaaaaccccaaaaactacgatactacgcacgcccctacccgaaat

SEQ ID NO: 28789 - DNA, 737 bp, Artificial Sequence
  chemically treated genomic DNA (Homo sapiens) CpG-island No: 28789
tttttcggattttttttatttttattagtattcggtagttttcgggtttcgggcgttttttttttcggaagcggttttgtagttcgtttttatcgagtttcgttatagcgtggtgtagcgttattacgtggatttttaggattatcgttgttttagggatttagtttcgagtttcgtgttttatgagttggtgattattatcgaattgtcgttgttgcgttcggtcgagtaggcggcgttggaggtaacgagaaagttgttgtgtttcgattcgaggaaatttgattatcggttgcggttttcgttttcgtatttagtggacgatggtcgcggtaaggtataatttaataaggttcggcggtagttggtggttacgttgttagtggtgttgtcggtcgcgcgtcgggagttcgttgtcgtcgtcgtcgtcgtcgcgtcggaagagttcgcggatcggttcggaattgacggttaggtttgcgttttcgttcgcgagggggaggcgggattcgcgaggagtcgcgcggaggacggaggttacgatatttgcgtggttggggttgcgggtttcggggttattattttgggcgattcggaggtggcgttttcgtcggtcgtagttggagaggagcgtgtttttaagtcgggggagtaggatttgagtaggtacgcggggttatcgtcgggtagcgtggaggagttattttttggaggagaaaatttatttggtggcggag

SEQ ID NO: 28790 - DNA, 737 bp, Artificial Sequence
  chemically treated genomic DNA (Homo sapiens) CpG-island No: 28790
ctccgccaccaaataaattttctcctccaaaaaataactcctccacgctacccgacgataaccccgcgtacctactcaaatcctactcccccgacttaaaaacacgctcctctccaactacgaccgacgaaaacgccacctccgaatcgcccaaaataataaccccgaaacccgcaaccccaaccacgcaaatatcgtaacctccgtcctccgcgcgactcctcgcgaatcccgcctccccctcgcgaacgaaaacgcaaacctaaccgtcaattccgaaccgatccgcgaactcttccgacgcgacgacgacgacgacgacaacgaactcccgacgcgcgaccgacaacaccactaacaacgtaaccaccaactaccgccgaaccttattaaattataccttaccgcgaccatcgtccactaaatacgaaaacgaaaaccgcaaccgataatcaaatttcctcgaatcgaaacacaacaactttctcgttacctccaacgccgcctactcgaccgaacgcaacaacgacaattcgataataatcaccaactcataaaacacgaaactcgaaactaaatccctaaaacaacgataatcctaaaaatccacgtaataacgctacaccacgctataacgaaactcgataaaaacgaactacaaaaccgcttccgaaaaaaaaaacgcccgaaacccgaaaactaccgaatactaataaaaataaaaaaaatccgaaaaa

SEQ ID NO: 28791 - DNA, 737 bp, Artificial Sequence
  chemically treated genomic DNA (Homo sapiens) CpG-island No: 28791
tttcgttattaggtgagtttttttttttaggagatggtttttttacgttgttcggcggtgatttcgcgtgtttgtttaagttttgttttttcggtttggggatacgtttttttttagttgcggtcggcggaggcgttattttcgggtcgtttagggtggtgatttcggagttcgtagttttagttacgtaggtatcgtggttttcgtttttcgcgcgatttttcgcgggtttcgtttttttttcgcgagcggaagcgtaggtttggtcgttagtttcggatcggttcgcggattttttcggcgcggcggcggcgacggcgatagcgggttttcggcgcgcggtcggtagtattattggtagcgtaattattagttgtcgtcgggttttgttgaattgtgttttgtcgcggttatcgtttattgggtacgggagcgagagtcgtagtcggtagttaggttttttcgagtcgaggtatagtagttttttcgttatttttagcgtcgtttgttcggtcgagcgtaatagcggtagttcgatggtgattattagtttatggggtacggggttcggggttgagtttttggagtagcggtaattttggaggtttacgtggtggcgttgtattacgttgtagcgaggttcggtgggggcgggttgtaaggtcgttttcggaggggagagcgttcggggttcgggaattgtcgggtattggtaagggtaggggaagttcgggaga

SEQ ID NO: 28792 - DNA, 737 bp, Artificial Sequence
  chemically treated genomic DNA (Homo sapiens) CpG-island No: 28792
tctcccgaacttcccctacccttaccaatacccgacaattcccgaaccccgaacgctctcccctccgaaaacgaccttacaacccgcccccaccgaacctcgctacaacgtaatacaacgccaccacgtaaacctccaaaattaccgctactccaaaaactcaaccccgaaccccgtaccccataaactaataatcaccatcgaactaccgctattacgctcgaccgaacaaacgacgctaaaaataacgaaaaaactactatacctcgactcgaaaaaacctaactaccgactacgactctcgctcccgtacccaataaacgataaccgcgacaaaacacaattcaacaaaacccgacgacaactaataattacgctaccaataatactaccgaccgcgcgccgaaaacccgctatcgccgtcgccgccgccgcgccgaaaaaatccgcgaaccgatccgaaactaacgaccaaacctacgcttccgctcgcgaaaaaaaaacgaaacccgcgaaaaatcgcgcgaaaaacgaaaaccacgatacctacgtaactaaaactacgaactccgaaatcaccaccctaaacgacccgaaaataacgcctccgccgaccgcaactaaaaaaaaacgtatccccaaaccgaaaaaacaaaacttaaacaaacacgcgaaatcaccgccgaacaacgtaaaaaaaccatctcctaaaaaaaaaaactcacctaataacgaaa

SEQ ID NO: 28793 - DNA, 1026 bp, Artificial Sequence
  chemically treated genomic DNA (Homo sapiens) CpG-island No: 28793
gggatcgtcgggattagggaagtcgtcgatacgttggagattttgcggatgtttatagttatagaggggtggtttttatcgcggtcgtcggtatttcgcgcgggttcggcgtttagtaacggtggggcgagggtttcgttttttttttgtcgtttattgttgttttagaggacgaagtcgtaggcggttattacgagcgttaggattagtatttttcgtttgtagatgcggaattttatggtttttagggtcgggagcgtaggcgggcgggcgcggaaaggagtagttgtttttgtacggaaggggcgggcgggcggcggtcgtcgttttggtttgttacggtcggaattggttttcgcggttgttttcgttaatttatttcgggtttcgggggttttggggttcgagattttttatttatttcgcgtcgtttgcgttttatatattttcgtttggtagttatagttcgagtatcggcgtcgcgtttaggagtcgcggttcggtttcgttttcgttttttttatttagtattacgggtttcggaaaaagtttagtcgcggttttaatcgtattttagtttcgttatttgcgtttttagcggttttgcgttttttgcgtttttatttttataggggttttagacggttagaattgagcgacgcggtttcgttttatttcggcggggatcgttatgataattcgtaattgtttcgcggtatatcgcggtttttcggtttatattttttcggttcgttttttagatcgttggttggtgttttttagacgcgatcgaaggcgtttgatcgtcgtggtcggttgtttattggtttgtagtattgtcgtttaggtgtagtttttattttcgtttgtttttttttttttttgttaggcgagagttgcgaaaggcgagagttgcgaagggttaggtgtcgggcgttgtttttcggtaagttaagaacgaggttgtagcggttttaataggagttttttttgtttagaattttgggtaggattaggtttttttag

SEQ ID NO: 28794 - DNA, 1026 bp, Artificial Sequence
  chemically treated genomic DNA (Homo sapiens) CpG-island No: 28794
ctaaaaaaacctaatcctacccaaaattctaaacaaaaaaaactcctattaaaaccgctacaacctcgttcttaacttaccgaaaaacaacgcccgacacctaacccttcgcaactctcgcctttcgcaactctcgcctaacaaaaaaaaaaaaaaacaaacgaaaataaaaactacacctaaacgacaatactacaaaccaataaacaaccgaccacgacgatcaaacgccttcgatcgcgtctaaaaaacaccaaccaacgatctaaaaaacgaaccgaaaaaatataaaccgaaaaaccgcgatataccgcgaaacaattacgaattatcataacgatccccgccgaaataaaacgaaaccgcgtcgctcaattctaaccgtctaaaacccctataaaaataaaaacgcaaaaaacgcaaaaccgctaaaaacgcaaataacgaaactaaaatacgattaaaaccgcgactaaactttttccgaaacccgtaatactaaataaaaaaaacgaaaacgaaaccgaaccgcgactcctaaacgcgacgccgatactcgaactataactaccaaacgaaaatatataaaacgcaaacgacgcgaaataaataaaaaatctcgaaccccaaaacccccgaaacccgaaataaattaacgaaaacaaccgcgaaaaccaattccgaccgtaacaaaccaaaacgacgaccgccgcccgcccgccccttccgtacaaaaacaactactcctttccgcgcccgcccgcctacgctcccgaccctaaaaaccataaaattccgcatctacaaacgaaaaatactaatcctaacgctcgtaataaccgcctacgacttcgtcctctaaaacaacaataaacgacaaaaaaaaaacgaaaccctcgccccaccgttactaaacgccgaacccgcgcgaaataccgacgaccgcgataaaaaccacccctctataactataaacatccgcaaaatctccaacgtatcgacgacttccctaatcccgacgatccc

SEQ ID NO: 28795 - DNA, 1026 bp, Artificial Sequence
  chemically treated genomic DNA (Homo sapiens) CpG-island No: 28795
ttaagaaggtttagttttatttaggattttgagtaagggaggtttttattggagtcgttatagtttcgtttttagtttatcgagaaatagcgttcgatatttggtttttcgtagttttcgtttttcgtagttttcgtttaataggaaagggaagaaataggcggaagtgggaattgtatttgagcgatagtattgtaaattaataggtagtcggttacggcggttaggcgttttcggtcgcgtttggaaagtattaattaacggtttaaggggcgggtcggaggggtgtgggtcggagggtcgcggtgtgtcgcggggtagttgcgggttgttataacggttttcgtcggagtgaggcgaggtcgcgtcgtttagttttggtcgtttagggtttttgtaaggatgagagcgtagaggacgtagggtcgttggaggcgtaggtaacgaagttagggtgcggttgggatcgcggttgagtttttttcgggattcgtggtgttgaatggagaggacggagacgaagtcgagtcgcggtttttaggcgcggcgtcgatgttcgagttgtagttgttaggcgaggatgtgtggagcgtaggcggcgcggggtaaatgagaggtttcgggttttaggattttcggggttcgggatgagttagcgagggtagtcgcgggggttagtttcgatcgtgataggttaaggcgacggtcgtcgttcgttcgtttttttcgtgtagaagtagttgttttttttcgcgttcgttcgtttgcgttttcggttttggagattatgaggtttcgtatttataaacggaaggtgttaattttgacgttcgtggtggtcgtttgcggtttcgttttttggagtagtaatgggcgataaaggaagaacgaggttttcgttttatcgttgttggacgtcgaattcgcgcggggtgtcggcggtcgcggtggggattatttttttgtggttgtgggtattcgtagggtttttaacgtgtcggcggtttttttggtttcggcggtttt

SEQ ID NO: 28796 - DNA, 1026 bp, Artificial Sequence
  chemically treated genomic DNA (Homo sapiens) CpG-island No: 28796
aaaaccgccgaaaccaaaaaaaccgccgacacgttaaaaaccctacgaatacccacaaccacaaaaaaataatccccaccgcgaccgccgacaccccgcgcgaattcgacgtccaacaacgataaaacgaaaacctcgttcttcctttatcgcccattactactccaaaaaacgaaaccgcaaacgaccaccacgaacgtcaaaattaacaccttccgtttataaatacgaaacctcataatctccaaaaccgaaaacgcaaacgaacgaacgcgaaaaaaaacaactacttctacacgaaaaaaacgaacgaacgacgaccgtcgccttaacctatcacgatcgaaactaacccccgcgactaccctcgctaactcatcccgaaccccgaaaatcctaaaacccgaaacctctcatttaccccgcgccgcctacgctccacacatcctcgcctaacaactacaactcgaacatcgacgccgcgcctaaaaaccgcgactcgacttcgtctccgtcctctccattcaacaccacgaatcccgaaaaaaactcaaccgcgatcccaaccgcaccctaacttcgttacctacgcctccaacgaccctacgtcctctacgctctcatccttacaaaaaccctaaacgaccaaaactaaacgacgcgacctcgcctcactccgacgaaaaccgttataacaacccgcaactaccccgcgacacaccgcgaccctccgacccacacccctccgacccgccccttaaaccgttaattaatactttccaaacgcgaccgaaaacgcctaaccgccgtaaccgactacctattaatttacaatactatcgctcaaatacaattcccacttccgcctatttcttccctttcctattaaacgaaaactacgaaaaacgaaaactacgaaaaaccaaatatcgaacgctatttctcgataaactaaaaacgaaactataacgactccaataaaaacctcccttactcaaaatcctaaataaaactaaaccttcttaa

SEQ ID NO: 28797 - DNA, 559 bp, Artificial Sequence
  chemically treated genomic DNA (Homo sapiens) CpG-island No: 28797
ggtcgaagacggtgggtacgtattttttcgggaaggcgtcgttggtatagtttatgagtaggtacgttttgtttatcgtttcgtcgtcgattattacgtatttgagtattagcgcgtcgggttcgtgagttatgatgttgttgtcggtcggttttcgggtatggttttttcggagttttcgtttcggtttcgggtttagttttagttcgtttggagggttcgtcgtcgtcgtcgtcgttttacgtcgcggggtcgttttttcggttttaagtagtaatttttttcgtcggaggggagagggtcgtaggttttcggcgttgtcgtcgtcgcggtcgtcgttcggattttcgtttcggtttcggtcgtcgcgttcgttcgttgttttcgttattcggcgttcgcgtttttttttcgtttcggtttttttaggaggattcgtcggattataagatcggtcggtttcgggggagacggtaattgtggggagggcggtcgatttgtttttttaagttagggagaatattgtgggagaaagaatttattgaatagaattgtagtt

SEQ ID NO: 28798 - DNA, 559 bp, Artificial Sequence
  chemically treated genomic DNA (Homo sapiens) CpG-island No: 28798
aactacaattctattcaataaattctttctcccacaatattctccctaacttaaaaaaacaaatcgaccgccctccccacaattaccgtctcccccgaaaccgaccgatcttataatccgacgaatcctcctaaaaaaaccgaaacgaaaaaaaaacgcgaacgccgaataacgaaaacaacgaacgaacgcgacgaccgaaaccgaaacgaaaatccgaacgacgaccgcgacgacgacaacgccgaaaacctacgaccctctcccctccgacgaaaaaaattactacttaaaaccgaaaaaacgaccccgcgacgtaaaacgacgacgacgacgacgaaccctccaaacgaactaaaactaaacccgaaaccgaaacgaaaactccgaaaaaaccatacccgaaaaccgaccgacaacaacatcataactcacgaacccgacgcgctaatactcaaatacgtaataatcgacgacgaaacgataaacaaaacgtacctactcataaactataccaacgacgccttcccgaaaaaatacgtacccaccgtcttcgacc

SEQ ID NO: 28799 - DNA, 559 bp, Artificial Sequence
  chemically treated genomic DNA (Homo sapiens) CpG-island No: 28799
aattgtagttttgtttagtgaatttttttttttataatattttttttagtttaaaaaagtaggtcggtcgttttttttatagttgtcgtttttttcggggtcggtcggttttatgattcggcggatttttttggggaggtcgggacggggagagggcgcgggcgtcgagtggcgggggtagcgggcgggcgcggcgatcggggtcggggcggggattcgggcggcgatcgcggcggcggtagcgtcgggagtttgcggttttttttttttcggcgaggggagttgttgtttggggtcgggggggcggtttcgcggcgtggagcggcggcgacggcggcggattttttaggcgggttgaggttgagttcggggtcggggcgggggtttcggggggattatgttcggaggtcggtcggtagtagtattatggtttacgggttcggcgcgttgatgtttaagtgcgtggtggtcggcgacggggcggtgggtaagacgtgtttatttatgagttgtgttaacgacgttttttcggaggagtacgtgtttatcgttttcgatt

SEQ ID NO: 28800 - DNA, 559 bp, Artificial Sequence
  chemically treated genomic DNA (Homo sapiens) CpG-island No: 28800
aatcgaaaacgataaacacgtactcctccgaaaaaacgtcgttaacacaactcataaataaacacgtcttacccaccgccccgtcgccgaccaccacgcacttaaacatcaacgcgccgaacccgtaaaccataatactactaccgaccgacctccgaacataatccccccgaaacccccgccccgaccccgaactcaacctcaacccgcctaaaaaatccgccgccgtcgccgccgctccacgccgcgaaaccgcccccccgaccccaaacaacaactcccctcgccgaaaaaaaaaaaaccgcaaactcccgacgctaccgccgccgcgatcgccgcccgaatccccgccccgaccccgatcgccgcgcccgcccgctacccccgccactcgacgcccgcgccctctccccgtcccgacctccccaaaaaaatccgccgaatcataaaaccgaccgaccccgaaaaaaacgacaactataaaaaaaacgaccgacctacttttttaaactaaaaaaaatattataaaaaaaaaaattcactaaacaaaactacaatt

SEQ ID NO: 28801 - DNA, 603 bp, Artificial Sequence
  chemically treated genomic DNA (Homo sapiens) CpG-island No: 28801
gtagttttatttcgtttaacggttataattacgttaagttggttttgaaattttttttttttcgttattcggcgtcgttatcggggttttcgcgtacgcgggttgtttattgatttgtttgtttgttggattggttcgcgattcgggttgttttagtatcgtgtttgtatgaagttcgcgggaaacggtttttttttttttttagtagggtcgggttttcgtcgtggttgcgtatcgggattgattatttggattcgggttcgcgttcgggaaatcggtagtcggcgggggcgtaacgttttttttttcgagcgcgtagttggtagcggtggttgtttttgttcggggaggatttcgagggttttagttgttgacgttttacgcgttgcgggcgtacgtcgggtcgttgtttttcgagggaaggtaggtgtgtttttgcgttatagggaaaggtatttagaattgtttgagtggtttcgtaagttagcgagggcgtatttttcggcgcggacgggttgttggtggttttggtggttgtttttcggaggtatatttggtacgtcgaaggggggttttatatggttgtatttgatttggtaattt

SEQ ID NO: 28802 - DNA, 603 bp, Artificial Sequence
  chemically treated genomic DNA (Homo sapiens) CpG-island No: 28802
aaattaccaaatcaaatacaaccatataaaaccccccttcgacgtaccaaatatacctccgaaaaacaaccaccaaaaccaccaacaacccgtccgcgccgaaaaatacgccctcgctaacttacgaaaccactcaaacaattctaaatacctttccctataacgcaaaaacacacctaccttccctcgaaaaacaacgacccgacgtacgcccgcaacgcgtaaaacgtcaacaactaaaaccctcgaaatcctccccgaacaaaaacaaccaccgctaccaactacgcgctcgaaaaaaaaaacgttacgcccccgccgactaccgatttcccgaacgcgaacccgaatccaaataatcaatcccgatacgcaaccacgacgaaaacccgaccctactaaaaaaaaaaaaaaaccgtttcccgcgaacttcatacaaacacgatactaaaacaacccgaatcgcgaaccaatccaacaaacaaacaaatcaataaacaacccgcgtacgcgaaaaccccgataacgacgccgaataacgaaaaaaaaaaaatttcaaaaccaacttaacgtaattataaccgttaaacgaaataaaactac

SEQ ID NO: 28803 - DNA, 603 bp, Artificial Sequence
  chemically treated genomic DNA (Homo sapiens) CpG-island No: 28803
gaattgttaagttaaatatagttatataaagttttttttcgacgtgttaggtgtgttttcggagagtagttattaaaattattagtagttcgttcgcgtcgggaaatgcgttttcgttggtttacggggttatttagatagttttaagtgtttttttttgtaacgtagaggtatatttgttttttttcgggaaatagcggttcgacgtgcgttcgtaacgcgtaaagcgttaatagttgaaattttcggaatttttttcgaatagaaataattatcgttgttagttgcgcgttcgggggaaaagacgttgcgttttcgtcgattgtcggtttttcgggcgcgagttcggatttaggtggttagtttcggtacgtaattacggcgagaattcggttttgttaagggagaagggaagtcgtttttcgcgggttttatatagatacggtgttaagatagttcgagtcgcggattagtttaataggtaggtagattagtgggtagttcgcgtgcgcgaggatttcgatggcggcgtcgggtggcgggaaggaggaagttttaaagttagtttgacgtggttgtggtcgttgggcgagatgaagttat

SEQ ID NO: 28804 - DNA, 603 bp, Artificial Sequence
  chemically treated genomic DNA (Homo sapiens) CpG-island No: 28804
ataacttcatctcgcccaacgaccacaaccacgtcaaactaactttaaaacttcctccttcccgccacccgacgccgccatcgaaatcctcgcgcacgcgaactacccactaatctacctacctattaaactaatccgcgactcgaactatcttaacaccgtatctatataaaacccgcgaaaaacgacttcccttctcccttaacaaaaccgaattctcgccgtaattacgtaccgaaactaaccacctaaatccgaactcgcgcccgaaaaaccgacaatcgacgaaaacgcaacgtcttttcccccgaacgcgcaactaacaacgataattatttctattcgaaaaaaattccgaaaatttcaactattaacgctttacgcgttacgaacgcacgtcgaaccgctatttcccgaaaaaaaacaaatatacctctacgttacaaaaaaaaacacttaaaactatctaaataaccccgtaaaccaacgaaaacgcatttcccgacgcgaacgaactactaataattttaataactactctccgaaaacacacctaacacgtcgaaaaaaaactttatataactatatttaacttaacaattc

SEQ ID NO: 28805 - DNA, 566 bp, Artificial Sequence
  chemically treated genomic DNA (Homo sapiens) CpG-island No: 28805
agatggtcgcggacgaagggtatcgtttgtaaagtattgaattattagggttttttttgtaggtcgaaggtttgcgcgaatgtcggttagttattatggagatcggttcgcggtattttagtatgtttcgggattaaattgtttaattgtgagtattttcgacggtcgttttttgatgacgtatacggaagtatcgataggttttgtttttcgaagaaaagggagtcgcgtagcgtttacgggagttcggcggtagtagtcggtatcggtaattacgggtagtttttagggaattttcgtcgtgaggttagaggttttagttttcgcggtgcgtatcgttatgtatggtttttggttcgtttttttcggttagtcgagtagggtcggtataattttttttttcgaggtcgaagtagagatttaatcggtttgacgcgtgttgggttgcgggcgagttagtgatatttcggttcgtttcggcgtatttagaagggagcgggaggttttttgggcgttgcggagaagttggattgatttttgcgagagtggggagggtttgttttttt

SEQ ID NO: 28806 - DNA, 566 bp, Artificial Sequence
  chemically treated genomic DNA (Homo sapiens) CpG-island No: 28806
aaaaaaacaaaccctccccactctcgcaaaaatcaatccaacttctccgcaacgcccaaaaaacctcccgctcccttctaaatacgccgaaacgaaccgaaatatcactaactcgcccgcaacccaacacgcgtcaaaccgattaaatctctacttcgacctcgaaaaaaaaaattataccgaccctactcgactaaccgaaaaaaacgaaccaaaaaccatacataacgatacgcaccgcgaaaactaaaacctctaacctcacgacgaaaattccctaaaaactacccgtaattaccgataccgactactaccgccgaactcccgtaaacgctacgcgactcccttttcttcgaaaaacaaaacctatcgatacttccgtatacgtcatcaaaaaacgaccgtcgaaaatactcacaattaaacaatttaatcccgaaacatactaaaataccgcgaaccgatctccataataactaaccgacattcgcgcaaaccttcgacctacaaaaaaaaccctaataattcaatactttacaaacgatacccttcgtccgcgaccatct

SEQ ID NO: 28807 - DNA, 566 bp, Artificial Sequence
  chemically treated genomic DNA (Homo sapiens) CpG-island No: 28807
gggaaggtagattttttttattttcgtagaggttaatttagttttttcgtagcgtttagggggtttttcgtttttttttagatgcgtcggagcgggtcggaatattattggttcgttcgtagtttagtacgcgttaggtcggttaaatttttgtttcggtttcggaggaggaggttgtgtcggttttgttcgattaatcggagagggcgaattaaaagttatgtatgacgatacgtatcgcggggattggagtttttggttttacgacggagattttttgagagttgttcgtggttgtcggtatcggttgttgtcgtcggattttcgtaggcgttgcgcggttttttttttttcgggaggtagagtttatcggtgttttcgtgtgcgttattaggaggcgatcgtcggggatgtttatagttggatagtttggtttcgaggtatgttgggatatcgcgggtcggtttttatagtaattggtcgatattcgcgtaggttttcggtttgtagggaaggttttgatggtttagtgttttgtagacggtgtttttcgttcgcggttattt

SEQ ID NO: 28808 - DNA, 566 bp, Artificial Sequence
  chemically treated genomic DNA (Homo sapiens) CpG-island No: 28808
aaataaccgcgaacgaaaaacaccgtctacaaaacactaaaccatcaaaaccttccctacaaaccgaaaacctacgcgaatatcgaccaattactataaaaaccgacccgcgatatcccaacatacctcgaaaccaaactatccaactataaacatccccgacgatcgcctcctaataacgcacacgaaaacaccgataaactctacctcccgaaaaaaaaaaaaccgcgcaacgcctacgaaaatccgacgacaacaaccgataccgacaaccacgaacaactctcaaaaaatctccgtcgtaaaaccaaaaactccaatccccgcgatacgtatcgtcatacataacttttaattcgccctctccgattaatcgaacaaaaccgacacaacctcctcctccgaaaccgaaacaaaaatttaaccgacctaacgcgtactaaactacgaacgaaccaataatattccgacccgctccgacgcatctaaaaaaaaacgaaaaaccccctaaacgctacgaaaaaactaaattaacctctacgaaaataaaaaaaatctaccttccc

SEQ ID NO: 28809 - DNA, 611 bp, Artificial Sequence
  chemically treated genomic DNA (Homo sapiens) CpG-island No: 28809
  unsure (3, 15, 29..30, 36..37, 41..42, 44..45, 111..112, 404..405)
  unsure (407..408, 588)
agntcgttttttttntttagcgagtattnnnggagnnntgnnnnnggagagtttgtagagtttttcgattatcggtcgtaaacgtttttgggagcgtagtttgttgcgagnnncgaagggtgagacgtacggcgttttcgagttttcggcgagggtgtttgggacgcgtttttttttgcggttgcggcggcgtatagatttcggtcgagcgaggcgacgtgaggagaggtggttataggtttaagttatggcgtagaggaggggtcgggcggtgtggtcgtagggttcgcggatcgggttcgagttttttttttgtcggcgttttagtgtagtcggttatttagtagggttgggaggttattatttttagcggagatcgagtattgttgttttcgtcgttgttnnnnnnggatgtcgtagtcgtcgtcgttatcgtttttttttttgggaagcgattttatttttttttgtagttttcggttttcgtcgttgttcgcgaatgatgttgtagtcgttgtcgtcgtcgtttttgtttttgttgtagggaagcggttttatttttttatgttgtttagtagtgagaaaaanatttaggaacgatgttgattgaa

SEQ ID NO: 28810 - DNA, 611 bp, Artificial Sequence
  chemically treated genomic DNA (Homo sapiens) CpG-island No: 28810
  unsure (24, 203..204, 206..207, 499..500, 567..568, 570..571, 574..575)
  unsure (581..582, 597, 609)
ttcaatcaacatcgttcctaaatntttttctcactactaaacaacataaaaaaataaaaccgcttccctacaacaaaaacaaaaacgacgacgacaacgactacaacatcattcgcgaacaacgacgaaaaccgaaaactacaaaaaaaaataaaatcgcttcccaaaaaaaaaaacgataacgacgacgactacgacatccnnnnnnaacaacgacgaaaacaacaatactcgatctccgctaaaaataataacctcccaaccctactaaataaccgactacactaaaacgccgacaaaaaaaaaactcgaacccgatccgcgaaccctacgaccacaccgcccgacccctcctctacgccataacttaaacctataaccacctctcctcacgtcgcctcgctcgaccgaaatctatacgccgccgcaaccgcaaaaaaaaacgcgtcccaaacaccctcgccgaaaactcgaaaacgccgtacgtctcacccttcgnnnctcgcaacaaactacgctcccaaaaacgtttacgaccgataatcgaaaaactctacaaactctccnnnnncannnctccnnnaatactcgctaaanaaaaaaaacganct

SEQ ID NO: 28811 - DNA, 611 bp, Artificial Sequence
  chemically treated genomic DNA (Homo sapiens) CpG-island No: 28811
  unsure (24, 203..204, 206..207, 499..500, 567..568, 570..571, 574..575)
  unsure (581..582, 597, 609)
tttagttagtatcgtttttggatnttttttttattgttgagtagtataaaagggtggggtcgtttttttgtagtagaggtagaggcggcggcggtagcggttgtagtattattcgcgggtagcggcggagatcgagagttgtagaaaagggtggggtcgttttttaggagaagaggcggtggcggcggcggttgcggtatttnnnnnnggtagcggcggaggtagtaatgttcggttttcgttggaggtgatggttttttagttttgttaggtggtcggttgtattaggacgtcggtaggaaggagattcgagttcggttcgcggattttgcggttatatcgttcggttttttttttgcgttatggtttaagtttgtagttatttttttttacgtcgtttcgttcgatcgaggtttgtgcgtcgtcgtagtcgtagggaggggcgcgttttagatattttcgtcggggattcgggaacgtcgtgcgttttatttttcgnnnttcgtagtagattgcgtttttaaaggcgtttgcgatcggtaatcgagggattttatagattttttnnnnntannnttttnnnggtgttcgttgagngaggagggcgantt

SEQ ID NO: 28812 - DNA, 611 bp, Artificial Sequence
  chemically treated genomic DNA (Homo sapiens) CpG-island No: 28812
  unsure (3, 15, 29..30, 36..37, 41..42, 44..45, 111..112, 404..405)
  unsure (407..408, 588)
aantcgccctcctcnctcaacgaacaccnnnaaaannntannnnnaaaaaatctataaaatccctcgattaccgatcgcaaacgcctttaaaaacgcaatctactacgaannncgaaaaataaaacgcacgacgttcccgaatccccgacgaaaatatctaaaacgcgcccctccctacgactacgacgacgcacaaacctcgatcgaacgaaacgacgtaaaaaaaaataactacaaacttaaaccataacgcaaaaaaaaaaccgaacgatataaccgcaaaatccgcgaaccgaactcgaatctccttcctaccgacgtcctaatacaaccgaccacctaacaaaactaaaaaaccatcacctccaacgaaaaccgaacattactacctccgccgctaccnnnnnnaaataccgcaaccgccgccgccaccgcctcttctcctaaaaaacgaccccacccttttctacaactctcgatctccgccgctacccgcgaataatactacaaccgctaccgccgccgcctctacctctactacaaaaaaacgaccccacccttttatactactcaacaataaaaaaaanatccaaaaacgatactaactaaa

SEQ ID NO: 28813 - DNA, 562 bp, Artificial Sequence
  chemically treated genomic DNA (Homo sapiens) CpG-island No: 28813
attttggcgagtatgcgtagatcgttcgcgtacgtcgtcgttcgttgagagtaagcgtaacgggcgttttcgtttgtgacgttagggagcgtgaggacgtggggttttcgtgaatgcgtagtgggtgcgtcggttacgattttttggttaggttagggagggggcgacgttgagatgggggcggcggcggcggaagcggatcgtattttttttgtgggtaattttgaaacgaaagtgatcgaggagttttttttcgagtttttttattaggtaagcggttgggttcggttttttgtttttcgtttttcgtttcgtttagggtttggttagcggttatttcgtttttttttcgtagtcgttaggggattcgacgggtggttgtttgggggtgaaaggcgggtttgggttgcgaaacgttcgttgggtgtcgtttttttggaagattttggttcgtttaggtcgaaagtgacgattaaaggtggtggagggattttcgattaggtttttcgtggtagagatttaggggtttttgggaatatagtgtgtgtgtagggttttcgtt

SEQ ID NO: 28814 - DNA, 562 bp, Artificial Sequence
  chemically treated genomic DNA (Homo sapiens) CpG-island No: 28814
aacgaaaaccctacacacacactatattcccaaaaacccctaaatctctaccacgaaaaacctaatcgaaaatccctccaccacctttaatcgtcactttcgacctaaacgaaccaaaatcttccaaaaaaacgacacccaacgaacgtttcgcaacccaaacccgcctttcacccccaaacaaccacccgtcgaatcccctaacgactacgaaaaaaaaacgaaataaccgctaaccaaaccctaaacgaaacgaaaaacgaaaaacaaaaaaccgaacccaaccgcttacctaataaaaaaactcgaaaaaaaactcctcgatcactttcgtttcaaaattacccacaaaaaaaatacgatccgcttccgccgccgccgcccccatctcaacgtcgccccctccctaacctaaccaaaaaatcgtaaccgacgcacccactacgcattcacgaaaaccccacgtcctcacgctccctaacgtcacaaacgaaaacgcccgttacgcttactctcaacgaacgacgacgtacgcgaacgatctacgcatactcgccaaaat

SEQ ID NO: 28815 - DNA, 562 bp, Artificial Sequence
  chemically treated genomic DNA (Homo sapiens) CpG-island No: 28815
aacgaagattttatatatatattgtgtttttaaggatttttggatttttattacgggaaatttgatcgaggatttttttattatttttagtcgttattttcggtttaaacgaattaagattttttaggaaagcgatatttagcgagcgtttcgtaatttagattcgttttttatttttaaatagttattcgtcgggttttttgacggttacgaaaagaaaacggggtggtcgttggttaggttttaggcgagacggaaaacgaaaggtaaagggtcgaatttagtcgtttatttggtggaaaagttcgaaaaggagtttttcggttattttcgttttaaggttgtttataaagagagtgcgattcgttttcgtcgtcgtcgtttttattttagcgtcgttttttttttaatttggttaaaaggtcgtggtcgacgtatttattgcgtatttacggaagttttacgtttttacgttttttggcgttataaacgaaaacgttcgttgcgtttgtttttagcgggcgacgacgtgcgcggacggtttgcgtatgttcgttaggat

SEQ ID NO: 28816 - DNA, 562 bp, Artificial Sequence
  chemically treated genomic DNA (Homo sapiens) CpG-island No: 28816
atcctaacgaacatacgcaaaccgtccgcgcacgtcgtcgcccgctaaaaacaaacgcaacgaacgttttcgtttataacgccaaaaaacgtaaaaacgtaaaacttccgtaaatacgcaataaatacgtcgaccacgaccttttaaccaaattaaaaaaaaaacgacgctaaaataaaaacgacgacgacgaaaacgaatcgcactctctttataaacaaccttaaaacgaaaataaccgaaaaactccttttcgaacttttccaccaaataaacgactaaattcgaccctttacctttcgttttccgtctcgcctaaaacctaaccaacgaccaccccgttttcttttcgtaaccgtcaaaaaacccgacgaataactatttaaaaataaaaaacgaatctaaattacgaaacgctcgctaaatatcgctttcctaaaaaatcttaattcgtttaaaccgaaaataacgactaaaaataataaaaaaatcctcgatcaaatttcccgtaataaaaatccaaaaatccttaaaaacacaatatatatataaaatcttcgtt

SEQ ID NO: 28817 - DNA, 562 bp, Artificial Sequence
  chemically treated genomic DNA (Homo sapiens) CpG-island No: 28817
ttcgtttttcgttcgtttttgttttacgaggttttcggaatacggtttagaattatagagaaaatatattgcgtacgcgtattttttcgttatcgttgtgcggtttttgtttggttggttagttcgttttaattttcgatttatagggttgcggagtagtaatttttacgatatttgttgcgattcgtaggcgttattcgttgtcgggttttggcgcgtttttttagttttgtttgttgtcggtatcgttgcgttattcggaatcgtcgggtcgaatagtatgacgttcgttttggagaattatattaatcgtatttttaagttggtcgtcgcgggcgtgagtcggggtcgcggagaggtcgcggtcggggatcggtgggaggttgggaggtttggtttcggcgggattttgggggcgggcgaggagatgagggtttcggaacgatttagagttcgtcggcggcgtttcgagttttttcgttgttgcgggtttaggggttttttttattttgtttgtaaaatttaaataaaaatttagtgtgattatttcgaatttttttgt

SEQ ID NO: 28818 - DNA, 562 bp, Artificial Sequence
  chemically treated genomic DNA (Homo sapiens) CpG-island No: 28818
acaaaaaaattcgaaataatcacactaaatttttatttaaattttacaaacaaaataaaaaaaacccctaaacccgcaacaacgaaaaaactcgaaacgccgccgacgaactctaaatcgttccgaaaccctcatctcctcgcccgcccccaaaatcccgccgaaaccaaacctcccaacctcccaccgatccccgaccgcgacctctccgcgaccccgactcacgcccgcgacgaccaacttaaaaatacgattaatataattctccaaaacgaacgtcatactattcgacccgacgattccgaataacgcaacgataccgacaacaaacaaaactaaaaaaacgcgccaaaacccgacaacgaataacgcctacgaatcgcaacaaatatcgtaaaaattactactccgcaaccctataaatcgaaaattaaaacgaactaaccaaccaaacaaaaaccgcacaacgataacgaaaaaatacgcgtacgcaatatattttctctataattctaaaccgtattccgaaaacctcgtaaaacaaaaacgaacgaaaaacgaa

SEQ ID NO: 28819 - DNA, 562 bp, Artificial Sequence
  chemically treated genomic DNA (Homo sapiens) CpG-island No: 28819
atagaaaagttcggaataattatattgggtttttatttgggttttgtaggtaaaatggaaaggatttttgggttcgtagtagcgggaaggttcgaggcgtcgtcggcgaattttgggtcgtttcggggtttttattttttcgttcgtttttaggatttcgtcgaggttaggttttttaattttttatcgattttcgatcgcggttttttcgcgatttcggtttacgttcgcggcggttagtttgaggatacggttgatgtagttttttaaagcggacgttatgttgttcggttcggcggtttcgggtaacgtagcggtgtcgatagtaagtagaattgaaagggcgcgttagaattcggtagcggatagcgtttgcgggtcgtagtaaatatcgtgagagttgttgtttcgtagttttgtgagtcggaaattgggacgaattggttaattaaatagaagtcgtatagcggtgacgagagagtgcgcgtgcgtagtgtgttttttttgtaattttgggtcgtgtttcggaagtttcgtaagataaaagcgaacgagaggcgga

SEQ ID NO: 28820 - DNA, 562 bp, Artificial Sequence
  chemically treated genomic DNA (Homo sapiens) CpG-island No: 28820
tccgcctctcgttcgcttttatcttacgaaacttccgaaacacgacccaaaattacaaaaaaaacacactacgcacgcgcactctctcgtcaccgctatacgacttctatttaattaaccaattcgtcccaatttccgactcacaaaactacgaaacaacaactctcacgatatttactacgacccgcaaacgctatccgctaccgaattctaacgcgccctttcaattctacttactatcgacaccgctacgttacccgaaaccgccgaaccgaacaacataacgtccgctttaaaaaactacatcaaccgtatcctcaaactaaccgccgcgaacgtaaaccgaaatcgcgaaaaaaccgcgatcgaaaatcgataaaaaattaaaaaacctaacctcgacgaaatcctaaaaacgaacgaaaaaataaaaaccccgaaacgacccaaaattcgccgacgacgcctcgaaccttcccgctactacgaacccaaaaatcctttccattttacctacaaaacccaaataaaaacccaatataattattccgaacttttctat

SEQ ID NO: 28821 - DNA, 758 bp, Artificial Sequence
  chemically treated genomic DNA (Homo sapiens) CpG-island No: 28821
gtttcggacgtttggacgggcgaggattcggcggagtttaattttgattcggcggagtggattcgagatatgtacgttaaggttacggagatttggtaggaggttatgtagcggcgggacgacgacggcgcgttttacgtcgtttgttaggtgtagtcgtcggttacgttggacgtcgcgtagtttcgggtgatcggcgtcgttttttttcggtagtttgcgtttcgcgttaagttcgacgtttttttcgttttggagggtttttcgatcgagtcgaatagttttagtcgcgttatttacgtgtattagttcggggatttgagttagggttgcgagtttatcgggttttattataattcgttggtcgtgtcgtattcgtagtattcgggcgatttcggtaatttcgcggttcgcgacggtagtttttggaggtatcgcgtcggtttggtcgtttcgttcgcgggttcgtattttatcgtgggtcgggtcgtggtcgtttacgttggcgaggacgatttgggtcgcggcggtaattaggttagcgtggagaacgggaacgcgggtcggcggttggtttgttgcgtggtgggcgtgtgcgggttcgggttttgggagcgttaggcgcgggagtatttagagcgtaagaagcggcggcgcgagagcgagtgtaaggtcgtttgagcgcggtttttattcggcggcggttagggattttcgaggtttttttttgtttttgagttttttttttgttttaatag

SEQ ID NO: 28822 - DNA, 758 bp, Artificial Sequence
  chemically treated genomic DNA (Homo sapiens) CpG-island No: 28822
ctattaaaacaaaaaaaaaactcaaaaacaaaaaaaaacctcgaaaatccctaaccgccgccgaataaaaaccgcgctcaaacgaccttacactcgctctcgcgccgccgcttcttacgctctaaatactcccgcgcctaacgctcccaaaacccgaacccgcacacgcccaccacgcaacaaaccaaccgccgacccgcgttcccgttctccacgctaacctaattaccgccgcgacccaaatcgtcctcgccaacgtaaacgaccacgacccgacccacgataaaatacgaacccgcgaacgaaacgaccaaaccgacgcgatacctccaaaaactaccgtcgcgaaccgcgaaattaccgaaatcgcccgaatactacgaatacgacacgaccaacgaattataataaaacccgataaactcgcaaccctaactcaaatccccgaactaatacacgtaaataacgcgactaaaactattcgactcgatcgaaaaaccctccaaaacgaaaaaaacgtcgaacttaacgcgaaacgcaaactaccgaaaaaaaacgacgccgatcacccgaaactacgcgacgtccaacgtaaccgacgactacacctaacaaacgacgtaaaacgcgccgtcgtcgtcccgccgctacataacctcctaccaaatctccgtaaccttaacgtacatatctcgaatccactccgccgaatcaaaattaaactccgccgaatcctcgcccgtccaaacgtccgaaac

SEQ ID NO: 28823 - DNA, 758 bp, Artificial Sequence
  chemically treated genomic DNA (Homo sapiens) CpG-island No: 28823
ttgttggagtagaggagaagtttaaaggtagaggggggtttcgggggtttttggtcgtcgtcgggtgggggtcgcgtttaggcggttttgtattcgttttcgcgtcgtcgttttttgcgttttgagtgttttcgcgtttggcgtttttagagttcgggttcgtatacgtttattacgtagtaggttagtcgtcggttcgcgttttcgttttttacgttggtttggttgtcgtcgcggtttaggtcgttttcgttagcgtggacgattacggttcggtttacgatggagtgcgggttcgcgagcgaggcggttaggtcggcgcggtatttttagaggttgtcgtcgcggatcgcgaagttgtcgaagtcgttcgggtgttgcgggtgcggtacggttagcgggttgtagtggggttcggtggattcgtagttttggtttaggttttcgaattggtgtacgtggatggcgcggttggagttgttcggttcggtcgggaagttttttagggcgaagaaggcgtcgagtttggcgcggggcgtaagttgtcggaagaggacgacgtcggttattcggggttgcgcggcgtttagcgtggtcgacggttgtatttggtaggcggcgtggagcgcgtcgtcgtcgtttcgtcgttgtatgattttttgttagattttcgtgattttggcgtatatgtttcggatttatttcgtcgagttagagttgggtttcgtcgagttttcgttcgtttaggcgttcgaggt

SEQ ID NO: 28824 - DNA, 758 bp, Artificial Sequence
  chemically treated genomic DNA (Homo sapiens) CpG-island No: 28824
acctcgaacgcctaaacgaacgaaaactcgacgaaacccaactctaactcgacgaaataaatccgaaacatatacgccaaaatcacgaaaatctaacaaaaaatcatacaacgacgaaacgacgacgacgcgctccacgccgcctaccaaatacaaccgtcgaccacgctaaacgccgcgcaaccccgaataaccgacgtcgtcctcttccgacaacttacgccccgcgccaaactcgacgccttcttcgccctaaaaaacttcccgaccgaaccgaacaactccaaccgcgccatccacgtacaccaattcgaaaacctaaaccaaaactacgaatccaccgaaccccactacaacccgctaaccgtaccgcacccgcaacacccgaacgacttcgacaacttcgcgatccgcgacgacaacctctaaaaataccgcgccgacctaaccgcctcgctcgcgaacccgcactccatcgtaaaccgaaccgtaatcgtccacgctaacgaaaacgacctaaaccgcgacgacaaccaaaccaacgtaaaaaacgaaaacgcgaaccgacgactaacctactacgtaataaacgtatacgaacccgaactctaaaaacgccaaacgcgaaaacactcaaaacgcaaaaaacgacgacgcgaaaacgaatacaaaaccgcctaaacgcgacccccacccgacgacgaccaaaaacccccgaaacccccctctacctttaaacttctcctctactccaacaa

SEQ ID NO: 28825 - DNA, 1045 bp, Artificial Sequence
  chemically treated genomic DNA (Homo sapiens) CpG-island No: 28825
ttttgtatatattagttcgtttgtttcggatcgtcgcggtgttgagttcggagttgacgttttcgagtcgttagtaagcggaaaattcggagtggatttttacgttttttggatcggagttaaagggtatttcggaggaggtggtcggttttgcggttttgttcggtgttaggtcgcggttatcgggggagtacgggttgggggtgggtcgcgtagcggagtcggattttttggtcggacgagttcggtcgtggggttcggcggtttttttcgcggggattgcgaggcgggcggggcgcggggcggcggtcgtgttttcggggcggtttcgggcggcggcgggcgcgggtgtagtgcggcgcgcggtcggtagcgggcgtaggcggtggttgtggtcgcggcgttcggcggttggcgggcggcgtcggcggtgtttcgggcgcgtttatatacgcgtttatatatatatatatatacggtttcgtatatatatatacgtttcggcgcgtatacgcggcgcgtaggtcggagggaggcggttcggcgttgttcggcggcggcggtagcgtgtttcgcgggcgggcgggagggttggcgggcggttttcgtttttcggtttcgcggttaggtgtagttcgttcggttttcgttttcggattcgttttcgggggtcgttcggttttatgtttagcggcggcggcggagtagcgcgcggtcgcgggcggttttgaggagttcggagggaatcggcgacgaggggattatgtatcgggattcggaggcggttagtttaggtaagcgcggtttcggcgggttggggcgtttcgtatcggcgggtaggatagcggtagcgtcggacgtcgtttcggagttttagtttggggttgttgttcgttcggagtcgtacgggtttttttaggggttattttagtttcgggggcgcgggatcgagcggtagcggttcggatttcggtttttcgtagtttggatattgttaggttggatgtttgggatcggtttcgtagtgtttttataaggatttttt

SEQ ID NO: 28826 - DNA, 1045 bp, Artificial Sequence
  chemically treated genomic DNA (Homo sapiens) CpG-island No: 28826
aaaaaatccttataaaaacactacgaaaccgatcccaaacatccaacctaacaatatccaaactacgaaaaaccgaaatccgaaccgctaccgctcgatcccgcgcccccgaaactaaaataacccctaaaaaaacccgtacgactccgaacgaacaacaaccccaaactaaaactccgaaacgacgtccgacgctaccgctatcctacccgccgatacgaaacgccccaacccgccgaaaccgcgcttacctaaactaaccgcctccgaatcccgatacataatcccctcgtcgccgattccctccgaactcctcaaaaccgcccgcgaccgcgcgctactccgccgccgccgctaaacataaaaccgaacgacccccgaaaacgaatccgaaaacgaaaaccgaacgaactacacctaaccgcgaaaccgaaaaacgaaaaccgcccgccaaccctcccgcccgcccgcgaaacacgctaccgccgccgccgaacaacgccgaaccgcctccctccgacctacgcgccgcgtatacgcgccgaaacgtatatatatatacgaaaccgtatatatatatatatataaacgcgtatataaacgcgcccgaaacaccgccgacgccgcccgccaaccgccgaacgccgcgaccacaaccaccgcctacgcccgctaccgaccgcgcgccgcactacacccgcgcccgccgccgcccgaaaccgccccgaaaacacgaccgccgccccgcgccccgcccgcctcgcaatccccgcgaaaaaaaccgccgaaccccacgaccgaactcgtccgaccaaaaaatccgactccgctacgcgacccacccccaacccgtactcccccgataaccgcgacctaacaccgaacaaaaccgcaaaaccgaccacctcctccgaaataccctttaactccgatccaaaaaacgtaaaaatccactccgaattttccgcttactaacgactcgaaaacgtcaactccgaactcaacaccgcgacgatccgaaacaaacgaactaatatatacaaaa

SEQ ID NO: 28827 - DNA, 1045 bp, Artificial Sequence
  chemically treated genomic DNA (Homo sapiens) CpG-island No: 28827
gagaggtttttgtggggatattgcgaagtcggttttagatatttagtttggtagtgtttagattgcgggggatcggggttcgagtcgttgtcgttcgatttcgcgttttcggggttgggatgatttttgggggagttcgtgcggtttcgggcggataatagttttaggttggggtttcgagacggcgttcggcgttgtcgttgttttgttcgtcggtgcggggcgttttagttcgtcggggtcgcgtttatttgggttggtcgttttcgggtttcggtatatggttttttcgtcgtcggtttttttcgggttttttagagtcgttcgcggtcgcgcgttgtttcgtcgtcgtcgttgggtatggggtcgggcgattttcgggggcgggttcgagggcgggggtcgagcgggttgtatttagtcgcggagtcggggagcgggggtcgttcgttagttttttcgttcgttcgcggagtacgttgtcgtcgtcgtcgaatagcgtcgagtcgttttttttcggtttgcgcgtcgcgtgtgcgcgtcggagcgtgtgtgtgtgtacgaggtcgtgtgtatgtgtgtgtgtgagcgcgtgtgtgagcgcgttcggggtatcgtcggcgtcgttcgttagtcgtcgaacgtcgcggttatagttatcgtttgcgttcgttgtcggtcgcgcgtcgtattgtattcgcgttcgtcgtcgttcgaagtcgtttcgagggtacggtcgtcgtttcgcgtttcgttcgtttcgtagttttcgcggggagggtcgtcgagttttacggtcgggttcgttcggttaggggattcggtttcgttgcgcgatttatttttagttcgtgttttttcgatggtcgcggtttggtatcgggtagggtcgtagagtcggttatttttttcgaggtgttttttggtttcgatttaaaaggcgtggagatttatttcgggtttttcgtttgttggcggttcgagggcgttagtttcggatttaatatcgcggcggttcggggtagacggattggtgtgtgtaaaa

SEQ ID NO: 28828 - DNA, 1045 bp, Artificial Sequence
  chemically treated genomic DNA (Homo sapiens) CpG-island No: 28828
ttttacacacaccaatccgtctaccccgaaccgccgcgatattaaatccgaaactaacgccctcgaaccgccaacaaacgaaaaacccgaaataaatctccacgccttttaaatcgaaaccaaaaaacacctcgaaaaaaataaccgactctacgaccctacccgataccaaaccgcgaccatcgaaaaaacacgaactaaaaataaatcgcgcaacgaaaccgaatcccctaaccgaacgaacccgaccgtaaaactcgacgaccctccccgcgaaaactacgaaacgaacgaaacgcgaaacgacgaccgtaccctcgaaacgacttcgaacgacgacgaacgcgaatacaatacgacgcgcgaccgacaacgaacgcaaacgataactataaccgcgacgttcgacgactaacgaacgacgccgacgataccccgaacgcgctcacacacgcgctcacacacacacatacacacgacctcgtacacacacacacgctccgacgcgcacacgcgacgcgcaaaccgaaaaaaaacgactcgacgctattcgacgacgacgacaacgtactccgcgaacgaacgaaaaaactaacgaacgacccccgctccccgactccgcgactaaatacaacccgctcgacccccgccctcgaacccgcccccgaaaatcgcccgaccccatacccaacgacgacgacgaaacaacgcgcgaccgcgaacgactctaaaaaacccgaaaaaaaccgacgacgaaaaaaccatataccgaaacccgaaaacgaccaacccaaataaacgcgaccccgacgaactaaaacgccccgcaccgacgaacaaaacaacgacaacgccgaacgccgtctcgaaaccccaacctaaaactattatccgcccgaaaccgcacgaactcccccaaaaatcatcccaaccccgaaaacgcgaaatcgaacgacaacgactcgaaccccgatcccccgcaatctaaacactaccaaactaaatatctaaaaccgacttcgcaatatccccacaaaaacctctc

SEQ ID NO: 28829 - DNA, 889 bp, Artificial Sequence
  chemically treated genomic DNA (Homo sapiens) CpG-island No: 28829
gagtttgcgttttttttggtacgttgaaaacgtttttcgtagtttcgtatcggtttcgcggcgttttgatagttgggtgaggagggagcgaatgtttatcggcgtttttggggtaatttgggatagaggtatcgtcgcggggggcggaggattgggcgcgaaggcgttggttttttaagggggggacggagcgtatgcgcggcgcgggtcgtagtcgagtttggtgggcggttggttggtaggggacgtggtcggcggtagcggggtttaggggcggtcggggttgtagtagcggcggttttagtttcgtcgagtagcgatcggttggtgggtttttcgttggcgggtttcgcgttggcgggttgttttttaggtattagcggtagcgcgcgttcgttcggtttcgttattcgtttttagttatattcgtcggtcgaggttgcgcgagttttcgggtttgcggttttcgtttcgcggttttttttttatttttagttagggtagttgtagttcgagcgaatagttacggagtatttttcgttcgttcgggtcgcgttatcgtttatgttgtagttagttttaggtagcgatttcgcggtcgtagttcgtcgtttagtgattttagtttggtttttgcgcgtcgttcgagtcggtttcgttgagtcgcgggtttcgtgttttgcgatggttcggttggtgtagcgcggcgttaggtgttagtcgttttttcgttgagacgcgttcgagtggggattcgttgggtttcggggttcgtagttttcgttttttcgtcgcgttcgttttttttttggggatttcgtcgttgtttttggggacgaggggataggggatttagataaagtttattttgtgtagggagttggtcgta

SEQ ID NO: 28830 - DNA, 889 bp, Artificial Sequence
  chemically treated genomic DNA (Homo sapiens) CpG-island No: 28830
tacgaccaactccctacacaaaataaactttatctaaatcccctatcccctcgtccccaaaaacaacgacgaaatccccaaaaaaaaaacgaacgcgacgaaaaaacgaaaactacgaaccccgaaacccaacgaatccccactcgaacgcgtctcaacgaaaaaacgactaacacctaacgccgcgctacaccaaccgaaccatcgcaaaacacgaaacccgcgactcaacgaaaccgactcgaacgacgcgcaaaaaccaaactaaaatcactaaacgacgaactacgaccgcgaaatcgctacctaaaactaactacaacataaacgataacgcgacccgaacgaacgaaaaatactccgtaactattcgctcgaactacaactaccctaactaaaaataaaaaaaaaaccgcgaaacgaaaaccgcaaacccgaaaactcgcgcaacctcgaccgacgaatataactaaaaacgaataacgaaaccgaacgaacgcgcgctaccgctaatacctaaaaaacaacccgccaacgcgaaacccgccaacgaaaaacccaccaaccgatcgctactcgacgaaactaaaaccgccgctactacaaccccgaccgcccctaaaccccgctaccgccgaccacgtcccctaccaaccaaccgcccaccaaactcgactacgacccgcgccgcgcatacgctccgtcccccccttaaaaaaccaacgccttcgcgcccaatcctccgccccccgcgacgatacctctatcccaaattaccccaaaaacgccgataaacattcgctccctcctcacccaactatcaaaacgccgcgaaaccgatacgaaactacgaaaaacgttttcaacgtaccaaaaaaaacgcaaactc

SEQ ID NO: 28831 - DNA, 889 bp, Artificial Sequence
  chemically treated genomic DNA (Homo sapiens) CpG-island No: 28831
tgcggttaattttttgtataaagtgggttttgtttgggttttttgttttttcgtttttagaaatagcggcggagtttttagaaagggagcgggcgcggcggggaggcgaaggttgcgagtttcgaggtttagcgggtttttattcgggcgcgttttagcgggaggacggttggtatttggcgtcgcgttgtattagtcgagttatcgtagggtacggggttcgcggtttagcgggatcggttcgggcggcgcgtaggggttaggttgaggttattgagcggcgggttgcggtcgcggggtcgttgtttgggattggttgtagtatgggcggtggcgcggttcgggcgggcggaggatgtttcgtggttgttcgttcgggttgtagttgttttggttgagggtggaggaaggatcgcggggcggggatcgtaagttcggaggttcgcgtagtttcggtcggcggatgtagttggaggcgagtgacgaagtcgggcgagcgcgcgttgtcgttggtgtttggggagtagttcgttaacgcggagttcgttaacgagaagtttattagtcgatcgttgttcggcgaagttggggtcgtcgttgttgtagtttcggtcgtttttgggtttcgttgtcgtcgattacgttttttgttagttagtcgtttattaggttcgattacggttcgcgtcgcgtatgcgtttcgttttttttttaaagggttagcgttttcgcgtttagtttttcgtttttcgcggcggtgtttttgttttaagttattttaaggacgtcggtgggtattcgttttttttttatttagttgttagggcgtcgcgaagtcggtgcgaagttgcggaggacgtttttaacgtgttagagggagcgtaaattt

SEQ ID NO: 28832 - DNA, 889 bp, Artificial Sequence
  chemically treated genomic DNA (Homo sapiens) CpG-island No: 28832
aaatttacgctccctctaacacgttaaaaacgtcctccgcaacttcgcaccgacttcgcgacgccctaacaactaaataaaaaaaaaacgaatacccaccgacgtccttaaaataacttaaaacaaaaacaccgccgcgaaaaacgaaaaactaaacgcgaaaacgctaaccctttaaaaaaaaaacgaaacgcatacgcgacgcgaaccgtaatcgaacctaataaacgactaactaacaaaaaacgtaatcgacgacaacgaaacccaaaaacgaccgaaactacaacaacgacgaccccaacttcgccgaacaacgatcgactaataaacttctcgttaacgaactccgcgttaacgaactactccccaaacaccaacgacaacgcgcgctcgcccgacttcgtcactcgcctccaactacatccgccgaccgaaactacgcgaacctccgaacttacgatccccgccccgcgatccttcctccaccctcaaccaaaacaactacaacccgaacgaacaaccacgaaacatcctccgcccgcccgaaccgcgccaccgcccatactacaaccaatcccaaacaacgaccccgcgaccgcaacccgccgctcaataacctcaacctaacccctacgcgccgcccgaaccgatcccgctaaaccgcgaaccccgtaccctacgataactcgactaatacaacgcgacgccaaataccaaccgtcctcccgctaaaacgcgcccgaataaaaacccgctaaacctcgaaactcgcaaccttcgcctccccgccgcgcccgctccctttctaaaaactccgccgctatttctaaaaacgaaaaaacaaaaaacccaaacaaaacccactttatacaaaaaattaaccgca

SEQ ID NO: 28833 - DNA, 596 bp, Artificial Sequence
  chemically treated genomic DNA (Homo sapiens) CpG-island No: 28833
gacgtcgggtagggcgcggttttcgtcgtttacgtttacgatcgcgtttcgcgagttgttttcgtggtggcgcgtcgtttttaggtttagttcgaagtcgtagtttattttttcgtttttcgttagttttttttttttttttttttttttttttttttttttttcgtcgttttttttttttttttcgttttcgtttttcgggattaggttggggtcgttttcgtttttgaatttggttattacggatttgagcgcgttgttggcgttgtttattaagtcgttggtgtcgggtttcggggagttggcggtggagagatcgtcgtcggatttgatcgttatgggggacgatttgtgtatgtgcgtttttatgtggcgttttagtttgttggtttgggtgtacgcgtggtcgtataggttgtatttgtagggtttttcgttcgtgtggttgcgtcggtgtattattaggttgttttgaaatttgaacgttttgtcgtagaattcgtatgatttggatttgatcgggggttgggagggaggaggggcggattgtagaggagggagggggggcgtcgttaggaagggcggtttgttatttg

SEQ ID NO: 28834 - DNA, 596 bp, Artificial Sequence
  chemically treated genomic DNA (Homo sapiens) CpG-island No: 28834
caaataacaaaccgcccttcctaacgacgccccccctccctcctctacaatccgcccctcctccctcccaacccccgatcaaatccaaatcatacgaattctacgacaaaacgttcaaatttcaaaacaacctaataatacaccgacgcaaccacacgaacgaaaaaccctacaaatacaacctatacgaccacgcgtacacccaaaccaacaaactaaaacgccacataaaaacgcacatacacaaatcgtcccccataacgatcaaatccgacgacgatctctccaccgccaactccccgaaacccgacaccaacgacttaataaacaacgccaacaacgcgctcaaatccgtaataaccaaattcaaaaacgaaaacgaccccaacctaatcccgaaaaacgaaaacgaaaaaaaaaaaaaaaacgacgaaaaaaaaaaaaaaaaaaaaaaaaaaaaaaaaaaaaaactaacgaaaaacgaaaaaataaactacgacttcgaactaaacctaaaaacgacgcgccaccacgaaaacaactcgcgaaacgcgatcgtaaacgtaaacgacgaaaaccgcgccctacccgacgtc

SEQ ID NO: 28835 - DNA, 596 bp, Artificial Sequence
  chemically treated genomic DNA (Homo sapiens) CpG-island No: 28835
taggtagtaagtcgttttttttggcgacgtttttttttttttttttgtaattcgtttttttttttttttagttttcggttaagtttaagttatgcgagttttgcggtaagacgtttaaattttagagtaatttggtggtgtatcggcgtagttatacgggcgagaagttttataagtgtaatttgtgcgattacgcgtgtatttaggttagtaagttgaagcgttatatgaagacgtatatgtataaatcgttttttatgacggttaagttcgacgacggtttttttatcgttagtttttcggaattcggtattagcgatttggtgggtagcgttagtagcgcgtttaagttcgtggtggttaagtttaagagcgagaacgattttaatttgatttcggagaacggggacgaggaggaagaggaggacgacgaggaagaggaagaagaggaggaagaggaggaggaggagttgacggagagcgagagggtggattacggtttcgggttgagtttggaggcggcgcgttattacgagaatagttcgcggggcgcggtcgtgggcgtgggcgacgagagtcgcgttttgttcgacgtt

SEQ ID NO: 28836 - DNA, 596 bp, Artificial Sequence
  chemically treated genomic DNA (Homo sapiens) CpG-island No: 28836
aacgtcgaacaaaacgcgactctcgtcgcccacgcccacgaccgcgccccgcgaactattctcgtaataacgcgccgcctccaaactcaacccgaaaccgtaatccaccctctcgctctccgtcaactcctcctcctcctcttcctcctcttcttcctcttcctcgtcgtcctcctcttcctcctcgtccccgttctccgaaatcaaattaaaatcgttctcgctcttaaacttaaccaccacgaacttaaacgcgctactaacgctacccaccaaatcgctaataccgaattccgaaaaactaacgataaaaaaaccgtcgtcgaacttaaccgtcataaaaaacgatttatacatatacgtcttcatataacgcttcaacttactaacctaaatacacgcgtaatcgcacaaattacacttataaaacttctcgcccgtataactacgccgatacaccaccaaattactctaaaatttaaacgtcttaccgcaaaactcgcataacttaaacttaaccgaaaactaaaaaaaaaaaaaaacgaattacaaaaaaaaaaaaaaaaacgtcgccaaaaaaaacgacttactaccta

SEQ ID NO: 28837 - DNA, 637 bp, Artificial Sequence
  chemically treated genomic DNA (Homo sapiens) CpG-island No: 28837
aacgtcgatcgtattatagtttttttcgtttaagttttgttttttttttcgtttcggtttgggtcggagttaaattttataggaatgtagttcggttatatgcgttgcggcggtggacgtgttttttttttcgcgttttaaagagatttagcgttattttgttttgacgtagttataaaagttacgggagaaattttgttttttttttcgcgttagcgttttaaagttttgtagaggtcgagtcggggtttttatttcgcgtagggatagtagaaaatggttagggaagagttttgcgatttttttcgttattgtttgggttttatatcggtcgcggtagtaacgattattatcgttatttttttttttttatttttgtaatagtttttttttacggttttggttttattcgttgttgtaggatgaggttatcgttagttaattacgacgcgttcgataggatatattaggcgttgattggttgtcgagatcgtttttgtttttttttatttcgttttttttagcgttttgggtcgttgcggggtaaggggaagacggaaattatttcggggaaagatttttaaaataagagtcggaatcgtcgtgttattttagtggggaaattttttttttattt

SEQ ID NO: 28838 - DNA, 637 bp, Artificial Sequence
  chemically treated genomic DNA (Homo sapiens) CpG-island No: 28838
aaataaaaaaaaaatttccccactaaaataacacgacgattccgactcttattttaaaaatctttccccgaaataatttccgtcttccccttaccccgcaacgacccaaaacgctaaaaaaaacgaaataaaaaaaaacaaaaacgatctcgacaaccaatcaacgcctaatatatcctatcgaacgcgtcgtaattaactaacgataacctcatcctacaacaacgaataaaaccaaaaccgtaaaaaaaaactattacaaaaataaaaaaaaaaaaataacgataataatcgttactaccgcgaccgatataaaacccaaacaataacgaaaaaaatcgcaaaactcttccctaaccattttctactatccctacgcgaaataaaaaccccgactcgacctctacaaaactttaaaacgctaacgcgaaaaaaaaaacaaaatttctcccgtaacttttataactacgtcaaaacaaaataacgctaaatctctttaaaacgcgaaaaaaaaaacacgtccaccgccgcaacgcatataaccgaactacattcctataaaatttaactccgacccaaaccgaaacgaaaaaaaaaacaaaacttaaacgaaaaaaactataatacgatcgacgtt

SEQ ID NO: 28839 - DNA, 637 bp, Artificial Sequence
  chemically treated genomic DNA (Homo sapiens) CpG-island No: 28839
gaataaaagaagggtttttttattaaaatgatacggcgatttcggtttttgttttgggggttttttttcgaaatggttttcgttttttttttgtttcgtagcgatttagagcgttgggggaagcggagtggggagaggtagaggcggtttcggtagttaattagcgtttgatgtgttttgtcgggcgcgtcgtggttggttggcgatgattttattttgtagtagcgggtggggttaaagtcgtagggggaggttgttgtaaaggtagagagggagaagtgacgatggtgatcgttgttgtcgcggtcgatatggaatttaagtagtggcgaagggaatcgtaaggtttttttttgattattttttattgtttttgcgcgaggtgagggtttcggttcggtttttgtaaaattttggggcgttggcgcggaggaggagataggatttttttcgtgatttttgtaattgcgttagggtaagatggcgttgggtttttttggggcgcggggggagaggtacgtttatcgtcgtagcgtatgtgatcgggttgtatttttgtggggtttggtttcgatttaggtcggggcgggggaggggatagggtttgggcggaggagattgtggtgcggtcggcgtt

SEQ ID NO: 28840 - DNA, 637 bp, Artificial Sequence
  chemically treated genomic DNA (Homo sapiens) CpG-island No: 28840
aacgccgaccgcaccacaatctcctccgcccaaaccctatcccctcccccgccccgacctaaatcgaaaccaaaccccacaaaaatacaacccgatcacatacgctacgacgataaacgtacctctccccccgcgccccaaaaaaacccaacgccatcttaccctaacgcaattacaaaaatcacgaaaaaaatcctatctcctcctccgcgccaacgccccaaaattttacaaaaaccgaaccgaaaccctcacctcgcgcaaaaacaataaaaaataatcaaaaaaaaaccttacgattcccttcgccactacttaaattccatatcgaccgcgacaacaacgatcaccatcgtcacttctccctctctacctttacaacaacctccccctacgactttaaccccacccgctactacaaaataaaatcatcgccaaccaaccacgacgcgcccgacaaaacacatcaaacgctaattaactaccgaaaccgcctctacctctccccactccgcttcccccaacgctctaaatcgctacgaaacaaaaaaaaaacgaaaaccatttcgaaaaaaaacccccaaaacaaaaaccgaaatcgccgtatcattttaataaaaaaacccttcttttattc

SEQ ID NO: 28841 - DNA, 1099 bp, Artificial Sequence
  chemically treated genomic DNA (Homo sapiens) CpG-island No: 28841
tcggtcgcgggagagggttcggtaggtgttaaggagttcgggcggttttttagttcgtattttttcgcggtcgttcggagtcggttttcgttagtcgggcgggtaggcggttattggcgttaggattggtcggcgtcgttcgcgttttcgcggtttcgggtggagtttttcgttcggtcgttttttgcggtattcgcgatacgggtggggattagaggttttcggcggcggttttcggcggcggttttcgggttgtgattggttagcgttatagggggcgggacggcgggcgtgaagtgagcgggttggggtcgttggcgcgtttttttattttttcgtttgcgttcgcgttcgcggttttcgtttgtattatttttagtcggcggttgttttagggaggttgggcgcgatttttttcgttcgcggttttaattcgtattttgcgttttttttcgtttttttcgtatttgtttttgcgttaggttcggagattttcggggcggttttttagaatttgcggagtataattggtcgatcgatttatttattgggaatttcgttttttgttagagtttacgttttttgttatttttagttcggagcggcgtgtagcgttatggagaagagtaacgagattaacggttattttgatagcgtttaggcggcgtgcggtcgggttcggagtttcggggatcgcggcgggacgttacggcgttgcgcgggttttttgcggcgttaagcgttggtgttgtttatcgtgttcggggtgttggcgggcgcgggtttgggcgcggcgttgcgcggtttagtttgagtcgtacgtaggttatttatttggtttttttcggcgagatgttgtttcgtatgttgcgtatgattattttgtcgttggtggtttgtagtttggtgtcgggcgcgtttcgttcgatgttagttgtttcgggcgtttgggcggtatcgttgtcgtttattttggttttattatattgagtgtttcggcgttcgtcgtggttttggcgtttattattaagttaggattcggtgcgtagattttttagtttagcgatttggggttggaggattcggggtttttttttgt

SEQ ID NO: 28842 - DNA, 1099 bp, Artificial Sequence
  chemically treated genomic DNA (Homo sapiens) CpG-island No: 28842
acaaaaaaaaaccccgaatcctccaaccccaaatcgctaaactaaaaaatctacgcaccgaatcctaacttaataataaacgccaaaaccacgacgaacgccgaaacactcaatataataaaaccaaaataaacgacaacgataccgcccaaacgcccgaaacaactaacatcgaacgaaacgcgcccgacaccaaactacaaaccaccaacgacaaaataatcatacgcaacatacgaaacaacatctcgccgaaaaaaaccaaataaataacctacgtacgactcaaactaaaccgcgcaacgccgcgcccaaacccgcgcccgccaacaccccgaacacgataaacaacaccaacgcttaacgccgcaaaaaacccgcgcaacgccgtaacgtcccgccgcgatccccgaaactccgaacccgaccgcacgccgcctaaacgctatcaaaataaccgttaatctcgttactcttctccataacgctacacgccgctccgaactaaaaataacaaaaaacgtaaactctaacaaaaaacgaaattcccaataaataaatcgatcgaccaattatactccgcaaattctaaaaaaccgccccgaaaatctccgaacctaacgcaaaaacaaatacgaaaaaaacgaaaaaaaacgcaaaatacgaattaaaaccgcgaacgaaaaaaatcgcgcccaacctccctaaaacaaccgccgactaaaaataatacaaacgaaaaccgcgaacgcgaacgcaaacgaaaaaataaaaaaacgcgccaacgaccccaacccgctcacttcacgcccgccgtcccgccccctataacgctaaccaatcacaacccgaaaaccgccgccgaaaaccgccgccgaaaacctctaatccccacccgtatcgcgaataccgcaaaaaacgaccgaacgaaaaactccacccgaaaccgcgaaaacgcgaacgacgccgaccaatcctaacgccaataaccgcctacccgcccgactaacgaaaaccgactccgaacgaccgcgaaaaaatacgaactaaaaaaccgcccgaactccttaacacctaccgaaccctctcccgcgaccga

SEQ ID NO: 28843 - DNA, 1099 bp, Artificial Sequence
  chemically treated genomic DNA (Homo sapiens) CpG-island No: 28843
ataggaggaggtttcgagttttttagttttaggtcgttggattgaagggtttgcgtatcggattttggtttgatgatgaacgttaaggttacggcgagcgtcgaggtatttagtgtggtgaggttaaagtaggcgatagcgatgtcgtttagacgttcgaggtagttggtatcgagcgaggcgcgttcgatattaggttgtagattattagcggtaggatgattatgcgtagtatgcggagtagtatttcgtcggggaaggttaggtaggtgatttgcgtgcggtttaggttgagtcgcgtaacgtcgcgtttaggttcgcgttcgttagtatttcggatacggtgagtagtattagcgtttggcgtcgtaggaagttcgcgtaacgtcgtggcgtttcgtcgcggttttcggagtttcgggttcggtcgtacgtcgtttgagcgttgttaaggtagtcgttggtttcgttgtttttttttatggcgttatacgtcgtttcgagttagaggtggtaggggacgtgggttttggtaaaagacggggtttttaatgaatgggtcggtcggttagttgtgtttcgtaggttttgggaagtcgtttcgggggttttcgggtttggcgtaggagtaggtgcgagaaaggcgaggagaggcgtagagtgcgggttggagtcgcgggcggagaggatcgcgtttagtttttttggagtagtcgtcggttggagatgatgtaaacgggagtcgcgaacgcggacgtagacggggaagtaggagggcgcgttagcggttttagttcgtttattttacgttcgtcgtttcgttttttgtggcgttggttaattatagttcgggagtcgtcgtcgggagtcgtcgtcgggagtttttggtttttattcgtgtcgcgggtgtcgtagggggcggtcgggcgggaggttttattcgaggtcgcgggggcgcgggcggcgtcggttaattttggcgttaatagtcgtttattcgttcggttaacggaggtcggtttcgggcgatcgcggggaagtgcgggttgaaggatcgttcgggttttttggtatttgtcgggttttttttcgcggtcgg

SEQ ID NO: 28844 - DNA, 1099 bp, Artificial Sequence
  chemically treated genomic DNA (Homo sapiens) CpG-island No: 28844
ccgaccgcgaaaaaaaacccgacaaataccaaaaaacccgaacgatccttcaacccgcacttccccgcgatcgcccgaaaccgacctccgttaaccgaacgaataaacgactattaacgccaaaattaaccgacgccgcccgcgcccccgcgacctcgaataaaacctcccgcccgaccgccccctacgacacccgcgacacgaataaaaaccaaaaactcccgacgacgactcccgacgacgactcccgaactataattaaccaacgccacaaaaaacgaaacgacgaacgtaaaataaacgaactaaaaccgctaacgcgccctcctacttccccgtctacgtccgcgttcgcgactcccgtttacatcatctccaaccgacgactactccaaaaaaactaaacgcgatcctctccgcccgcgactccaacccgcactctacgcctctcctcgcctttctcgcacctactcctacgccaaacccgaaaacccccgaaacgacttcccaaaacctacgaaacacaactaaccgaccgacccattcattaaaaaccccgtcttttaccaaaacccacgtcccctaccacctctaactcgaaacgacgtataacgccataaaaaaaaacaacgaaaccaacgactaccttaacaacgctcaaacgacgtacgaccgaacccgaaactccgaaaaccgcgacgaaacgccacgacgttacgcgaacttcctacgacgccaaacgctaatactactcaccgtatccgaaatactaacgaacgcgaacctaaacgcgacgttacgcgactcaacctaaaccgcacgcaaatcacctacctaaccttccccgacgaaatactactccgcatactacgcataatcatcctaccgctaataatctacaacctaatatcgaacgcgcctcgctcgataccaactacctcgaacgtctaaacgacatcgctatcgcctactttaacctcaccacactaaatacctcgacgctcgccgtaaccttaacgttcatcatcaaaccaaaatccgatacgcaaacccttcaatccaacgacctaaaactaaaaaactcgaaacctcctcctat

SEQ ID NO: 28845 - DNA, 1026 bp, Artificial Sequence
  chemically treated genomic DNA (Homo sapiens) CpG-island No: 28845
ggtcgcgtcgtcgggttttgtagacgcgaatgtaaatagaaatatagtgaaaggcgttcggagagtttcgtgattgcggtacggcggcgagtcgggaatattagtgcgtttagagtaaaatgaacgaatgtacgtatgatttttggagcgatttttacgagggaaagcgcgtttttcggtatttatttttaagcgttttaaaatgattagtttttatataatttagttcgtaggcgaagttgaggtcggagttttaaaagcgagggaggatagtcgttgaagaagtttcggttttttataggttaggacgaagtagggggcgggtttattttgtaggagcgtttacgtattggtggagtcgcggatttagagttgcgattcgttgcgcgaaattgtcgaaagttttttcgcggagggagaaggggcgggaagaagggcgtggttagcgcggtcgaagggcgtggttggcgttcggttttgttttgcgcgttttgggttgcggttggagggtcgtagttgtagttagggttcgttagttcggggttagcgtatggggttgttgagatcgtttcggacgtgcgaagcgttcgcggtgcggtaggtaggtagtgtttcgcgtgcgggtgttggtgtcgggggtgtcgcggcgttgggggcggtggttcgggttagattcgcgcgcgcgttcggttttttttttcgcgttttttcggtgtttgcggggtttttgcggtgcgggtcgtttggtttcgcgttttcgtcggtaagggtataaaggttttttggggggcgggggcgtttcgtgttttcgtttttattttgcgagcggaacggcgtgtgttgtggcggtcgaggggtcggggtcgaggcgggcggttgggtttgggaatgttcgggcgcggcgagggagtgcgcgagttcgcgtatttggcggtcgagtagttgcgtcgttggtcggtttgggtttcgggggaggttatttttttttaggtttttttcgggcgtgggttgtttatttagtttttt

SEQ ID NO: 28846 - DNA, 1026 bp, Artificial Sequence
  chemically treated genomic DNA (Homo sapiens) CpG-island No: 28846
aaaaaactaaataaacaacccacgcccgaaaaaaacctaaaaaaaaataacctcccccgaaacccaaaccgaccaacgacgcaactactcgaccgccaaatacgcgaactcgcgcactccctcgccgcgcccgaacattcccaaacccaaccgcccgcctcgaccccgacccctcgaccgccacaacacacgccgttccgctcgcaaaataaaaacgaaaacacgaaacgcccccgccccccaaaaaacctttatacccttaccgacgaaaacgcgaaaccaaacgacccgcaccgcaaaaaccccgcaaacaccgaaaaaacgcgaaaaaaaaaaccgaacgcgcgcgcgaatctaacccgaaccaccgcccccaacgccgcgacacccccgacaccaacacccgcacgcgaaacactacctacctaccgcaccgcgaacgcttcgcacgtccgaaacgatctcaacaaccccatacgctaaccccgaactaacgaaccctaactacaactacgaccctccaaccgcaacccaaaacgcgcaaaacaaaaccgaacgccaaccacgcccttcgaccgcgctaaccacgcccttcttcccgccccttctccctccgcgaaaaaactttcgacaatttcgcgcaacgaatcgcaactctaaatccgcgactccaccaatacgtaaacgctcctacaaaataaacccgccccctacttcgtcctaacctataaaaaaccgaaacttcttcaacgactatcctccctcgcttttaaaactccgacctcaacttcgcctacgaactaaattatataaaaactaatcattttaaaacgcttaaaaataaataccgaaaaacgcgctttccctcgtaaaaatcgctccaaaaatcatacgtacattcgttcattttactctaaacgcactaatattcccgactcgccgccgtaccgcaatcacgaaactctccgaacgcctttcactatatttctatttacattcgcgtctacaaaacccgacgacgcgacc

SEQ ID NO: 28847 - DNA, 1026 bp, Artificial Sequence
  chemically treated genomic DNA (Homo sapiens) CpG-island No: 28847
ggggagttgggtaaatagtttacgttcgggagaggtttgagggaaagtgatttttttcggggtttaggtcgattagcggcgtagttgttcggtcgttagatgcgcggattcgcgtattttttcgtcgcgttcgggtatttttaagtttagtcgttcgtttcggtttcgatttttcggtcgttatagtatacgtcgtttcgttcgtaagatggaggcgaaggtacgaggcgttttcgttttttagggagtttttgtgtttttgtcggcggggacgcgaggttagacggttcgtatcgtaagggtttcgtaggtatcgaagagacgcgggggagggggtcgggcgcgcgcgcggatttagttcgggttatcgtttttagcgtcgcggtattttcgatattagtattcgtacgcgggatattgtttatttatcgtatcgcgaacgtttcgtacgttcggagcggttttagtagttttatgcgttggtttcgagttggcggattttgattgtaattgcggttttttaatcgtagtttaaaacgcgtagggtaggatcgagcgttaattacgtttttcggtcgcgttgattacgttttttttttcgtttttttttttttcgcgggagggttttcggtaatttcgcgtagcgaatcgtagttttaagttcgcggttttattaatacgtggacgtttttgtaagatgagttcgttttttatttcgttttggtttatgggaagtcgggatttttttagcggttgttttttttcgtttttggagtttcgattttagtttcgtttgcgagttgggttgtgtaaaggttggttattttggggcgtttaggggtgggtgtcggggggcgcgttttttttcgtgaaggtcgttttaggagttatgcgtatattcgtttattttgttttggacgtattgatgttttcggttcgtcgtcgtgtcgtagttacgaggtttttcgaacgttttttattgtgtttttgtttatattcgcgtttgtaagattcggcggcgcgatt

SEQ ID NO: 28848 - DNA, 1026 bp, Artificial Sequence
  chemically treated genomic DNA (Homo sapiens) CpG-island No: 28848
aatcgcgccgccgaatcttacaaacgcgaatataaacaaaaacacaataaaaaacgttcgaaaaacctcgtaactacgacacgacgacgaaccgaaaacatcaatacgtccaaaacaaaataaacgaatatacgcataactcctaaaacgaccttcacgaaaaaaaacgcgccccccgacacccacccctaaacgccccaaaataaccaacctttacacaacccaactcgcaaacgaaactaaaatcgaaactccaaaaacgaaaaaaaacaaccgctaaaaaaatcccgacttcccataaaccaaaacgaaataaaaaacgaactcatcttacaaaaacgtccacgtattaataaaaccgcgaacttaaaactacgattcgctacgcgaaattaccgaaaaccctcccgcgaaaaaaaaaaaaacgaaaaaaaaaacgtaatcaacgcgaccgaaaaacgtaattaacgctcgatcctaccctacgcgttttaaactacgattaaaaaaccgcaattacaatcaaaatccgccaactcgaaaccaacgcataaaactactaaaaccgctccgaacgtacgaaacgttcgcgatacgataaataaacaatatcccgcgtacgaatactaatatcgaaaataccgcgacgctaaaaacgataacccgaactaaatccgcgcgcgcgcccgaccccctcccccgcgtctcttcgatacctacgaaacccttacgatacgaaccgtctaacctcgcgtccccgccgacaaaaacacaaaaactccctaaaaaacgaaaacgcctcgtaccttcgcctccatcttacgaacgaaacgacgtatactataacgaccgaaaaatcgaaaccgaaacgaacgactaaacttaaaaatacccgaacgcgacgaaaaaatacgcgaatccgcgcatctaacgaccgaacaactacgccgctaatcgacctaaaccccgaaaaaaatcactttccctcaaacctctcccgaacgtaaactatttacccaactcccc

SEQ ID NO: 28849 - DNA, 578 bp, Artificial Sequence
  chemically treated genomic DNA (Homo sapiens) CpG-island No: 28849
tgggcgtgtcgtgggagtcgaggcgcgaggttcgggttggggatgaggggttgaggggcgcgggagggatgtagagaggatgcggtgaagtgcgaagatttcgtttcggtttcggcggggcgtgggcggcgtgaaacgttatatattaggttgagaggttcgggttcggtcgagcggtttgaggagtaggtgggtgtgggtgtgggtgtgggcgcgaagggttgagggcgtgggcgttcgcgttttattagagattggaagcgaggttttgggtatcgagcgggggacgcggtcggatatcgggtcgtttagtatcgttagtagtagtagcgggaagggcgaggttgtaggttgttcgggattcgggcggggtcgcgtagtagaggtcggtatttttggtttcgtttggtcgcgggtgcggcgtaagttacggtttttgtttagggtttcggggttattggtttcggttttattcgggttttttcggttcggttcggtttagtttgaggttgagggatgaaatatcgttcggtttcgtttttttagaaaggggttaatggtcgggttttttttttttt

SEQ ID NO: 28850 - DNA, 578 bp, Artificial Sequence
  chemically treated genomic DNA (Homo sapiens) CpG-island No: 28850
aaaaaaaaaaaaacccgaccattaacccctttctaaaaaaacgaaaccgaacgatatttcatccctcaacctcaaactaaaccgaaccgaaccgaaaaaacccgaataaaaccgaaaccaataaccccgaaaccctaaacaaaaaccgtaacttacgccgcacccgcgaccaaacgaaaccaaaaataccgacctctactacgcgaccccgcccgaatcccgaacaacctacaacctcgcccttcccgctactactactaacgatactaaacgacccgatatccgaccgcgtcccccgctcgatacccaaaacctcgcttccaatctctaataaaacgcgaacgcccacgccctcaacccttcgcgcccacacccacacccacacccacctactcctcaaaccgctcgaccgaacccgaacctctcaacctaatatataacgtttcacgccgcccacgccccgccgaaaccgaaacgaaatcttcgcacttcaccgcatcctctctacatccctcccgcgcccctcaacccctcatccccaacccgaacctcgcgcctcgactcccacgacacgccca

SEQ ID NO: 28851 - DNA, 578 bp, Artificial Sequence
  chemically treated genomic DNA (Homo sapiens) CpG-island No: 28851
aggaagaaggaggttcgattattggtttttttttgagggggcggagtcgggcggtgttttattttttagttttaggttgagtcggatcgagtcgagaggattcgagtggggtcgaggttagtagtttcggggttttgagtagaggtcgtagtttgcgtcgtattcgcggttaggcggagttaaagatgtcggtttttgttgcgcggtttcgttcgggtttcgggtagtttatagtttcgtttttttcgttattgttgttggcggtgttgagcggttcggtattcggtcgcgtttttcgttcggtgtttagaatttcgtttttaatttttggtaaggcgcggacgtttacgtttttagtttttcgcgtttatatttatatttatatttatttgttttttagatcgttcggtcggattcgggttttttagtttggtgtatggcgttttacgtcgtttacgtttcgtcgggatcggggcgagattttcgtattttatcgtattttttttgtatttttttcgcgttttttagttttttatttttagttcgggtttcgcgtttcggtttttacgatacgttta

SEQ ID NO: 28852 - DNA, 578 bp, Artificial Sequence
  chemically treated genomic DNA (Homo sapiens) CpG-island No: 28852
taaacgtatcgtaaaaaccgaaacgcgaaacccgaactaaaaataaaaaactaaaaaacgcgaaaaaaatacaaaaaaaatacgataaaatacgaaaatctcgccccgatcccgacgaaacgtaaacgacgtaaaacgccatacaccaaactaaaaaacccgaatccgaccgaacgatctaaaaaacaaataaatataaatataaatataaacgcgaaaaactaaaaacgtaaacgtccgcgccttaccaaaaattaaaaacgaaattctaaacaccgaacgaaaaacgcgaccgaataccgaaccgctcaacaccgccaacaacaataacgaaaaaaacgaaactataaactacccgaaacccgaacgaaaccgcgcaacaaaaaccgacatctttaactccgcctaaccgcgaatacgacgcaaactacgacctctactcaaaaccccgaaactactaacctcgaccccactcgaatcctctcgactcgatccgactcaacctaaaactaaaaaataaaacaccgcccgactccgccccctcaaaaaaaaaccaataatcgaacctccttcttcct

SEQ ID NO: 28853 - DNA, 547 bp, Artificial Sequence
  chemically treated genomic DNA (Homo sapiens) CpG-island No: 28853
tttcggttcggttttttcggcggttataattattcggttttacgttgcggtcgtcgtcgcgtcgtcgttttttttacgtcgttgcggacgacgataagcggttaatcgttttcgtttttcgcggttcgtcgtcgcgtcgaatttggttatatttataaggagaggagaattttcgtagtttttcgttcggggtgaaattttaatatggttttcgttttcgtcgtttttttttttttttttatttcggtttttttaattttttttttttttttcgattttcgttcgattgcgtagtcgcgatttcggagggagcgcgttaggtttggcgcgtattcgattttttgcgcgtttcggtttcgcgcgtttgttaggtcggggtcggcggcggaatagtttgggattcgaaacgtttcggtttttttgcggattcgcgttcggtcgttgtcgtcggacgtttgaaaaggtttgtttggtttagggatcggggttaggattagtagaaagtggttttttttcgtttttgatttttttaacgataaagttggat

SEQ ID NO: 28854 - DNA, 547 bp, Artificial Sequence
  chemically treated genomic DNA (Homo sapiens) CpG-island No: 28854
atccaactttatcgttaaaaaaatcaaaaacgaaaaaaaaccactttctactaatcctaaccccgatccctaaaccaaacaaaccttttcaaacgtccgacgacaacgaccgaacgcgaatccgcaaaaaaaccgaaacgtttcgaatcccaaactattccgccgccgaccccgacctaacaaacgcgcgaaaccgaaacgcgcaaaaaatcgaatacgcgccaaacctaacgcgctccctccgaaatcgcgactacgcaatcgaacgaaaatcgaaaaaaaaaaaaaaaattaaaaaaaccgaaataaaaaaaaaaaaaaaaacgacgaaaacgaaaaccatattaaaatttcaccccgaacgaaaaactacgaaaattctcctctccttataaatataaccaaattcgacgcgacgacgaaccgcgaaaaacgaaaacgattaaccgcttatcgtcgtccgcaacgacgtaaaaaaaacgacgacgcgacgacgaccgcaacgtaaaaccgaataattataaccgccgaaaaaaccgaaccgaaa

SEQ ID NO: 28855 - DNA, 547 bp, Artificial Sequence
  chemically treated genomic DNA (Homo sapiens) CpG-island No: 28855
gtttaattttgtcgttaggggaattagaaacgaaaagaagttattttttgttagttttaatttcggtttttgggttaggtaaatttttttaagcgttcggcggtagcggtcgggcgcgggttcgtagaaaagtcgaggcgtttcgggttttaagttgtttcgtcgtcggtttcggtttggtaggcgcgcggagtcggaacgcgtaaggggtcgggtgcgcgttaggtttggcgcgtttttttcgggatcgcggttgcgtagtcgggcgggagtcgggaaaaggggaggaggttggaggagtcggagtaaggggagggggaggagcggcgaaagcggaagttatgttggagttttatttcgagcgaggggttgcgagggtttttttttttttgtgggtgtgattaggttcggcgcggcggcgggtcgcggggggcggggacgattggtcgtttgtcgtcgttcgtagcggcgtgaggggagcggcggcgcggcggcggtcgtagcgtggagtcgggtgattgtgatcgtcgggggagtcgggtcggag

SEQ ID NO: 28856 - DNA, 547 bp, Artificial Sequence
  chemically treated genomic DNA (Homo sapiens) CpG-island No: 28856
ctccgacccgactcccccgacgatcacaatcacccgactccacgctacgaccgccgccgcgccgccgctcccctcacgccgctacgaacgacgacaaacgaccaatcgtccccgccccccgcgacccgccgccgcgccgaacctaatcacacccacaaaaaaaaaaaaaccctcgcaacccctcgctcgaaataaaactccaacataacttccgctttcgccgctcctccccctccccttactccgactcctccaacctcctccccttttcccgactcccgcccgactacgcaaccgcgatcccgaaaaaaacgcgccaaacctaacgcgcacccgaccccttacgcgttccgactccgcgcgcctaccaaaccgaaaccgacgacgaaacaacttaaaacccgaaacgcctcgacttttctacgaacccgcgcccgaccgctaccgccgaacgcttaaaaaaatttacctaacccaaaaaccgaaattaaaactaacaaaaaataacttcttttcgtttctaattcccctaacgacaaaattaaac

SEQ ID NO: 28857 - DNA, 575 bp, Artificial Sequence
  chemically treated genomic DNA (Homo sapiens) CpG-island No: 28857
  unsure (468)
ggtaatcgggtttcgaggggattgacgtttatttgcgcgcgttacggtatataacggttttaaatttgattttagtagtatatttatgttgaaattcgtaggttagttcgtttcgttagagtgggagtttagattattttcgggagaagatacgtttcgataggaattacgttattggtagagcggaaataggttgagttttacgcgcgtatgttttgttcgttatggtcgtagttaaggagtttttggagttttatgttaagcggttttggcgtttcgaggaggtagtagaagattcggacgaggaggatgaggataatattagttgaagtcgagaatgggtttttttggaggaagtgttacggttcggaggtattaaggtaacggtcgcggtttcggggaacgggattaggcgtggagagtttcgaagtgtgttaggttgattgtttcgtcgtttacgcgttggtnagagtttcggtttaggtatcgagattttagtttttgaagtatgtgttcggtgcgttttttacgtcggtttttattgttgtttataaaagaaaagtttcgaattgaat

SEQ ID NO: 28858 - DNA, 575 bp, Artificial Sequence
  chemically treated genomic DNA (Homo sapiens) CpG-island No: 28858
  unsure (108)
attcaattcgaaacttttcttttataaacaacaataaaaaccgacgtaaaaaacgcaccgaacacatacttcaaaaactaaaatctcgatacctaaaccgaaactctnaccaacgcgtaaacgacgaaacaatcaacctaacacacttcgaaactctccacgcctaatcccgttccccgaaaccgcgaccgttaccttaatacctccgaaccgtaacacttcctccaaaaaaacccattctcgacttcaactaatattatcctcatcctcctcgtccgaatcttctactacctcctcgaaacgccaaaaccgcttaacataaaactccaaaaactccttaactacgaccataacgaacaaaacatacgcgcgtaaaactcaacctatttccgctctaccaataacgtaattcctatcgaaacgtatcttctcccgaaaataatctaaactcccactctaacgaaacgaactaacctacgaatttcaacataaatatactactaaaatcaaatttaaaaccgttatataccgtaacgcgcgcaaataaacgtcaatcccctcgaaacccgattacc

SEQ ID NO: 28859 - DNA, 575 bp, Artificial Sequence
  chemically treated genomic DNA (Homo sapiens) CpG-island No: 28859
  unsure (108)
gtttaattcgaaattttttttttgtaaatagtagtggaaatcggcgtgggaagcgtatcgaatatatgttttagaggttgggatttcggtatttggatcggggttttnattagcgcgtaagcggcgggatagttagtttagtatatttcggaattttttacgtttgatttcgtttttcggagtcgcggtcgttattttggtgttttcgagtcgtaatattttttttaggagaatttattttcggttttaattagtattatttttatttttttcgttcggattttttattgttttttcggggcgttaaggtcgtttggtatggaattttaaaggttttttgattgcggttatggcgggtaaagtatacgcgcgtgaaatttagtttattttcgttttgttagtggcgtaatttttgtcggggcgtgttttttttcggaaatggtttaagtttttattttggcggagcgagttagtttgcgaattttagtatgagtgtattgttgaggttaggtttggggtcgttgtgtgtcgtggcgcgcgtaggtaagcgttagttttttcgaagttcggttgtt

SEQ ID NO: 28860 - DNA, 575 bp, Artificial Sequence
  chemically treated genomic DNA (Homo sapiens) CpG-island No: 28860
  unsure (468)
aacaaccgaacttcgaaaaaactaacgcttacctacgcgcgccacgacacacaacgaccccaaacctaacctcaacaatacactcatactaaaattcgcaaactaactcgctccgccaaaataaaaacttaaaccatttccgaaaaaaaacacgccccgacaaaaattacgccactaacaaaacgaaaataaactaaatttcacgcgcgtatactttacccgccataaccgcaatcaaaaaacctttaaaattccataccaaacgaccttaacgccccgaaaaaacaataaaaaatccgaacgaaaaaaataaaaataatactaattaaaaccgaaaataaattctcctaaaaaaaatattacgactcgaaaacaccaaaataacgaccgcgactccgaaaaacgaaatcaaacgtaaaaaattccgaaatatactaaactaactatcccgccgcttacgcgctaatnaaaaccccgatccaaataccgaaatcccaacctctaaaacatatattcgatacgcttcccacgccgatttccactactatttacaaaaaaaaaatttcgaattaaac

SEQ ID NO: 28861 - DNA, 720 bp, Artificial Sequence
  chemically treated genomic DNA (Homo sapiens) CpG-island No: 28861
agcgggggtagtttttcgttgtcgtcggtattggcgtatagtaggacgtttaggcgttgggtggtttgacgcggtcgttcgtcgttttcgtatagtttcgcggtttggtcgggtaggaagtcgtattatagattggtttcggtggcgttgaatacgttttgcgaggcgtagttttcggttatcgacggcggttgtttttttcgagcgcgttaattagtagtgttttcgttattgtttttcgagggtatcgcggtcggattggtaggcgtcgtcggggtgcggggggtagcgtttcgcgcgcgggcgcgggttacgtcgttgtaggatattacgtcgtggcgtcggcggaagcggtttagttagtcgttggaggcggtgaagtcgtttatgtttagtttttcggttatgcgtagcgttttttttttgaggatgatgtttttgatcggtaggtcggcggcgcggatttgttggaattaggcgatgagtaagttttcgagtttgtcgtagggagatagtttgttggttttgcggtaggtggaggttatttcgtatttgcgtttcgacgttaggatggcgcgtttgttttttaggatcgtgtttagcgtggacggcgggatgttgaagcgtcgcgcgatttcgtttttgcgtaggttcggatttttttttattttttggatgattcgtgatttttttcggaacgttagttgtcgttttttgggg

SEQ ID NO: 28862 - DNA, 720 bp, Artificial Sequence
  chemically treated genomic DNA (Homo sapiens) CpG-island No: 28862
ccccaaaaaacgacaactaacgttccgaaaaaaatcacgaatcatccaaaaaataaaaaaaaatccgaacctacgcaaaaacgaaatcgcgcgacgcttcaacatcccgccgtccacgctaaacacgatcctaaaaaacaaacgcgccatcctaacgtcgaaacgcaaatacgaaataacctccacctaccgcaaaaccaacaaactatctccctacgacaaactcgaaaacttactcatcgcctaattccaacaaatccgcgccgccgacctaccgatcaaaaacatcatcctcaaaaaaaaaacgctacgcataaccgaaaaactaaacataaacgacttcaccgcctccaacgactaactaaaccgcttccgccgacgccacgacgtaatatcctacaacgacgtaacccgcgcccgcgcgcgaaacgctaccccccgcaccccgacgacgcctaccaatccgaccgcgataccctcgaaaaacaataacgaaaacactactaattaacgcgctcgaaaaaaacaaccgccgtcgataaccgaaaactacgcctcgcaaaacgtattcaacgccaccgaaaccaatctataatacgacttcctacccgaccaaaccgcgaaactatacgaaaacgacgaacgaccgcgtcaaaccacccaacgcctaaacgtcctactatacgccaataccgacgacaacgaaaaactacccccgct

SEQ ID NO: 28863 - DNA, 720 bp, Artificial Sequence
  chemically treated genomic DNA (Homo sapiens) CpG-island No: 28863
ttttaagaggcgatagttgacgtttcgggagaagttacggattatttaggaggtggaggagaattcggatttgcgtaagggcgagatcgcgcggcgttttaatatttcgtcgtttacgttgagtacgattttgaagaataagcgcgttattttggcgtcggagcgtaagtacggggtggtttttatttgtcgtaagattaataagttgtttttttacgataagttcgagggtttgtttatcgtttggttttagtagattcgcgtcgtcggtttgtcggttaagggtattatttttaaggagaaggcgttgcgtatagtcgaggagttgggtatggacgattttatcgtttttaacggttggttggatcgttttcgtcggcgttacggcgtggtgttttgtagcggcgtggttcgcgttcgcgcgcgaaacgttgtttttcgtatttcggcggcgtttgttagttcggtcgcggtgttttcggagggtagtggcgggagtattattggttggcgcgttcgggaggagtagtcgtcgtcggtggtcgagggttacgtttcgtaggacgtgtttagcgttatcgagattagtttatggtacgattttttgttcgattaggtcgcggggttgtgcggaggcgacggacggtcgcgttaagttatttagcgtttgagcgttttgttatgcgttaatgtcgacggtagcgagaagttgttttcgtt

SEQ ID NO: 28864 - DNA, 720 bp, Artificial Sequence
  chemically treated genomic DNA (Homo sapiens) CpG-island No: 28864
aacgaaaacaacttctcgctaccgtcgacattaacgcataacaaaacgctcaaacgctaaataacttaacgcgaccgtccgtcgcctccgcacaaccccgcgacctaatcgaacaaaaaatcgtaccataaactaatctcgataacgctaaacacgtcctacgaaacgtaaccctcgaccaccgacgacgactactcctcccgaacgcgccaaccaataatactcccgccactaccctccgaaaacaccgcgaccgaactaacaaacgccgccgaaatacgaaaaacaacgtttcgcgcgcgaacgcgaaccacgccgctacaaaacaccacgccgtaacgccgacgaaaacgatccaaccaaccgttaaaaacgataaaatcgtccatacccaactcctcgactatacgcaacgccttctccttaaaaataatacccttaaccgacaaaccgacgacgcgaatctactaaaaccaaacgataaacaaaccctcgaacttatcgtaaaaaaacaacttattaatcttacgacaaataaaaaccaccccgtacttacgctccgacgccaaaataacgcgcttattcttcaaaatcgtactcaacgtaaacgacgaaatattaaaacgccgcgcgatctcgcccttacgcaaatccgaattctcctccacctcctaaataatccgtaacttctcccgaaacgtcaactatcgcctcttaaaa

SEQ ID NO: 28865 - DNA, 537 bp, Artificial Sequence
  chemically treated genomic DNA (Homo sapiens) CpG-island No: 28865
gttgttcgagattgcgcgtttttagtaaaaaattaggtcggtttttcgagtttagtttagcgtttttcgattcgtaaattaaggtttagtgatcgttttcgttgcgtagtcgtttgcgtcgttagttaattacgcgcggtcgagtagtttcgtttttttatatggttaatggtcgcgcgttttgttcgtttcgttttttcgttgcgggaagggttttgggtttcgggcggcggtcgttaggttttagggtcgggggtattcgaggtaagatcgtttttcgggcgttgggttttttcggtttagtacgtacggacgtttttagggaaggtggttgtagcggtaggacggagttcgtcgggacgttttgggtttggggtgcgcggggggtttaggaggggataggacgcgcggggattcggaagagcgggttttgtcgtaagagtttcgggaatattgagggttttaggcgtcgtatttagtattcggggaaaagggggtaggtggcgttgggcgtttgtttaggttgggggaaaggta

SEQ ID NO: 28866 - DNA, 537 bp, Artificial Sequence
  chemically treated genomic DNA (Homo sapiens) CpG-island No: 28866
tacctttcccccaacctaaacaaacgcccaacgccacctacccccttttccccgaatactaaatacgacgcctaaaaccctcaatattcccgaaactcttacgacaaaacccgctcttccgaatccccgcgcgtcctatcccctcctaaaccccccgcgcaccccaaacccaaaacgtcccgacgaactccgtcctaccgctacaaccaccttccctaaaaacgtccgtacgtactaaaccgaaaaaacccaacgcccgaaaaacgatcttacctcgaatacccccgaccctaaaacctaacgaccgccgcccgaaacccaaaacccttcccgcaacgaaaaaacgaaacgaacaaaacgcgcgaccattaaccatataaaaaaacgaaactactcgaccgcgcgtaattaactaacgacgcaaacgactacgcaacgaaaacgatcactaaaccttaatttacgaatcgaaaaacgctaaactaaactcgaaaaaccgacctaattttttactaaaaacgcgcaatctcgaacaac

SEQ ID NO: 28867 - DNA, 537 bp, Artificial Sequence
  chemically treated genomic DNA (Homo sapiens) CpG-island No: 28867
tattttttttttagtttgagtagacgtttagcgttatttattttttttttttcggatgttggatgcggcgtttggagtttttagtgttttcgaaatttttgcgatagggttcgttttttcggattttcgcgcgttttgtttttttttgggtttttcgcgtattttagatttagggcgtttcggcggatttcgttttgtcgttgtagttattttttttaaaggcgttcgtgcgtgttgagtcgaaaggatttaacgttcgggaagcgattttatttcgggtattttcggttttgagatttggcgatcgtcgttcggggtttaggatttttttcgtagcgaggaggcggggcgggtagagcgcgcggttattggttatgtggaggggcggggttattcggtcgcgcgtggttggttggcgacgtaggcggttgcgtagcggggacggttattgggttttggtttgcgggtcgggaagcgttagattgggttcggagaatcgatttgattttttgttgggggcgcgtagtttcgagtaat

SEQ ID NO: 28868 - DNA, 537 bp, Artificial Sequence
  chemically treated genomic DNA (Homo sapiens) CpG-island No: 28868
attactcgaaactacgcgcccccaacaaaaaatcaaatcgattctccgaacccaatctaacgcttcccgacccgcaaaccaaaacccaataaccgtccccgctacgcaaccgcctacgtcgccaaccaaccacgcgcgaccgaataaccccgcccctccacataaccaataaccgcgcgctctacccgccccgcctcctcgctacgaaaaaaatcctaaaccccgaacgacgatcgccaaatctcaaaaccgaaaatacccgaaataaaatcgcttcccgaacgttaaatcctttcgactcaacacgcacgaacgcctttaaaaaaaataactacaacgacaaaacgaaatccgccgaaacgccctaaatctaaaatacgcgaaaaacccaaaaaaaaacaaaacgcgcgaaaatccgaaaaaacgaaccctatcgcaaaaatttcgaaaacactaaaaactccaaacgccgcatccaacatccgaaaaaaaaaaaataaataacgctaaacgtctactcaaactaaaaaaaaaata

SEQ ID NO: 28869 - DNA, 762 bp, Artificial Sequence
  chemically treated genomic DNA (Homo sapiens) CpG-island No: 28869
tcgtttcgtaggtttttgaatcgaaagagggcggggtcgggtagacggcgttggtatcgcgtcggcgcgtttttagttggaaagaaagtcgatggacgcgcgtacggagcgattggtgttgacgtcgacggcggtgattttaatttcggtgtcgttaaattgtatggcggcgcggatttcgcggcggtcgggaggcgcgtcggcggtgttttggtcgtagtcggcgggtttaagttcgaggttgagcgcgtcgtatttgcgtacgtcggggtcggtgatgaagcgcgtattttttgtcgcgtagtagtataggttgatgagtacgcgtcgttggtcgggacgcgtcgggtagtagttgcgtcgtattttttcgtttagggttatcgattgttcggcggttacgaagcgttcgaagacgtcggtgtattagcggcggtcgtcgcgaattagtagtttttcgggcgggtggcgtttaggtataaagcggttgagtacgtttacgttataggtgagcggcgagcggcggattcgtattacgttcggcgtttggtcgaatagtatcgcgtttttgaggatggtgaggtttacgtcgtgcgggattacgatacgtagatcgcgggcgtttagcgtcgtttgtatcgcgtgttgtagtatcgttgattcggcgaagtcgtttattaggaatagtagttttatattttgtattttcggtcgtgttagtagggtttttgcgggataggacggggggacgcgggtgaaggg

SEQ ID NO: 28870 - DNA, 762 bp, Artificial Sequence
  chemically treated genomic DNA (Homo sapiens) CpG-island No: 28870
cccttcacccgcgtccccccgtcctatcccgcaaaaaccctactaacacgaccgaaaatacaaaatataaaactactattcctaataaacgacttcgccgaatcaacgatactacaacacgcgatacaaacgacgctaaacgcccgcgatctacgtatcgtaatcccgcacgacgtaaacctcaccatcctcaaaaacgcgatactattcgaccaaacgccgaacgtaatacgaatccgccgctcgccgctcacctataacgtaaacgtactcaaccgctttatacctaaacgccacccgcccgaaaaactactaattcgcgacgaccgccgctaatacaccgacgtcttcgaacgcttcgtaaccgccgaacaatcgataaccctaaacgaaaaaatacgacgcaactactacccgacgcgtcccgaccaacgacgcgtactcatcaacctatactactacgcgacaaaaaatacgcgcttcatcaccgaccccgacgtacgcaaatacgacgcgctcaacctcgaacttaaacccgccgactacgaccaaaacaccgccgacgcgcctcccgaccgccgcgaaatccgcgccgccatacaatttaacgacaccgaaattaaaatcaccgccgtcgacgtcaacaccaatcgctccgtacgcgcgtccatcgactttctttccaactaaaaacgcgccgacgcgataccaacgccgtctacccgaccccgccctctttcgattcaaaaacctacgaaacga

SEQ ID NO: 28871 - DNA, 762 bp, Artificial Sequence
  chemically treated genomic DNA (Homo sapiens) CpG-island No: 28871
ttttttattcgcgttttttcgttttgtttcgtagaggttttgttggtacggtcggaggtgtagggtgtgaagttgttgtttttagtgggcggtttcgtcgagttagcggtgttgtagtacgcggtgtaggcggcgttgggcgttcgcggtttgcgtgtcgtggtttcgtacgacgtgggttttattatttttaaaggcgcggtgttgttcggttaggcgtcgggcgtggtgcgggttcgtcgttcgtcgtttatttatggcgtgggcgtgtttaatcgttttgtgtttgggcgttattcgttcgaaaagttgttggttcgcgacggtcgtcgttggtgtatcgacgttttcgagcgtttcgtggtcgtcgagtagtcggtggttttgggcgaggaggtgcggcgtagttattgttcggcgcgtttcggttagcggcgcgtatttattaatttgtattgttgcgcggtagaggatgcgcgttttattatcgatttcggcgtgcgtaaatgcggcgcgtttagtttcgagtttgagttcgtcgattgcggttaggatatcgtcggcgcgtttttcggtcgtcgcgagattcgcgtcgttatgtagtttggcgatatcgaaattaaggttatcgtcgtcgacgttagtattaatcgtttcgtgcgcgcgtttatcgattttttttttaattgagggcgcgtcggcgcggtgttagcgtcgtttgttcggtttcgttttttttcggtttaggggtttgcggagcgg

SEQ ID NO: 28872 - DNA, 762 bp, Artificial Sequence
  chemically treated genomic DNA (Homo sapiens) CpG-island No: 28872
ccgctccgcaaacccctaaaccgaaaaaaaacgaaaccgaacaaacgacgctaacaccgcgccgacgcgccctcaattaaaaaaaaaatcgataaacgcgcgcacgaaacgattaatactaacgtcgacgacgataaccttaatttcgatatcgccaaactacataacgacgcgaatctcgcgacgaccgaaaaacgcgccgacgatatcctaaccgcaatcgacgaactcaaactcgaaactaaacgcgccgcatttacgcacgccgaaatcgataataaaacgcgcatcctctaccgcgcaacaatacaaattaataaatacgcgccgctaaccgaaacgcgccgaacaataactacgccgcacctcctcgcccaaaaccaccgactactcgacgaccacgaaacgctcgaaaacgtcgatacaccaacgacgaccgtcgcgaaccaacaacttttcgaacgaataacgcccaaacacaaaacgattaaacacgcccacgccataaataaacgacgaacgacgaacccgcaccacgcccgacgcctaaccgaacaacaccgcgcctttaaaaataataaaacccacgtcgtacgaaaccacgacacgcaaaccgcgaacgcccaacgccgcctacaccgcgtactacaacaccgctaactcgacgaaaccgcccactaaaaacaacaacttcacaccctacacctccgaccgtaccaacaaaacctctacgaaacaaaacgaaaaaacgcgaataaaaaa

SEQ ID NO: 28873 - DNA, 505 bp, Artificial Sequence
  chemically treated genomic DNA (Homo sapiens) CpG-island No: 28873
agatcgcgtttttggggttaattttagtagcgagaggcggtttttgtttatcgttttattttattacgtcgcggttttttaagaatttttttagcggtttttttttttttttaggagtagaggttttttgagatcgacggggagggacggttcgggtcggttattcgaggggtcgtacggattttttttttcgtttagttttattttttcgaggggcggcggttcgggagtggcgattcggtttttttatggcgcgcgtcgtcggggtttttggttaggtttcgagcggggttggcggggaggggaggcgggagcgagggcgggcggtgggaggtgggggcgggaaggttcgaaggcggcggtttgaggttgtatcgggtacgggtcggtcgtaatttagtttgggcggagtcggagttgcgagtcgttgtttagaggtcgaggagtttatagttatgggttggaggtttcggagagttcgggggatttcgttgttgttgttgtt

SEQ ID NO: 28874 - DNA, 505 bp, Artificial Sequence
  chemically treated genomic DNA (Homo sapiens) CpG-island No: 28874
aacaacaacaacaacgaaatcccccgaactctccgaaacctccaacccataactataaactcctcgacctctaaacaacgactcgcaactccgactccgcccaaactaaattacgaccgacccgtacccgatacaacctcaaaccgccgccttcgaaccttcccgcccccacctcccaccgcccgccctcgctcccgcctcccctccccgccaaccccgctcgaaacctaaccaaaaaccccgacgacgcgcgccataaaaaaaccgaatcgccactcccgaaccgccgcccctcgaaaaaataaaactaaacgaaaaaaaaaatccgtacgacccctcgaataaccgacccgaaccgtccctccccgtcgatctcaaaaaacctctactcctaaaaaaaaaaaaaaaccgctaaaaaaattcttaaaaaaccgcgacgtaataaaataaaacgataaacaaaaaccgcctctcgctactaaaattaaccccaaaaacgcgatct

SEQ ID NO: 28875 - DNA, 505 bp, Artificial Sequence
  chemically treated genomic DNA (Homo sapiens) CpG-island No: 28875
agtagtagtagtaacggggtttttcgagtttttcggggtttttagtttatagttgtgagtttttcggtttttaggtagcggttcgtaatttcggtttcgtttaggttggattgcggtcgattcgtgttcggtgtagttttaggtcgtcgttttcggattttttcgtttttattttttatcgttcgttttcgttttcgtttttttttttcgttaatttcgttcggagtttggttaggggtttcgacggcgcgcgttatgggggagtcgggtcgttattttcggatcgtcgtttttcgagggggtggagttgggcggaggagggaattcgtgcggtttttcggatgatcggttcgagtcgttttttttcgtcggttttagagggtttttatttttgagaggaggagagaatcgttgggaaggtttttggaggatcgcggcgtggtgggatgaggcggtgggtaaaggtcgtttttcgttgttgaagttggttttaggagcgcgattt

SEQ ID NO: 28876 - DNA, 505 bp, Artificial Sequence
  chemically treated genomic DNA (Homo sapiens) CpG-island No: 28876
aaatcgcgctcctaaaaccaacttcaacaacgaaaaacgacctttacccaccgcctcatcccaccacgccgcgatcctccaaaaaccttcccaacgattctctcctcctctcaaaaataaaaaccctctaaaaccgacgaaaaaaaacgactcgaaccgatcatccgaaaaaccgcacgaattccctcctccgcccaactccaccccctcgaaaaacgacgatccgaaaataacgacccgactcccccataacgcgcgccgtcgaaacccctaaccaaactccgaacgaaattaacgaaaaaaaaaaacgaaaacgaaaacgaacgataaaaaataaaaacgaaaaaatccgaaaacgacgacctaaaactacaccgaacacgaatcgaccgcaatccaacctaaacgaaaccgaaattacgaaccgctacctaaaaaccgaaaaactcacaactataaactaaaaaccccgaaaaactcgaaaaaccccgttactactactact

SEQ ID NO: 28877 - DNA, 507 bp, Artificial Sequence
  chemically treated genomic DNA (Homo sapiens) CpG-island No: 28877
gcgggaggtgcggtcgcggttcgggtttggtaggcgttgcgcgcggggttggggtagcggtaatcgtaattgtggtcgcggtcgtcgtaggcgtatagcgcgcgtttaagtggagaataaagtgatttttagaatttttttaatttttttcggcgttttcgcgagggttacgcgtcgagggtagcggagggcggcgcgcgatcggttttatcgagttcggcgcgcgattcgaggtaaggggcgttcgggtgagggcgtaggagggcgacgattcgcgttggttggcggcggttttaggttttttgcgggcggggcggcgcgcggtcggcggttttttttttttttttttgttggtcgtttttttttgttttcgtttttttgggagtttcgcggaaggtcgcggttgcggggcgcggtttggtatttttttttcggagggcggtagcgttcgggtatagtttggtacgggggacgaagtattttttagaaggttttgaaattaggttt

SEQ ID NO: 28878 - DNA, 507 bp, Artificial Sequence
  chemically treated genomic DNA (Homo sapiens) CpG-island No: 28878
aaacctaatttcaaaaccttctaaaaaatacttcgtcccccgtaccaaactatacccgaacgctaccgccctccgaaaaaaaaataccaaaccgcgccccgcaaccgcgaccttccgcgaaactcccaaaaaaacgaaaacaaaaaaaaacgaccaacaaaaaaaaaaaaaaaaaaccgccgaccgcgcgccgccccgcccgcaaaaaacctaaaaccgccgccaaccaacgcgaatcgtcgccctcctacgccctcacccgaacgccccttacctcgaatcgcgcgccgaactcgataaaaccgatcgcgcgccgccctccgctaccctcgacgcgtaaccctcgcgaaaacgccgaaaaaaattaaaaaaattctaaaaatcactttattctccacttaaacgcgcgctatacgcctacgacgaccgcgaccacaattacgattaccgctaccccaaccccgcgcgcaacgcctaccaaacccgaaccgcgaccgcacctcccgc

SEQ ID NO: 28879 - DNA, 507 bp, Artificial Sequence
  chemically treated genomic DNA (Homo sapiens) CpG-island No: 28879
ggatttagttttagagttttttggaaagtgtttcgtttttcgtgttaggttgtgttcggacgttgtcgtttttcggggagagggtgttaggtcgcgtttcgtagtcgcgatttttcgcgggatttttaggaaagcgggggtagagaggggcggttaataaaggggaagggaggggatcgtcggtcgcgcgtcgtttcgttcgtaggggatttggagtcgtcgttaattagcgcgggtcgtcgtttttttgcgtttttattcgggcgttttttatttcgggtcgcgcgtcgggttcggtggggtcggtcgcgcgtcgtttttcgttattttcggcgcgtggttttcgcgggaacgtcgggaggagttggagaagttttgggggttattttgttttttatttggacgcgcgttgtgcgtttgcggcggtcgcggttatagttacggttatcgttgttttagtttcgcgcgtagcgtttgttaggttcgagtcgcgatcgtatttttcgt

SEQ ID NO: 28880 - DNA, 507 bp, Artificial Sequence
  chemically treated genomic DNA (Homo sapiens) CpG-island No: 28880
acgaaaaatacgatcgcgactcgaacctaacaaacgctacgcgcgaaactaaaacaacgataaccgtaactataaccgcgaccgccgcaaacgcacaacgcgcgtccaaataaaaaacaaaataacccccaaaacttctccaactcctcccgacgttcccgcgaaaaccacgcgccgaaaataacgaaaaacgacgcgcgaccgaccccaccgaacccgacgcgcgacccgaaataaaaaacgcccgaataaaaacgcaaaaaaacgacgacccgcgctaattaacgacgactccaaatcccctacgaacgaaacgacgcgcgaccgacgatcccctcccttcccctttattaaccgcccctctctacccccgctttcctaaaaatcccgcgaaaaatcgcgactacgaaacgcgacctaacaccctctccccgaaaaacgacaacgtccgaacacaacctaacacgaaaaacgaaacactttccaaaaaactctaaaactaaatcc

SEQ ID NO: 28881 - DNA, 535 bp, Artificial Sequence
  chemically treated genomic DNA (Homo sapiens) CpG-island No: 28881
gcgggtgagggtgcgggtgagggtgttggtggagcgggtgagggtgcgggtgagggtgttggtggagcgggtgagggtgagggtgagggtgttggtggagcgggtgagggtgcgggtgagggtgttggtggagcgggtgcgggtgcgggtgtaggtgagggtgttgatggagcgggtgagggtgagggtgagggtgttgatgaagcgggtgagggtgcgggtgagggtgttgatggagcgggtgagggtgcgggtgagggtgttgatggagcgggtgagggtgagggtgagggtgagggtgttgacggagcgggtgagggtgagggtgagggtgttgatggagcgggtgagggtgagggtgagggtgttgatggagcgggcgagggtgagggtgagggtgttgatggagcgggtgagggtgcgggtgagggtgttggtggagcgggtgagggtgttaatgaagcgggtgcgggtgagggtgttgatggagcgggtgcgggtgagggggtcgtatatttatttttttgtttggttt

SEQ ID NO: 28882 - DNA, 535 bp, Artificial Sequence
  chemically treated genomic DNA (Homo sapiens) CpG-island No: 28882
aaaccaaacaaaaaaataaatatacgaccccctcacccgcacccgctccatcaacaccctcacccgcacccgcttcattaacaccctcacccgctccaccaacaccctcacccgcaccctcacccgctccatcaacaccctcaccctcaccctcgcccgctccatcaacaccctcaccctcaccctcacccgctccatcaacaccctcaccctcaccctcacccgctccgtcaacaccctcaccctcaccctcaccctcacccgctccatcaacaccctcacccgcaccctcacccgctccatcaacaccctcacccgcaccctcacccgcttcatcaacaccctcaccctcaccctcacccgctccatcaacaccctcacctacacccgcacccgcacccgctccaccaacaccctcacccgcaccctcacccgctccaccaacaccctcaccctcaccctcacccgctccaccaacaccctcacccgcaccctcacccgctccaccaacaccctcacccgcaccctcacccgc

SEQ ID NO: 28883 - DNA, 535 bp, Artificial Sequence
  chemically treated genomic DNA (Homo sapiens) CpG-island No: 28883
ggattaggtaaggggatgagtatgcggtttttttattcgtattcgttttattagtatttttattcgtattcgttttattaatatttttattcgttttattagtatttttattcgtatttttattcgttttattagtatttttatttttattttcgttcgttttattagtatttttatttttatttttattcgttttattagtatttttatttttatttttattcgtttcgttaatatttttatttttatttttatttttattcgttttattagtatttttattcgtatttttattcgttttattagtatttttattcgtatttttattcgttttattagtatttttatttttatttttattcgttttattagtatttttatttgtattcgtattcgtattcgttttattagtatttttattcgtatttttattcgttttattagtatttttatttttatttttattcgttttattagtatttttattcgtatttttattcgttttattagtatttttattcgtatttttattcgt

SEQ ID NO: 28884 - DNA, 535 bp, Artificial Sequence
  chemically treated genomic DNA (Homo sapiens) CpG-island No: 28884
acgaataaaaatacgaataaaaatactaataaaacgaataaaaatacgaataaaaatactaataaaacgaataaaaataaaaataaaaatactaataaaacgaataaaaatacgaataaaaatactaataaaacgaatacgaatacgaatacaaataaaaatactaataaaacgaataaaaataaaaataaaaatactaataaaacgaataaaaatacgaataaaaatactaataaaacgaataaaaatacgaataaaaatactaataaaacgaataaaaataaaaataaaaataaaaatattaacgaaacgaataaaaataaaaataaaaatactaataaaacgaataaaaataaaaataaaaatactaataaaacgaacgaaaataaaaataaaaatactaataaaacgaataaaaatacgaataaaaatactaataaaacgaataaaaatattaataaaacgaatacgaataaaaatactaataaaacgaatacgaataaaaaaaccgcatactcatccccttacctaatcc

SEQ ID NO: 28885 - DNA, 961 bp, Artificial Sequence
  chemically treated genomic DNA (Homo sapiens) CpG-island No: 28885
agcggggtcgaatttcgtcggggggaagcggtagtacgtgttaaggttacgatttttttttgtcgtcgggagggttcggtcgtcgtagggggcggggagcgtgggaggggacggcgtttatttggcggttgggtcggatcgcggcgggagagcgggtagcgggtttagttggtcggggtttaggtgagggcggcgggtcgcgttttttagcgggggaggttttttggtcgggaaaggtataattgtgtgtagttatttttggtatgttaagcgggtcgggcggtcgcgagtcgggaggggcgtcgtttttaggggttcgggagagggtaggggttaggcgggcgggtgcgggaaggatgcgggcgcgggggcgtattttttcggggcggagtcgcgggttgtgcgggaattttagcggggttcgggtcgcggtttttggcggattgtggtatttttcgggttagatagtttgattatagaggcggtcgcggtcgggagttcggggagttaagggaggggtagacggaagcggcgattcggcgggtttcgggagggcggtggggtgggtcggggcggggttatcgcggggaggacggcggcggcgttgcgatttttgaagtttaaattgtcgtcggggttggtgtcgcgcgttgtcgttgggtattcgtttcgtttttcgcgttttgtttgattgttcgggttttcgcgggttttgggtcgtttttaggagtttagagaaagttaggtttttacgttcgtgtaggttcgagattttaacgaattgtagagcgtaataaagggaattagagtttcggcgttttcgtagtcggagcggaagtcggagttgtgggaggttcgcgtgtttttttcgttcgtggggtttagacgcgcggggataattttttttttttacgtatttcgagttttttttttttttttttgttttagttatggaagggtt

SEQ ID NO: 28886 - DNA, 961 bp, Artificial Sequence
  chemically treated genomic DNA (Homo sapiens) CpG-island No: 28886
aacccttccataactaaaacaaaaaaaaaaaaaaaaaactcgaaatacgtaaaaaaaaaaaattatccccgcgcgtctaaaccccacgaacgaaaaaaacacgcgaacctcccacaactccgacttccgctccgactacgaaaacgccgaaactctaattccctttattacgctctacaattcgttaaaatctcgaacctacacgaacgtaaaaacctaactttctctaaactcctaaaaacgacccaaaacccgcgaaaacccgaacaatcaaacaaaacgcgaaaaacgaaacgaatacccaacgacaacgcgcgacaccaaccccgacgacaatttaaacttcaaaaatcgcaacgccgccgccgtcctccccgcgataaccccgccccgacccaccccaccgccctcccgaaacccgccgaatcgccgcttccgtctacccctcccttaactccccgaactcccgaccgcgaccgcctctataatcaaactatctaacccgaaaaataccacaatccgccaaaaaccgcgacccgaaccccgctaaaattcccgcacaacccgcgactccgccccgaaaaaatacgcccccgcgcccgcatccttcccgcacccgcccgcctaacccctaccctctcccgaacccctaaaaacgacgcccctcccgactcgcgaccgcccgacccgcttaacataccaaaaataactacacacaattatacctttcccgaccaaaaaacctcccccgctaaaaaacgcgacccgccgccctcacctaaaccccgaccaactaaacccgctacccgctctcccgccgcgatccgacccaaccgccaaataaacgccgtcccctcccacgctccccgccccctacgacgaccgaaccctcccgacgacaaaaaaaaatcgtaaccttaacacgtactaccgcttccccccgacgaaattcgaccccgct

SEQ ID NO: 28887 - DNA, 961 bp, Artificial Sequence
  chemically treated genomic DNA (Homo sapiens) CpG-island No: 28887
agtttttttatggttaggataagggagggagagagagattcgggatgcgtggaggggaggggttgttttcgcgcgtttgggttttacgggcggggagggtacgcgggttttttataatttcggttttcgtttcggttgcgaaggcgtcggggttttagttttttttgttgcgttttgtagttcgttaaggtttcgaatttatacgaacgtgaagatttggttttttttaaatttttgaaagcgatttaaggttcgcggggattcgggtagttaggtaggacgcgggaagcgaagcgggtgtttagcggtagcgcgcggtattagtttcgacgatagtttggattttaaaagtcgtagcgtcgtcgtcgtttttttcgcggtggtttcgtttcggtttattttatcgttttttcggggttcgtcgagtcgtcgttttcgtttgttttttttttggtttttcgggttttcggtcgcggtcgtttttgtggttagattgtttggttcgggagatgttatagttcgttaggggtcgcggttcgggtttcgttggggttttcgtatagttcgcggtttcgtttcgagaggatgcgttttcgcgttcgtatttttttcgtattcgttcgtttggtttttgttttttttcgggtttttgagagcggcgtttttttcggttcgcggtcgttcggttcgtttgatatattagaaatagttgtatataattgtatttttttcggttaagaaatttttttcgttggggagcgcggttcgtcgtttttatttgagtttcggttagttgagttcgttattcgttttttcgtcgcgattcggtttagtcgttaggtgagcgtcgtttttttttacgtttttcgttttttgcggcggtcgggttttttcggcggtagaggagggtcgtggttttggtacgtgttgtcgttttttttcggcggagttcggtttcgtt

SEQ ID NO: 28888 - DNA, 961 bp, Artificial Sequence
  chemically treated genomic DNA (Homo sapiens) CpG-island No: 28888
aacgaaaccgaactccgccgaaaaaaaacgacaacacgtaccaaaaccacgaccctcctctaccgccgaaaaaacccgaccgccgcaaaaaacgaaaaacgtaaaaaaaaacgacgctcacctaacgactaaaccgaatcgcgacgaaaaaacgaataacgaactcaactaaccgaaactcaaataaaaacgacgaaccgcgctccccaacgaaaaaaatttcttaaccgaaaaaaatacaattatatacaactatttctaatatatcaaacgaaccgaacgaccgcgaaccgaaaaaaacgccgctctcaaaaacccgaaaaaaaacaaaaaccaaacgaacgaatacgaaaaaaatacgaacgcgaaaacgcatcctctcgaaacgaaaccgcgaactatacgaaaaccccaacgaaacccgaaccgcgacccctaacgaactataacatctcccgaaccaaacaatctaaccacaaaaacgaccgcgaccgaaaacccgaaaaaccaaaaaaaaaacaaacgaaaacgacgactcgacgaaccccgaaaaaacgataaaataaaccgaaacgaaaccaccgcgaaaaaaacgacgacgacgctacgacttttaaaatccaaactatcgtcgaaactaataccgcgcgctaccgctaaacacccgcttcgcttcccgcgtcctacctaactacccgaatccccgcgaaccttaaatcgctttcaaaaatttaaaaaaaaccaaatcttcacgttcgtataaattcgaaaccttaacgaactacaaaacgcaacaaaaaaaactaaaaccccgacgccttcgcaaccgaaacgaaaaccgaaattataaaaaacccgcgtaccctccccgcccgtaaaacccaaacgcgcgaaaacaacccctcccctccacgcatcccgaatctctctctccctcccttatcctaaccataaaaaaact

SEQ ID NO: 28889 - DNA, 1431 bp, Artificial Sequence
  chemically treated genomic DNA (Homo sapiens) CpG-island No: 28889
cggtttttcggcgggggtcggtagtttggttttttatttcggcgtgcgtttagtttttaagttcgtcggtttagcgagggcggcggcggtcgtttacggcgatttttatcgggaggagagtagtagtaagtaaggagtcggtttcgttttgggtaggttgttgggcgggggtcgggcgtgcgggcgtttcgggagcggggagaattcggcggcgggcggcgcgggttattattattattattacgcgtattattattattattttaagtgtttgttcgttggggattcgtcgtcgtcgtcgtcgtttggtttgttttgttttggggttttgcgcggtttttttttgtttttcgttttttcggaagaggcgttcgtttttaagtacgtggagcgcgtttcgttcgtagtcgtcgcgttgttaggagcgcgttatgcgtagttgttttttgcgtcggggttgtttttcgagcgttgcgcgttgtcgtttttcgattcgggcggttttaaagtttattcgggtggtgagtgtagttatttgttcgtcgttatgtcggtttttatagtttataacggggagttgttttacggtttatcggttattatcgtttattattcgtttaaattgtatttcggcgggttgttgaagtattcggagtttattttttattttagcgggtttgtagcggtcgttttaagtttcgtcgagttggggtcgttggttagtatcgatcgagagatcgttatgtataattagtagttgttcgagatggttgtcgggaagggtcgcggacgtttggattcggggacgttgttatcggtcgtcgcggcggcgggaggtatcgggggcggcggtagcggaggtagcggcgtaggtaagtttaagatcggttatttgtgtttttattgtggtaagttgtattcgcgtaagtatgggtttaagatttatatgcggacgtatacgggttataagttatttaagtgtaaagtttgtttgcggtttttcggcgattttagtaattttaataagtatattcggttgtacgtcgagggtaatacgttttatcgttgcgagttttgcggtaaggtatttgtgcgtcgtcgggatttggagcgatatgttaagtttcgttattttggttagagtttgttcgttaaagcgggcgacggttcgggtgtcgagttcggttatttttcggagtttggggattttaagagcgacgatagtgacgtggacgtttgttttatagacgattagagcgatttcgaggttgggggcggcggggagcgcgatttgtaacgagttttttcgggaaggggcggggtgaggatagagaggagtcgagggtttattttcgtagtagaggaatttttggtggtgggaagagggatttaatggataaaatcgtttttgtttttgagagggcgttagat

SEQ ID NO: 28890 - DNA, 1431 bp, Artificial Sequence
  chemically treated genomic DNA (Homo sapiens) CpG-island No: 28890
atctaacgccctctcaaaaacaaaaacgattttatccattaaatccctcttcccaccaccaaaaattcctctactacgaaaataaaccctcgactcctctctatcctcaccccgccccttcccgaaaaaactcgttacaaatcgcgctccccgccgcccccaacctcgaaatcgctctaatcgtctataaaacaaacgtccacgtcactatcgtcgctcttaaaatccccaaactccgaaaaataaccgaactcgacacccgaaccgtcgcccgctttaacgaacaaactctaaccaaaataacgaaacttaacatatcgctccaaatcccgacgacgcacaaataccttaccgcaaaactcgcaacgataaaacgtattaccctcgacgtacaaccgaatatacttattaaaattactaaaatcgccgaaaaaccgcaaacaaactttacacttaaataacttataacccgtatacgtccgcatataaatcttaaacccatacttacgcgaatacaacttaccacaataaaaacacaaataaccgatcttaaacttacctacgccgctacctccgctaccgccgcccccgatacctcccgccgccgcgacgaccgataacaacgtccccgaatccaaacgtccgcgacccttcccgacaaccatctcgaacaactactaattatacataacgatctctcgatcgatactaaccaacgaccccaactcgacgaaacttaaaacgaccgctacaaacccgctaaaataaaaaataaactccgaatacttcaacaacccgccgaaatacaatttaaacgaataataaacgataataaccgataaaccgtaaaacaactccccgttataaactataaaaaccgacataacgacgaacaaataactacactcaccacccgaataaactttaaaaccgcccgaatcgaaaaacgacaacgcgcaacgctcgaaaaacaaccccgacgcaaaaaacaactacgcataacgcgctcctaacaacgcgacgactacgaacgaaacgcgctccacgtacttaaaaacgaacgcctcttccgaaaaaacgaaaaacaaaaaaaaaccgcgcaaaaccccaaaacaaaacaaaccaaacgacgacgacgacgacgaatccccaacgaacaaacacttaaaataataataataatacgcgtaataataataataataacccgcgccgcccgccgccgaattctccccgctcccgaaacgcccgcacgcccgacccccgcccaacaacctacccaaaacgaaaccgactccttacttactactactctcctcccgataaaaatcgccgtaaacgaccgccgccgccctcgctaaaccgacgaacttaaaaactaaacgcacgccgaaataaaaaaccaaactaccgacccccgccgaaaaaccg

SEQ ID NO: 28891 - DNA, 1431 bp, Artificial Sequence
  chemically treated genomic DNA (Homo sapiens) CpG-island No: 28891
atttggcgtttttttaaaaataaaaacggttttgtttattgggtttttttttttattattaggagtttttttattgcgagaataaattttcgatttttttttgtttttatttcgttttttttcgggaagattcgttataagtcgcgtttttcgtcgtttttaatttcggggtcgttttggtcgtttgtgaagtagacgtttacgttattgtcgtcgtttttgggatttttaggtttcgggggatagtcgggttcggtattcgggtcgtcgttcgttttggcgagtagattttggttagggtggcgggatttgatatgtcgttttaggtttcggcggcgtataagtattttgtcgtagaattcgtagcggtagggcgtattgttttcggcgtgtagtcggatgtgtttgttgagattgttggggtcgtcgaagggtcgtagatagattttgtatttgagtggtttgtagttcgtgtgcgttcgtatgtggattttgagtttatatttgcgcgagtatagtttgttatagtagaggtataggtggtcggttttgggtttatttgcgtcgttgttttcgttgtcgtcgttttcggtgtttttcgtcgtcgcgacggtcggtggtaacgttttcgagtttaggcgttcgcgatttttttcggtagttatttcggatagttgttgattgtgtatggcgatttttcggtcgatgttggttagcgattttagttcggcggggtttagggcggtcgttgtaggttcgttgaagtaggagatggatttcggatattttagtagttcgtcgaagtgtaatttgagcgggtaataagcggtggtggtcggtgagtcgtagagtagtttttcgttgtagattgtaaaggtcggtatgacggcgggtaggtggttgtatttattattcggataggttttgagatcgttcgggtcgaggggcggtagcgcgtagcgttcgaggggtaatttcggcgtagggggtagttgcgtataacgcgtttttggtagcgcggcggttgcgggcggggcgcgttttacgtgtttgaaggcggacgtttttttcggggggacggagagtagagggaagtcgcgtagggttttagagtagggtaggttaggcggcggcggcggcggcgggtttttagcgagtaggtatttgggatggtggtggtggtgcgcgtggtggtgatggtggtgattcgcgtcgttcgtcgtcgagtttttttcgttttcggggcgttcgtacgttcggttttcgtttagtagtttgtttaaagcgaggtcggttttttgtttgttgttgtttttttttcggtaggggtcgtcgtgagcggtcgtcgtcgttttcgttaggtcggcgggtttgaaagttgagcgtacgtcggggtagaaagttaggttgtcgattttcgtcgaggagtcg

SEQ ID NO: 28892 - DNA, 1431 bp, Artificial Sequence
  chemically treated genomic DNA (Homo sapiens) CpG-island No: 28892
cgactcctcgacgaaaatcgacaacctaactttctaccccgacgtacgctcaactttcaaacccgccgacctaacgaaaacgacgacgaccgctcacgacgacccctaccgaaaaaaaaacaacaacaaacaaaaaaccgacctcgctttaaacaaactactaaacgaaaaccgaacgtacgaacgccccgaaaacgaaaaaaactcgacgacgaacgacgcgaatcaccaccatcaccaccacgcgcaccaccaccaccatcccaaatacctactcgctaaaaacccgccgccgccgccgccgcctaacctaccctactctaaaaccctacgcgacttccctctactctccgtccccccgaaaaaaacgtccgccttcaaacacgtaaaacgcgccccgcccgcaaccgccgcgctaccaaaaacgcgttatacgcaactaccccctacgccgaaattacccctcgaacgctacgcgctaccgcccctcgacccgaacgatctcaaaacctatccgaataataaatacaaccacctacccgccgtcataccgacctttacaatctacaacgaaaaactactctacgactcaccgaccaccaccgcttattacccgctcaaattacacttcgacgaactactaaaatatccgaaatccatctcctacttcaacgaacctacaacgaccgccctaaaccccgccgaactaaaatcgctaaccaacatcgaccgaaaaatcgccatacacaatcaacaactatccgaaataactaccgaaaaaaatcgcgaacgcctaaactcgaaaacgttaccaccgaccgtcgcgacgacgaaaaacaccgaaaacgacgacaacgaaaacaacgacgcaaataaacccaaaaccgaccacctatacctctactataacaaactatactcgcgcaaatataaactcaaaatccacatacgaacgcacacgaactacaaaccactcaaatacaaaatctatctacgacccttcgacgaccccaacaatctcaacaaacacatccgactacacgccgaaaacaatacgccctaccgctacgaattctacgacaaaatacttatacgccgccgaaacctaaaacgacatatcaaatcccgccaccctaaccaaaatctactcgccaaaacgaacgacgacccgaataccgaacccgactatcccccgaaacctaaaaatcccaaaaacgacgacaataacgtaaacgtctacttcacaaacgaccaaaacgaccccgaaattaaaaacgacgaaaaacgcgacttataacgaatcttcccgaaaaaaaacgaaataaaaacaaaaaaaaatcgaaaatttattctcgcaataaaaaaactcctaataataaaaaaaaaaacccaataaacaaaaccgtttttatttttaaaaaaacgccaaat

SEQ ID NO: 28893 - DNA, 748 bp, Artificial Sequence
  chemically treated genomic DNA (Homo sapiens) CpG-island No: 28893
cgtagttttacggtttttttggcgggtttttttttttttttttttttcgagttgttgtggtagggtaggtcgcggtcgcggtaggacgggtcgcgggttagttttagttcgttgtagggcggtagcgcgtcgtcggacgcgtttttttggtcgttttgcgacgagtcggttttgtaggtgtcgggcggcgattaagcgtagtaggaggcgttgcgcgggtcgagttgcgcgtttcgtttggatggcgtttttaggttgttatcgcggttggcgttttcgggtcgcgtttggcgttttcgcgcgttgtttaggtacgagtggtcgtatttgggtgcggtgtttggcgtgcggtttattagtcgcggtaggtgcgcgttttcggcgggtttgcggcgcgcggggttgaaggtttagtcgcggttagtatcggttaggggttcgcggttgcggttgcgttgatcgtagtatttttttaaggagtcgttttggtagaagtcgttgtgcgttcgcgatttcgagcgttcgaagcggttttcgtttcgcgtttcgtgattgttgtcgtttgttcggcggggtcgttggtcgtaggagttagcgaaggtcgttagttcgtttatggaaacggtcggtattttcgtggcgaagttttttcgcgatagtattttcgatttggagcgcggttggttgcgggtagagaaggagggggttagacggtcggtttttttttggagttttaggtagggttttt

SEQ ID NO: 28894 - DNA, 748 bp, Artificial Sequence
  chemically treated genomic DNA (Homo sapiens) CpG-island No: 28894
aaaaaccctacctaaaactccaaaaaaaaaccgaccgtctaaccccctccttctctacccgcaaccaaccgcgctccaaatcgaaaatactatcgcgaaaaaacttcgccacgaaaataccgaccgtttccataaacgaactaacgaccttcgctaactcctacgaccaacgaccccgccgaacaaacgacaacaatcacgaaacgcgaaacgaaaaccgcttcgaacgctcgaaatcgcgaacgcacaacgacttctaccaaaacgactccttaaaaaaatactacgatcaacgcaaccgcaaccgcgaacccctaaccgatactaaccgcgactaaaccttcaaccccgcgcgccgcaaacccgccgaaaacgcgcacctaccgcgactaataaaccgcacgccaaacaccgcacccaaatacgaccactcgtacctaaacaacgcgcgaaaacgccaaacgcgacccgaaaacgccaaccgcgataacaacctaaaaacgccatccaaacgaaacgcgcaactcgacccgcgcaacgcctcctactacgcttaatcgccgcccgacacctacaaaaccgactcgtcgcaaaacgaccaaaaaaacgcgtccgacgacgcgctaccgccctacaacgaactaaaactaacccgcgacccgtcctaccgcgaccgcgacctaccctaccacaacaactcgaaaaaaaaaaaaaaaaaaaaacccgccaaaaaaaccgtaaaactacg

SEQ ID NO: 28895 - DNA, 748 bp, Artificial Sequence
  chemically treated genomic DNA (Homo sapiens) CpG-island No: 28895
gggagttttatttggagttttagggagggatcggtcgtttgattttttttttttttgttcgtagttagtcgcgttttaagtcggagatgttgtcgcggaagaatttcgttacgggggtgtcggtcgtttttatggacgagttggcggttttcgttgatttttacggttagcggtttcgtcgggtagacggtaatagttacgaggcgcggggcgggagtcgtttcgagcgttcggagtcgcgggcgtatagcggtttttattaggacgattttttggaggagtattacggttagcgtagtcgtagtcgcgagtttttgatcgatgttgatcgcggttgggtttttagtttcgcgcgtcgtagattcgtcgaggacgcgtatttgtcgcggttggtgagtcgtacgttaggtatcgtatttaaatacgattattcgtatttgggtagcgcgcgggagcgttaggcgcggttcgagggcgttagtcgcggtggtagtttggagacgttatttaagcggagcgcgtagttcggttcgcgtagcgttttttattacgtttggtcgtcgttcggtatttataaggtcggttcgtcgtaggacgattaggaggacgcgttcgacgacgcgttgtcgttttatagcgagttggagttgattcgcggttcgttttatcgcggtcgcgatttgttttattatagtaattcggagaagaagaggaaaaaggagttcgttaagaaaatcgtgagattgcg

SEQ ID NO: 28896 - DNA, 748 bp, Artificial Sequence
  chemically treated genomic DNA (Homo sapiens) CpG-island No: 28896
cgcaatctcacgattttcttaacgaactcctttttcctcttcttctccgaattactataataaaacaaatcgcgaccgcgataaaacgaaccgcgaatcaactccaactcgctataaaacgacaacgcgtcgtcgaacgcgtcctcctaatcgtcctacgacgaaccgaccttataaataccgaacgacgaccaaacgtaataaaaaacgctacgcgaaccgaactacgcgctccgcttaaataacgtctccaaactaccaccgcgactaacgccctcgaaccgcgcctaacgctcccgcgcgctacccaaatacgaataatcgtatttaaatacgatacctaacgtacgactcaccaaccgcgacaaatacgcgtcctcgacgaatctacgacgcgcgaaactaaaaacccaaccgcgatcaacatcgatcaaaaactcgcgactacgactacgctaaccgtaatactcctccaaaaaatcgtcctaataaaaaccgctatacgcccgcgactccgaacgctcgaaacgactcccgccccgcgcctcgtaactattaccgtctacccgacgaaaccgctaaccgtaaaaatcaacgaaaaccgccaactcgtccataaaaacgaccgacacccccgtaacgaaattcttccgcgacaacatctccgacttaaaacgcgactaactacgaacaaaaaaaaaaaaaatcaaacgaccgatccctccctaaaactccaaataaaactccc

SEQ ID NO: 28897 - DNA, 692 bp, Artificial Sequence
  chemically treated genomic DNA (Homo sapiens) CpG-island No: 28897
cgcggtagcgggcggcggcggagcggcgggtatcgggcgtttttgggcgtagcgttcgtcgggtcggtcgcgtaggcggggtcgggggttggatcgcgtcgtcggttgagcgcgcgttgtcgcgggttttcggggttcgcgtagcgttcggcggcgtattcgtatgtttaggtagcgcggtacggggcgagcgttttttcgtcgtagagttcgtcgcgcgggggagttcggtcgtcgtatcgtttttcgcgttttcgtttcgtcgttcgttgtcgcgattgttaaagtttttcggttacgtgttggttttcggcggtttaaaggttagcgtggagtgattgaggttacgcggagagagggggtttttgggtggtaggtagcgagaggcgcgggggaggtcgtttcgcgggtcgcgtcgagcggggagcgattatcgcggttttttttagggacgttcgcgttcgggaattcgggcgagaacgttggttggggattcgagtaggggagtttgtgtttgcgggtagttatagttaatttgaacggggagagagtgatagcggcgagggtgggggacggcggggatttggcgtaattttttataggatttaattagtaagttttttaggttagaatgttcgtttttgcggtattttcgttttttcgtttggttttttttttgatagtgtaaggaa

SEQ ID NO: 28898 - DNA, 692 bp, Artificial Sequence
  chemically treated genomic DNA (Homo sapiens) CpG-island No: 28898
ttccttacactatcaaaaaaaaaaccaaacgaaaaaacgaaaataccgcaaaaacgaacattctaacctaaaaaacttactaattaaatcctataaaaaattacgccaaatccccgccgtcccccaccctcgccgctatcactctctccccgttcaaattaactataactacccgcaaacacaaactcccctactcgaatccccaaccaacgttctcgcccgaattcccgaacgcgaacgtccctaaaaaaaaccgcgataatcgctccccgctcgacgcgacccgcgaaacgacctcccccgcgcctctcgctacctaccacccaaaaaccccctctctccgcgtaacctcaatcactccacgctaacctttaaaccgccgaaaaccaacacgtaaccgaaaaactttaacaatcgcgacaacgaacgacgaaacgaaaacgcgaaaaacgatacgacgaccgaactcccccgcgcgacgaactctacgacgaaaaaacgctcgccccgtaccgcgctacctaaacatacgaatacgccgccgaacgctacgcgaaccccgaaaacccgcgacaacgcgcgctcaaccgacgacgcgatccaacccccgaccccgcctacgcgaccgacccgacgaacgctacgcccaaaaacgcccgatacccgccgctccgccgccgcccgctaccgcg

SEQ ID NO: 28899 - DNA, 692 bp, Artificial Sequence
  chemically treated genomic DNA (Homo sapiens) CpG-island No: 28899
ttttttgtattgttaaaaaggaaattagacggaggggcgggggtatcgtagaagcgaatattttagtttagaggatttgttagttaagttttgtaagaagttacgttaagttttcgtcgttttttattttcgtcgttgttatttttttttcgtttaggttggttgtggttgttcgtagatataggtttttttgttcgagtttttagttagcgttttcgttcgggttttcgagcgcgggcgtttttgggagaagtcgcgatggtcgtttttcgttcggcgcggttcgcggggcggtttttttcgcgtttttcgttgtttgttatttagagatttttttttttcgcgtggttttaattattttacgttgatttttgggtcgtcgggggttagtacgtgatcgagaaattttggtagtcgcggtagcgggcggcggggcggaggcgcgggaggcggtgcggcggtcgagttttttcgcgcggcgggttttgcggcggggagacgttcgtttcgtgtcgcgttgtttgggtatgcggatgcgtcgtcgagcgttgcgcggatttcggaagttcgcggtagcgcgcgtttagtcggcggcgcgatttagttttcggtttcgtttgcgcggtcggttcggcgggcgttgcgtttagggacgttcggtgttcgtcgtttcgtcgtcgttcgttgtcgcg

SEQ ID NO: 28900 - DNA, 692 bp, Artificial Sequence
  chemically treated genomic DNA (Homo sapiens) CpG-island No: 28900
cgcgacaacgaacgacgacgaaacgacgaacaccgaacgtccctaaacgcaacgcccgccgaaccgaccgcgcaaacgaaaccgaaaactaaatcgcgccgccgactaaacgcgcgctaccgcgaacttccgaaatccgcgcaacgctcgacgacgcatccgcatacccaaacaacgcgacacgaaacgaacgtctccccgccgcaaaacccgccgcgcgaaaaaactcgaccgccgcaccgcctcccgcgcctccgccccgccgcccgctaccgcgactaccaaaatttctcgatcacgtactaacccccgacgacccaaaaatcaacgtaaaataattaaaaccacgcgaaaaaaaaaaatctctaaataacaaacaacgaaaaacgcgaaaaaaaccgccccgcgaaccgcgccgaacgaaaaacgaccatcgcgacttctcccaaaaacgcccgcgctcgaaaacccgaacgaaaacgctaactaaaaactcgaacaaaaaaacctatatctacgaacaaccacaaccaacctaaacgaaaaaaaaataacaacgacgaaaataaaaaacgacgaaaacttaacgtaacttcttacaaaacttaactaacaaatcctctaaactaaaatattcgcttctacgatacccccgcccctccgtctaatttcctttttaacaatacaaaaaa

SEQ ID NO: 28901 - DNA, 523 bp, Artificial Sequence
  chemically treated genomic DNA (Homo sapiens) CpG-island No: 28901
tttcggcgggaagttttttttgggattttgtacgtcgacgttcggaattcggcgtggtgcgttgggaaattgagcggtggaggaaggcggagcggttaggggcgggattttaggggaggggttgggggagggttttgacgttagggcggggttaagggcgagatttcgtcgagttttatcgttgcgttcgttacgttttttttagcgagttcgttggggatacgtagggggagggaaaattgagcggggcgggaattattttttttcgcgagagttggcgacggcggcggtagcggtagaggtggcggcggcgtgttcgtgagagtggcgtgggggcggggaggagaggcggcggcggtagtgtttaagttacgttattcgggtcggggcgttgggagcgggagtgtagagcgtggtcgtggcggcggcggtgagaagagcgaggcggaggagggggtgttatggtcgggtagtagttttagtacgatgatagtgggaatatttttttttatttttttatttt

SEQ ID NO: 28902 - DNA, 523 bp, Artificial Sequence
  chemically treated genomic DNA (Homo sapiens) CpG-island No: 28902
aaaataaaaaaataaaaaaaaatattcccactatcatcgtactaaaactactacccgaccataacaccccctcctccgcctcgctcttctcaccgccgccgccacgaccacgctctacactcccgctcccaacgccccgacccgaataacgtaacttaaacactaccgccgccgcctctcctccccgcccccacgccactctcacgaacacgccgccgccacctctaccgctaccgccgccgtcgccaactctcgcgaaaaaaaataattcccgccccgctcaattttccctccccctacgtatccccaacgaactcgctaaaaaaaacgtaacgaacgcaacgataaaactcgacgaaatctcgcccttaaccccgccctaacgtcaaaaccctcccccaacccctcccctaaaatcccgcccctaaccgctccgccttcctccaccgctcaatttcccaacgcaccacgccgaattccgaacgtcgacgtacaaaatcccaaaaaaaacttcccgccgaaa

SEQ ID NO: 28903 - DNA, 523 bp, Artificial Sequence
  chemically treated genomic DNA (Homo sapiens) CpG-island No: 28903
gaggtgaggaagtagaagaaggtgtttttattgttatcgtattggaattgttgttcggttatggtattttttttttcgtttcgttttttttatcgtcgtcgttacgattacgttttgtattttcgtttttaacgtttcggttcgagtggcgtagtttggatattgtcgtcgtcgtttttttttttcgtttttacgttatttttacggatacgtcgtcgttatttttgtcgttgtcgtcgtcgtcgttagttttcgcgagaggagatagttttcgtttcgtttagttttttttttttttgcgtgtttttagcgagttcgttaagggagacgtggcgagcgtaacggtggaattcggcgaggtttcgtttttagtttcgttttaacgttaaagtttttttttaattttttttttagggtttcgtttttaatcgtttcgtttttttttatcgtttagttttttagcgtattacgtcggatttcgggcgtcggcgtataggattttagagaaggtttttcgtcggag

SEQ ID NO: 28904 - DNA, 523 bp, Artificial Sequence
  chemically treated genomic DNA (Homo sapiens) CpG-island No: 28904
ctccgacgaaaaaccttctctaaaatcctatacgccgacgcccgaaatccgacgtaatacgctaaaaaactaaacgataaaaaaaaacgaaacgattaaaaacgaaaccctaaaaaaaaaattaaaaaaaaactttaacgttaaaacgaaactaaaaacgaaacctcgccgaattccaccgttacgctcgccacgtctcccttaacgaactcgctaaaaacacgcaaaaaaaaaaaaaactaaacgaaacgaaaactatctcctctcgcgaaaactaacgacgacgacgacaacgacaaaaataacgacgacgtatccgtaaaaataacgtaaaaacgaaaaaaaaaaacgacgacgacaatatccaaactacgccactcgaaccgaaacgttaaaaacgaaaatacaaaacgtaatcgtaacgacgacgataaaaaaaacgaaacgaaaaaaaaaataccataaccgaacaacaattccaatacgataacaataaaaacaccttcttctacttcctcacctc

SEQ ID NO: 28905 - DNA, 961 bp, Artificial Sequence
  chemically treated genomic DNA (Homo sapiens) CpG-island No: 28905
atcgaattttacgcgagttgaagtttagggatattttagaattttttttaggattaatttttcgttttttatcggttttgcgttttcgtagtatcgggttttgggcgcgcgtttttgtttcgttgtggttaaggttcgtttcggtgacgtttggtttttttttcgggttggcgtcgcgtgcgatttatcgaggtagtggtagtattggtcgcggtttggagtttagcgttaggtcggagttcggtttttttgaatcgggagatcggcgtagttttagttacgatcgtttttattttcgcggtcgtcggatcgcgtttagtagcgattttttttgagagcgttgttagaggggtcgcgggagtcgtagagcgcgcgtgggcgcggcgttcgcgagttttcgggagggtcgagtgtatcgttggagcgattttcgttcggttcggttatcgtcgtagtcgttattacggcggggcggggtacgggtcgggggcggggcgtcgggcgggcgcggcgttatttttagtttcgtcggaggtttcgtttttatttcgttgggagttttttcggcgcgtaagtcggattcggtagtgttgcggggaggagagaggacgaggcggcggcggtagtaggaggtgggggatcgatcgcgtcgggggtcgaagaggaacgtcgtttcgcgttttttcgtttttcgtacgtttcggttgtcggttttacgttgttcgtttatagatcgtattgggtttcgtttggagcgggcggaggtatcgggttcgagttgggtcggaggtttttttcgtcgtttgcgcgttttaagtagaggattcgtcgcggagaatcgttttcggattggaggcgttcgcggtttcgggtgcgttcgttgcgttaggtaagtggttgcgtttttgttttatttttgttttcgttttgcgtaggtttttggtttgtagagacgttagga

SEQ ID NO: 28906 - DNA, 961 bp, Artificial Sequence
  chemically treated genomic DNA (Homo sapiens) CpG-island No: 28906
tcctaacgtctctacaaaccaaaaacctacgcaaaacgaaaacaaaaataaaacaaaaacgcaaccacttacctaacgcaacgaacgcacccgaaaccgcgaacgcctccaatccgaaaacgattctccgcgacgaatcctctacttaaaacgcgcaaacgacgaaaaaaacctccgacccaactcgaacccgatacctccgcccgctccaaacgaaacccaatacgatctataaacgaacaacgtaaaaccgacaaccgaaacgtacgaaaaacgaaaaaacgcgaaacgacgttcctcttcgacccccgacgcgatcgatcccccacctcctactaccgccgccgcctcgtcctctctcctccccgcaacactaccgaatccgacttacgcgccgaaaaaactcccaacgaaataaaaacgaaacctccgacgaaactaaaaataacgccgcgcccgcccgacgccccgcccccgacccgtaccccgccccgccgtaataacgactacgacgataaccgaaccgaacgaaaatcgctccaacgatacactcgaccctcccgaaaactcgcgaacgccgcgcccacgcgcgctctacgactcccgcgacccctctaacaacgctctcaaaaaaaatcgctactaaacgcgatccgacgaccgcgaaaataaaaacgatcgtaactaaaactacgccgatctcccgattcaaaaaaaccgaactccgacctaacgctaaactccaaaccgcgaccaatactaccactacctcgataaatcgcacgcgacgccaacccgaaaaaaaaaccaaacgtcaccgaaacgaaccttaaccacaacgaaacaaaaacgcgcgcccaaaacccgatactacgaaaacgcaaaaccgataaaaaacgaaaaattaatcctaaaaaaaattctaaaatatccctaaacttcaactcgcgtaaaattcgat

SEQ ID NO: 28907 - DNA, 961 bp, Artificial Sequence
  chemically treated genomic DNA (Homo sapiens) CpG-island No: 28907
ttttggcgtttttgtaggttaggagtttgcgtagggcgggaataggggtggggtaggggcgtagttatttatttggcgtagcggacgtattcgaggtcgcgggcgtttttagttcgggagcggtttttcgcggcggattttttgtttggggcgcgtaggcggcggagaggattttcgatttagttcgggttcggtgttttcgttcgttttaagcggaatttagtgcgatttgtgggcgagtagcgtggggtcggtagtcggagcgtgcggggagcgagagggcgcggggcggcgttttttttcggttttcggcgcgatcggttttttattttttgttgtcgtcgtcgtttcgttttttttttttttcgtagtattgtcggattcggtttgcgcgtcgggaaggtttttagcgaagtgagagcgaagttttcggcgaggttggaaatagcgtcgcgttcgttcggcgtttcgttttcggttcgtgtttcgtttcgtcgtggtggcggttacggcggtggtcgggtcgggcggggatcgttttagcgatgtattcggttttttcgggggttcgcgggcgtcgcgtttacgcgcgttttgcggttttcgcggtttttttggtagcgtttttagaaagagtcgttgttgggcgcggttcggcggtcgcgggggtgggagcggtcgtggttggggttgcgtcggtttttcggtttaggagagtcggatttcggtttgacgttaggttttagatcgcggttagtgttgttattgtttcggtgggtcgtacgcggcgttaattcgggaaaaggattaggcgttatcggggcgggttttgattatagcggggtaggggcgcgcgtttaggattcgatgttgcgggggcgtagggtcggtgaaaggcggaagattgattttgaggaagattttgggatatttttgggttttagttcgcgtggaattcggt

SEQ ID NO: 28908 - DNA, 961 bp, Artificial Sequence
  chemically treated genomic DNA (Homo sapiens) CpG-island No: 28908
accgaattccacgcgaactaaaacccaaaaatatcccaaaatcttcctcaaaatcaatcttccgcctttcaccgaccctacgcccccgcaacatcgaatcctaaacgcgcgcccctaccccgctataatcaaaacccgccccgataacgcctaatccttttcccgaattaacgccgcgtacgacccaccgaaacaataacaacactaaccgcgatctaaaacctaacgtcaaaccgaaatccgactctcctaaaccgaaaaaccgacgcaaccccaaccacgaccgctcccacccccgcgaccgccgaaccgcgcccaacaacgactctttctaaaaacgctaccaaaaaaaccgcgaaaaccgcaaaacgcgcgtaaacgcgacgcccgcgaacccccgaaaaaaccgaatacatcgctaaaacgatccccgcccgacccgaccaccgccgtaaccgccaccacgacgaaacgaaacacgaaccgaaaacgaaacgccgaacgaacgcgacgctatttccaacctcgccgaaaacttcgctctcacttcgctaaaaaccttcccgacgcgcaaaccgaatccgacaatactacgaaaaaaaaaaaaaacgaaacgacgacgacaacaaaaaataaaaaaccgatcgcgccgaaaaccgaaaaaaaacgccgccccgcgccctctcgctccccgcacgctccgactaccgaccccacgctactcgcccacaaatcgcactaaattccgcttaaaacgaacgaaaacaccgaacccgaactaaatcgaaaatcctctccgccgcctacgcgccccaaacaaaaaatccgccgcgaaaaaccgctcccgaactaaaaacgcccgcgacctcgaatacgtccgctacgccaaataaataactacgcccctaccccacccctattcccgccctacgcaaactcctaacctacaaaaacgccaaaa

SEQ ID NO: 28909 - DNA, 705 bp, Artificial Sequence
  chemically treated genomic DNA (Homo sapiens) CpG-island No: 28909
gttcgttattttcgttatcgtacgcgaatgggagttcgaagttgcgggcggaggtgggcgcgcggggttcgggtttggttgtattttggggatcggtttcggtagcgggaattttaattagattttttttttttggattttattcgttgtcgcgtttttgggaattgtcgtttttcgggtttttttggtttttgcggattttcgtttcgttttttggttttcggtgttgttcgcggggaggcggcgtcgggcgttgagtagcgagcgtcgagggttaggtaggagcgttcggggcgttggggttttttggcgcgttcggagtcggggtttcggacgggttgcggcgggtagagattatgggggaagtttaagtggttttggttttttatttagcggtttcgtcgcgcgcgttttcgattcgtaattttttagggtatcggtttgtgagtgttggaggcgagtgtgcgtgcgttagcgatggtgtgaaggtgtgtgcgtgcgtgtgtcgggagtgcgggagtcggagtttggggcggttttagggggcggggaaatgattcgtttggtcgcgggatcgagtcgagttttgacggcggttgtaatttcggttatcgattttgtagattcgttttggtttcgttggaggttagtcgggttaggagggcgattacgggttttggtagtgttcgatgttggggtttgggt

SEQ ID NO: 28910 - DNA, 705 bp, Artificial Sequence
  chemically treated genomic DNA (Homo sapiens) CpG-island No: 28910
acccaaaccccaacatcgaacactaccaaaacccgtaatcgccctcctaacccgactaacctccaacgaaaccaaaacgaatctacaaaatcgataaccgaaattacaaccgccgtcaaaactcgactcgatcccgcgaccaaacgaatcatttccccgccccctaaaaccgccccaaactccgactcccgcactcccgacacacgcacgcacacaccttcacaccatcgctaacgcacgcacactcgcctccaacactcacaaaccgataccctaaaaaattacgaatcgaaaacgcgcgcgacgaaaccgctaaataaaaaaccaaaaccacttaaacttcccccataatctctacccgccgcaacccgtccgaaaccccgactccgaacgcgccaaaaaaccccaacgccccgaacgctcctacctaaccctcgacgctcgctactcaacgcccgacgccgcctccccgcgaacaacaccgaaaaccaaaaaacgaaacgaaaatccgcaaaaaccaaaaaaacccgaaaaacgacaattcccaaaaacgcgacaacgaataaaatccaaaaaaaaaaaatctaattaaaattcccgctaccgaaaccgatccccaaaatacaaccaaacccgaaccccgcgcgcccacctccgcccgcaacttcgaactcccattcgcgtacgataacgaaaataacgaac

SEQ ID NO: 28911 - DNA, 705 bp, Artificial Sequence
  chemically treated genomic DNA (Homo sapiens) CpG-island No: 28911
atttaagttttagtatcgggtattgttaaaattcgtgatcgtttttttggttcggttggtttttagcgaggttagagcgggtttgtagagtcggtagtcggagttgtagtcgtcgttagagttcggttcggtttcgcggttaaacggattattttttcgttttttggagtcgttttaggtttcgattttcgtattttcgatatacgtacgtatatatttttatattatcgttgacgtacgtatattcgtttttagtatttataggtcggtgttttggagagttgcgggtcggggacgcgcgcgacggagtcgttgggtaggaagttaaggttatttaaattttttttatagtttttgttcgtcgtaattcgttcggagtttcggtttcgagcgcgttaggaagttttagcgtttcgagcgtttttgtttggttttcggcgttcgttgtttagcgttcgacgtcgttttttcgcgggtagtatcgagggttaggaggcggagcgggagttcgtagggattaagagggttcgagggacggtagtttttagaagcgcggtagcgagtgagatttaaggagagaaagtttaattaaagttttcgttatcggggtcggtttttaaagtgtaattagattcgagtttcgcgcgtttattttcgttcgtagtttcggatttttattcgcgtgcggtggcggggatggcgagt

SEQ ID NO: 28912 - DNA, 705 bp, Artificial Sequence
  chemically treated genomic DNA (Homo sapiens) CpG-island No: 28912
actcgccatccccgccaccgcacgcgaataaaaatccgaaactacgaacgaaaataaacgcgcgaaactcgaatctaattacactttaaaaaccgaccccgataacgaaaactttaattaaactttctctccttaaatctcactcgctaccgcgcttctaaaaactaccgtccctcgaaccctcttaatccctacgaactcccgctccgcctcctaaccctcgatactacccgcgaaaaaacgacgtcgaacgctaaacaacgaacgccgaaaaccaaacaaaaacgctcgaaacgctaaaacttcctaacgcgctcgaaaccgaaactccgaacgaattacgacgaacaaaaactataaaaaaaatttaaataaccttaacttcctacccaacgactccgtcgcgcgcgtccccgacccgcaactctccaaaacaccgacctataaatactaaaaacgaatatacgtacgtcaacgataatataaaaatatatacgtacgtatatcgaaaatacgaaaatcgaaacctaaaacgactccaaaaaacgaaaaaataatccgtttaaccgcgaaaccgaaccgaactctaacgacgactacaactccgactaccgactctacaaacccgctctaacctcgctaaaaaccaaccgaaccaaaaaaacgatcacgaattttaacaatacccgatactaaaacttaaat

SEQ ID NO: 28913 - DNA, 551 bp, Artificial Sequence
  chemically treated genomic DNA (Homo sapiens) CpG-island No: 28913
gggtcgtcgttaggcgcgttggttgggtagtttttgggagatgaagcgacgtaggcgttttaggtattggttgtagagttcgatgtcgttgtgttcggcgttttttatttatagcggttttatcgttttggggtagcgttcgtagagcgttagttcgtgcgagaagtcgattatttcgttttttttgtcgtggatgatgagtacgggagacgtgattttggatattttttcgatgttagggaaggcgtcgaagtagtaggtttttttggtgtcgcggaaggcgacgcgtatgttcgaggtgagcggcgagtgtagtattatcgcggtatattcgtagcgcgaggttaggtttatggtgggtatcgtgtcgatgttttgttcgtataggatgatgttgttcgggttgatgtcgtatttggcggcgtcggagtagggttagtcgcggtttttaacgcgcgcgtattttttttattagcgggcgttttcgggtttagtttcggatgcgattttttagtttttttatttagttaagttagtgggttaggtttagg

SEQ ID NO: 28914 - DNA, 551 bp, Artificial Sequence
  chemically treated genomic DNA (Homo sapiens) CpG-island No: 28914
cctaaacctaacccactaacttaactaaataaaaaaactaaaaaatcgcatccgaaactaaacccgaaaacgcccgctaataaaaaaaatacgcgcgcgttaaaaaccgcgactaaccctactccgacgccgccaaatacgacatcaacccgaacaacatcatcctatacgaacaaaacatcgacacgatacccaccataaacctaacctcgcgctacgaatataccgcgataatactacactcgccgctcacctcgaacatacgcgtcgccttccgcgacaccaaaaaaacctactacttcgacgccttccctaacatcgaaaaaatatccaaaatcacgtctcccgtactcatcatccacgacaaaaaaaacgaaataatcgacttctcgcacgaactaacgctctacgaacgctaccccaaaacgataaaaccgctataaataaaaaacgccgaacacaacgacatcgaactctacaaccaatacctaaaacgcctacgtcgcttcatctcccaaaaactacccaaccaacgcgcctaacgacgaccc

SEQ ID NO: 28915 - DNA, 551 bp, Artificial Sequence
  chemically treated genomic DNA (Homo sapiens) CpG-island No: 28915
tttgagtttgatttattgatttggttgagtggggagattggagggtcgtattcggagttgggttcggggacgttcgttggtgggaagggtgcgcgcgcgttggaggtcgcggttgattttgtttcggcgtcgttaggtacggtattagttcggatagtattattttgtacgggtagagtatcggtacggtgtttattatggatttggtttcgcgttacgagtgtgtcgcggtggtgttgtattcgtcgtttatttcgggtatgcgcgtcgtttttcgcgatattaagaagatttattgtttcgacgttttttttaatatcgagaaggtgtttaagattacgtttttcgtgtttattatttacggtagggaggacgaggtgatcgatttttcgtacgggttggcgttttacgagcgttgttttaaggcggtggagtcgttgtgggtggagggcgtcgggtataacgatatcgagttttatagttagtatttggagcgtttgcgtcgttttattttttaggagttgtttagttagcgcgtttagcggcggttt

SEQ ID NO: 28916 - DNA, 551 bp, Artificial Sequence
  chemically treated genomic DNA (Homo sapiens) CpG-island No: 28916
aaaccgccgctaaacgcgctaactaaacaactcctaaaaaataaaacgacgcaaacgctccaaatactaactataaaactcgatatcgttatacccgacgccctccacccacaacgactccaccgccttaaaacaacgctcgtaaaacgccaacccgtacgaaaaatcgatcacctcgtcctccctaccgtaaataataaacacgaaaaacgtaatcttaaacaccttctcgatattaaaaaaaacgtcgaaacaataaatcttcttaatatcgcgaaaaacgacgcgcatacccgaaataaacgacgaatacaacaccaccgcgacacactcgtaacgcgaaaccaaatccataataaacaccgtaccgatactctacccgtacaaaataatactatccgaactaataccgtacctaacgacgccgaaacaaaatcaaccgcgacctccaacgcgcgcgcacccttcccaccaacgaacgtccccgaacccaactccgaatacgaccctccaatctccccactcaaccaaatcaataaatcaaactcaaa

SEQ ID NO: 28917 - DNA, 584 bp, Artificial Sequence
  chemically treated genomic DNA (Homo sapiens) CpG-island No: 28917
gcgagcgcggaggtcgggcgattttaatcggttcgtttcgtgtttagttcgtatttaggtcgtttttcgtacggggagggtttttttcgtttttgggtaggtttaaatttttattttttttaaggtcggcgtcgacgttgttagttcggtagagtttttttttgtcggtcgttttttattttcgttttcggtcgtattcgtttcggggcgagtatcgttcgacgtttaggtttttttcggacggaggagcgcgatttatttacggtggtcgggtagagtttgtttcgaattcggttttttttcgacgttttttttttagtttcgggatttaatcgggtggggttgttttcgagggtttcggagttaggcgcgttttgttcgcgagggtcggggtttcgggtttcgtcgtcgcgttttatttcggggcgtagttggggtggaggcggtggtcgggatcgtcgcgcggggttcgtgcgcgtataaatgtcgtttttagaataggtggttcgggttagggcggcggtttagttttttcgtttttgtttttgttttttcgaggcgttttttttttattgcgagtcgta

SEQ ID NO: 28918 - DNA, 584 bp, Artificial Sequence
  chemically treated genomic DNA (Homo sapiens) CpG-island No: 28918
tacgactcgcaataaaaaaaaaacgcctcgaaaaaacaaaaacaaaaacgaaaaaactaaaccgccgccctaacccgaaccacctattctaaaaacgacatttatacgcgcacgaaccccgcgcgacgatcccgaccaccgcctccaccccaactacgccccgaaataaaacgcgacgacgaaacccgaaaccccgaccctcgcgaacaaaacgcgcctaactccgaaaccctcgaaaacaaccccacccgattaaatcccgaaactaaaaaaaaaacgtcgaaaaaaaaccgaattcgaaacaaactctacccgaccaccgtaaataaatcgcgctcctccgtccgaaaaaaacctaaacgtcgaacgatactcgccccgaaacgaatacgaccgaaaacgaaaataaaaaacgaccgacaaaaaaaaactctaccgaactaacaacgtcgacgccgaccttaaaaaaaataaaaatttaaacctacccaaaaacgaaaaaaaccctccccgtacgaaaaacgacctaaatacgaactaaacacgaaacgaaccgattaaaatcgcccgacctccgcgctcgc

SEQ ID NO: 28919 - DNA, 584 bp, Artificial Sequence
  chemically treated genomic DNA (Homo sapiens) CpG-island No: 28919
tgcggttcgtagtggggaggaggcgtttcgggaaggtaggggtaggggcggaggggttgggtcgtcgttttagttcgggttatttgttttggaggcgatatttgtgcgcgtacgaatttcgcgcggcggtttcggttatcgtttttattttaattgcgtttcgaagtggagcgcggcggcgggattcggagtttcggttttcgcgggtaggacgcgtttggtttcggagttttcgagggtagttttattcggttgggtttcggggttggagagagggcgtcggggagaagtcgggttcgaggtaggttttgttcggttatcgtgggtgagtcgcgttttttcgttcgggggaagtttgggcgtcgggcggtgttcgtttcggagcggatgcgatcggggacggggatggagagcggtcggtaggagggggttttgtcgggttggtagcgtcggcgtcggttttagggagggtgaggatttggatttgtttagaagcgggaagggtttttttcgtgcgggaaacggtttgggtacgagttgggtacggggcgagtcggttggagtcgttcggttttcgcgttcgt

SEQ ID NO: 28920 - DNA, 584 bp, Artificial Sequence
  chemically treated genomic DNA (Homo sapiens) CpG-island No: 28920
acgaacgcgaaaaccgaacgactccaaccgactcgccccgtacccaactcgtacccaaaccgtttcccgcacgaaaaaaacccttcccgcttctaaacaaatccaaatcctcaccctccctaaaaccgacgccgacgctaccaacccgacaaaaccccctcctaccgaccgctctccatccccgtccccgatcgcatccgctccgaaacgaacaccgcccgacgcccaaacttcccccgaacgaaaaaacgcgactcacccacgataaccgaacaaaacctacctcgaacccgacttctccccgacgccctctctccaaccccgaaacccaaccgaataaaactaccctcgaaaactccgaaaccaaacgcgtcctacccgcgaaaaccgaaactccgaatcccgccgccgcgctccacttcgaaacgcaattaaaataaaaacgataaccgaaaccgccgcgcgaaattcgtacgcgcacaaatatcgcctccaaaacaaataacccgaactaaaacgacgacccaacccctccgcccctacccctaccttcccgaaacgcctcctccccactacgaaccgca

SEQ ID NO: 28921 - DNA, 1056 bp, Artificial Sequence
  chemically treated genomic DNA (Homo sapiens) CpG-island No: 28921
gttcgaggagttaagtcggttttaataggcggggtcgagttttagggtggcgttgggggagtcgcgtttttttcgtattcggcgttagtagtcggggttttcgagtcgggagtttttttttcgtagcgttttcgaggatgttttcgttttcgttttcgtttagagtcgtcggtgttcgtttttcgttttaagagttcgtcggggggtgtgttcgcgtcgtcgttttcgggaacgtttttcggttcgcgtgaggattttcgcgttgcggtttttcgttcgggttttttagttgttcggtttcgttcgtttcggttcggttaggttgtcgcggttttatagtgcgacgtgttataggtcgcgtcggtttcgttttttaagttacgggtattggcgttcgcggggtttttcgtcggttttcgtagggatgttaggtaggttcgtattcgttcgcggtcgttattttgttagtgggtatcgagcggaggcgtttgaagatggttaagatgttttgtttgttggggttttttatcgttagttgtgagtcgcggcgtagttggtttagttaatcggtaagagtcgacgaaaagcggttatcgttttagtaggagcgacgaggtcgcgggggcggggttgcgcgtaacggttaggtttcgttttaattttcgtttacgatcgggttcgtttatcgtcggggcgtaggcgtcgttcgtttttttttttcgttttcgttttagtcgcgtcgttggttcgattttaggcgttgtacgcgcgtgcgtaggaggttcgcgcgttatttgcggcgcggttttacgtttttagcgttgggcgaagtcgggttcgggtgtggttgtttgttacgcgcgttgttataggatttattaacgtttcgtttggtcgatcgttatttcgtttaacgggttgtttttatggaaaggttagaggtaggggaaggggcgtacgcgttttttttcggtacgagacggacggagggttcgtgttttgacgtcggattttagttggtggttttttttttttttttttttttttttgagacgg

SEQ ID NO: 28922 - DNA, 1056 bp, Artificial Sequence
  chemically treated genomic DNA (Homo sapiens) CpG-island No: 28922
ccgtctcaaaaaaaaaaaaaaaaaaaaaaaaaaccaccaactaaaatccgacgtcaaaacacgaaccctccgtccgtctcgtaccgaaaaaaaacgcgtacgccccttcccctacctctaacctttccataaaaacaacccgttaaacgaaataacgatcgaccaaacgaaacgttaataaatcctataacaacgcgcgtaacaaacaaccacacccgaacccgacttcgcccaacgctaaaaacgtaaaaccgcgccgcaaataacgcgcgaacctcctacgcacgcgcgtacaacgcctaaaatcgaaccaacgacgcgactaaaacgaaaacgaaaaaaaaaaacgaacgacgcctacgccccgacgataaacgaacccgatcgtaaacgaaaattaaaacgaaacctaaccgttacgcgcaaccccgcccccgcgacctcgtcgctcctactaaaacgataaccgcttttcgtcgactcttaccgattaactaaaccaactacgccgcgactcacaactaacgataaaaaaccccaacaaacaaaacatcttaaccatcttcaaacgcctccgctcgatacccactaacaaaataacgaccgcgaacgaatacgaacctacctaacatccctacgaaaaccgacgaaaaaccccgcgaacgccaatacccgtaacttaaaaaacgaaaccgacgcgacctataacacgtcgcactataaaaccgcgacaacctaaccgaaccgaaacgaacgaaaccgaacaactaaaaaacccgaacgaaaaaccgcaacgcgaaaatcctcacgcgaaccgaaaaacgttcccgaaaacgacgacgcgaacacaccccccgacgaactcttaaaacgaaaaacgaacaccgacgactctaaacgaaaacgaaaacgaaaacatcctcgaaaacgctacgaaaaaaaaactcccgactcgaaaaccccgactactaacgccgaatacgaaaaaaacgcgactcccccaacgccaccctaaaactcgaccccgcctattaaaaccgacttaactcctcgaac

SEQ ID NO: 28923 - DNA, 1056 bp, Artificial Sequence
  chemically treated genomic DNA (Homo sapiens) CpG-island No: 28923
tcgttttaaaaaaaaaaaaaaaaaaagggaaggttattagttaaggttcggcgttaaggtacgggtttttcgttcgtttcgtgtcgaaggagggcgcgtgcgtttttttttttgtttttgatttttttatggaagtagttcgttaggcgaaatggcgatcgattaggcgaaacgttggtggattttatggtagcgcgcgtggtaggtagttatattcgggttcggtttcgtttagcgttaagggcgtggagtcgcgtcgtaaatggcgcgcgagttttttgcgtacgcgcgtgtagcgtttggggtcgggttagcggcgcggttgaagcgagggcggggagggaaagcgagcggcgtttgcgtttcggcggtggacgggttcggtcgtgggcggggattggggcggagtttgatcgttacgcgtagtttcgttttcgcggtttcgtcgtttttgttgaggcggtagtcgtttttcgtcgatttttatcggttggttgggttagttgcgtcgcggtttatagttgacgatgggggattttagtaagtaggatattttgattatttttaagcgttttcgttcggtgtttattaataaggtagcggtcgcgggcgagtgcgggtttgtttggtatttttgcgggaatcggcgggaggtttcgcgggcgttagtgttcgtggtttgggaggcggggtcggcgcggtttgtgatacgtcgtattgtggggtcgcggtagtttggtcgggtcggggcgggcggggtcgggtagttgagaggttcgggcgggaggtcgtagcgcgggggtttttacgcgagtcggggagcgttttcgggggcggcggcgcgggtatatttttcggcgagtttttggggcggggggcgagtatcggcggttttgagcggaggcgggggcgggggtattttcgggggcgttgcgaggagggagttttcggttcggaaatttcggttgttggcgtcggatgcggggaaagcgcggtttttttagcgttattttggagttcgatttcgtttgttggagtcggtttggtttttcgggt

SEQ ID NO: 28924 - DNA, 1056 bp, Artificial Sequence
  chemically treated genomic DNA (Homo sapiens) CpG-island No: 28924
acccgaaaaaccaaaccgactccaacaaacgaaatcgaactccaaaataacgctaaaaaaaccgcgctttccccgcatccgacgccaacaaccgaaatttccgaaccgaaaactccctcctcgcaacgcccccgaaaatacccccgcccccgcctccgctcaaaaccgccgatactcgccccccgccccaaaaactcgccgaaaaatatacccgcgccgccgcccccgaaaacgctccccgactcgcgtaaaaacccccgcgctacgacctcccgcccgaacctctcaactacccgaccccgcccgccccgacccgaccaaactaccgcgaccccacaatacgacgtatcacaaaccgcgccgaccccgcctcccaaaccacgaacactaacgcccgcgaaacctcccgccgattcccgcaaaaataccaaacaaacccgcactcgcccgcgaccgctaccttattaataaacaccgaacgaaaacgcttaaaaataatcaaaatatcctacttactaaaatcccccatcgtcaactataaaccgcgacgcaactaacccaaccaaccgataaaaatcgacgaaaaacgactaccgcctcaacaaaaacgacgaaaccgcgaaaacgaaactacgcgtaacgatcaaactccgccccaatccccgcccacgaccgaacccgtccaccgccgaaacgcaaacgccgctcgctttccctccccgccctcgcttcaaccgcgccgctaacccgaccccaaacgctacacgcgcgtacgcaaaaaactcgcgcgccatttacgacgcgactccacgcccttaacgctaaacgaaaccgaacccgaatataactacctaccacgcgcgctaccataaaatccaccaacgtttcgcctaatcgatcgccatttcgcctaacgaactacttccataaaaaaatcaaaaacaaaaaaaaaaacgcacgcgccctccttcgacacgaaacgaacgaaaaacccgtaccttaacgccgaaccttaactaataaccttccctttttttttttttttttttaaaacga

SEQ ID NO: 28925 - DNA, 639 bp, Artificial Sequence
  chemically treated genomic DNA (Homo sapiens) CpG-island No: 28925
cgttttttgattttttcgtttcgttttcgttttttgtatttttttaattggcgggaggagggcgtttttttagttaattaacgttttatagggttcgtttttcgcgcgttttttaaaggttttttaggaattagttagcgattagaggtcgagttttcggttatttaaaggcggagtaagaaattagaagcggatttgattggttgttggaagacgtcgcgtttattttatagaaggacgaattagtgagttaagttgcggggcgcgggttcggtcggggtatcggtgagtcgtcggcgttgtagagggaggcggtattggtttcgacgtggggcggttagcgatgaagtcggtgagtcggacgtgttggggtttggaggagcgaggcggtagggacgtaagcggtttcggggattcgattttgggtcggagggtagttttagtttggtagtagtgcgattggcgtcgtaatcgttttgcgggtcggggaggtgattcgtacgggtttagtacgggtacgagagacgaaggagtagggtcggtggtcgacgaaggaaagacggatattcgttgtgtatttgttgtgggttgttatttgttttttgcggggttttataagttttttagtcgtttagttaa

SEQ ID NO: 28926 - DNA, 639 bp, Artificial Sequence
  chemically treated genomic DNA (Homo sapiens) CpG-island No: 28926
ttaactaaacgactaaaaaacttataaaaccccgcaaaaaacaaataacaacccacaacaaatacacaacgaatatccgtctttccttcgtcgaccaccgaccctactccttcgtctctcgtacccgtactaaacccgtacgaatcacctccccgacccgcaaaacgattacgacgccaatcgcactactaccaaactaaaactaccctccgacccaaaatcgaatccccgaaaccgcttacgtccctaccgcctcgctcctccaaaccccaacacgtccgactcaccgacttcatcgctaaccgccccacgtcgaaaccaataccgcctccctctacaacgccgacgactcaccgataccccgaccgaacccgcgccccgcaacttaactcactaattcgtccttctataaaataaacgcgacgtcttccaacaaccaatcaaatccgcttctaatttcttactccgcctttaaataaccgaaaactcgacctctaatcgctaactaattcctaaaaaacctttaaaaaacgcgcgaaaaacgaaccctataaaacgttaattaactaaaaaaacgccctcctcccgccaattaaaaaaatacaaaaaacgaaaacgaaacgaaaaaatcaaaaaacg

SEQ ID NO: 28927 - DNA, 639 bp, Artificial Sequence
  chemically treated genomic DNA (Homo sapiens) CpG-island No: 28927
ttggttgggcggttgggaggtttatgagatttcgtaggggataggtgatagtttatagtaggtgtatagcgaatgttcgtttttttttcgtcggttatcgattttgttttttcgtttttcgtgttcgtgttgggttcgtgcgagttattttttcgattcgtagaacggttacggcgttagtcgtattgttattaggttagggttgtttttcggtttaggatcgggttttcgggatcgtttgcgtttttgtcgtttcgtttttttaaattttagtacgttcgatttatcggttttatcgttggtcgttttacgtcgagattagtgtcgtttttttttgtagcgtcggcgatttatcggtgtttcggtcgagttcgcgtttcgtagtttagtttattggttcgtttttttgtgaggtgggcgcggcgttttttagtaattaattagattcgtttttggttttttatttcgtttttgggtggtcgaagattcggtttttaatcgttgattggtttttagaagatttttgaaagacgcgcgggaggcgggttttgtgggacgttgattggttgggagggcgtttttttttcgttagttgggagagtgtagggggcggaggcggggcggaagagttagaaggcg

SEQ ID NO: 28928 - DNA, 639 bp, Artificial Sequence
  chemically treated genomic DNA (Homo sapiens) CpG-island No: 28928
cgccttctaactcttccgccccgcctccgccccctacactctcccaactaacgaaaaaaaaacgccctcccaaccaatcaacgtcccacaaaacccgcctcccgcgcgtctttcaaaaatcttctaaaaaccaatcaacgattaaaaaccgaatcttcgaccacccaaaaacgaaataaaaaaccaaaaacgaatctaattaattactaaaaaacgccgcgcccacctcacaaaaaaacgaaccaataaactaaactacgaaacgcgaactcgaccgaaacaccgataaatcgccgacgctacaaaaaaaaacgacactaatctcgacgtaaaacgaccaacgataaaaccgataaatcgaacgtactaaaatttaaaaaaacgaaacgacaaaaacgcaaacgatcccgaaaacccgatcctaaaccgaaaaacaaccctaacctaataacaatacgactaacgccgtaaccgttctacgaatcgaaaaaataactcgcacgaacccaacacgaacacgaaaaacgaaaaaacaaaatcgataaccgacgaaaaaaaaacgaacattcgctatacacctactataaactatcacctatcccctacgaaatctcataaacctcccaaccgcccaaccaa

SEQ ID NO: 28929 - DNA, 876 bp, Artificial Sequence
  chemically treated genomic DNA (Homo sapiens) CpG-island No: 28929
tttaaagcgcgtagggttgcgttttttacggcgtggtttattttcgttttatcggttttcgtcgtttttagtagtcgttcgggtattttttgtaggtttttatggaggtcgcggaagatttcgtgtagtttttcgaaatgtttcgaggaggcggcggaggaggttatggcgtaggtcgcgttggagtagcggttatcgagattcggggttttgggtttttttttagttcggcggttagtcgtttagtttagtggttataacggcgatcgtcgtattatcgtcgtttaggacgaggttttttcggagtcgcggtagggttttttcgagtcggaacgtttattttttttagttagtgattgttggagcgtcggcgcgaaagtttgacgagaagtcgggagattgcgcggtttaggcgatttttgagggagcggtgtcgcgtcggggcgatcggtagtcgcggaattcgagaagtgtcgggttcgggttggggaaaggtcgtagcgaaaggggtttaggggatttgcgggattggtagcgcggtcgtttttttttcgggtttcgtcggtcggcgaggggcgggcgttgtagtgtacgtcgggggatgtagtttggttcggacgagagcgtttcgtttcggggtcgcgcgttgtttcgggtgttaggtttagttcgcgcggcgatagcgggtttcggttcgatttgatgtatgtttgcgtttagacgtcgtttttattgttatcgcgttttgttttgttattttgattcgaatttttcgtttcgcgttttgattgttagttttcggttttggaaagatagtcgggttaggggttttgtttgtcgtcgggaggtggagtattttttttggaaggtttagcg

SEQ ID NO: 28930 - DNA, 876 bp, Artificial Sequence
  chemically treated genomic DNA (Homo sapiens) CpG-island No: 28930
cgctaaaccttccaaaaaaaatactccacctcccgacgacaaacaaaacccctaacccgactatctttccaaaaccgaaaactaacaatcaaaacgcgaaacgaaaaattcgaatcaaaataacaaaacaaaacgcgataacaataaaaacgacgtctaaacgcaaacatacatcaaatcgaaccgaaacccgctatcgccgcgcgaactaaacctaacacccgaaacaacgcgcgaccccgaaacgaaacgctctcgtccgaaccaaactacatcccccgacgtacactacaacgcccgcccctcgccgaccgacgaaacccgaaaaaaaaacgaccgcgctaccaatcccgcaaatcccctaaacccctttcgctacgacctttccccaacccgaacccgacacttctcgaattccgcgactaccgatcgccccgacgcgacaccgctccctcaaaaatcgcctaaaccgcgcaatctcccgacttctcgtcaaactttcgcgccgacgctccaacaatcactaactaaaaaaaataaacgttccgactcgaaaaaaccctaccgcgactccgaaaaaacctcgtcctaaacgacgataatacgacgatcgccgttataaccactaaactaaacgactaaccgccgaactaaaaaaaaacccaaaaccccgaatctcgataaccgctactccaacgcgacctacgccataacctcctccgccgcctcctcgaaacatttcgaaaaactacacgaaatcttccgcgacctccataaaaacctacaaaaaatacccgaacgactactaaaaacgacgaaaaccgataaaacgaaaataaaccacgccgtaaaaaacgcaaccctacgcgctttaaa

SEQ ID NO: 28931 - DNA, 876 bp, Artificial Sequence
  chemically treated genomic DNA (Homo sapiens) CpG-island No: 28931
cgttgggttttttaagaaaagtgttttatttttcgacggtaggtagagtttttggttcggttatttttttagggtcgaaagttaatagttaagacgcgaaacgaggaattcgggttagggtggtaaagtaaagcgcgatgatagtgaggacgacgtttagacgtaaatatatattaaatcgggtcgaagttcgttgtcgtcgcgcgggttgaatttggtattcggagtaacgcgcgatttcgggacgagacgttttcgttcgagttaaattatatttttcggcgtgtattgtagcgttcgtttttcgtcggtcggcggggttcgggaggaaggcggtcgcgttgttagtttcgtaggttttttaggtttttttcgttgcggtttttttttaattcggattcggtatttttcgggtttcgcgattgtcgatcgtttcggcgcggtatcgtttttttaggagtcgtttaggtcgcgtagtttttcgatttttcgttaggttttcgcgtcggcgttttagtaattattggttggagaaggtgggcgtttcggttcgagaggattttgtcgcggtttcggaagagtttcgttttgggcggcggtggtgcggcggtcgtcgttatggttattgggttgggcggttgatcgtcgggttaggaaagggtttagggtttcgaatttcggtggtcgttgttttagcgcggtttgcgttatggtttttttcgtcgttttttcggagtatttcgagaagttgtacgagatttttcgcggtttttatgaagatttataaggggtgttcgagcggttgttggggacggcggggatcggtgaggcgggggtgggttacgtcgtggggagcgtagttttgcgcgttttgga

SEQ ID NO: 28932 - DNA, 876 bp, Artificial Sequence
  chemically treated genomic DNA (Homo sapiens) CpG-island No: 28932
tccaaaacgcgcaaaactacgctccccacgacgtaacccacccccgcctcaccgatccccgccgtccccaacaaccgctcgaacaccccttataaatcttcataaaaaccgcgaaaaatctcgtacaacttctcgaaatactccgaaaaaacgacgaaaaaaaccataacgcaaaccgcgctaaaacaacgaccaccgaaattcgaaaccctaaaccctttcctaacccgacgatcaaccgcccaacccaataaccataacgacgaccgccgcaccaccgccgcccaaaacgaaactcttccgaaaccgcgacaaaatcctctcgaaccgaaacgcccaccttctccaaccaataattactaaaacgccgacgcgaaaacctaacgaaaaatcgaaaaactacgcgacctaaacgactcctaaaaaaacgataccgcgccgaaacgatcgacaatcgcgaaacccgaaaaataccgaatccgaattaaaaaaaaaccgcaacgaaaaaaacctaaaaaacctacgaaactaacaacgcgaccgccttcctcccgaaccccgccgaccgacgaaaaacgaacgctacaatacacgccgaaaaatataatttaactcgaacgaaaacgtctcgtcccgaaatcgcgcgttactccgaataccaaattcaacccgcgcgacgacaacgaacttcgacccgatttaatatatatttacgtctaaacgtcgtcctcactatcatcgcgctttactttaccaccctaacccgaattcctcgtttcgcgtcttaactattaactttcgaccctaaaaaaataaccgaaccaaaaactctacctaccgtcgaaaaataaaacacttttcttaaaaaacccaacg

SEQ ID NO: 28933 - DNA, 666 bp, Artificial Sequence
  chemically treated genomic DNA (Homo sapiens) CpG-island No: 28933
cgtcggcggaggtaggtcggttttattcgcgttgttttagcggtggttcgtgatgatttggcgtagtaattttagggtttttcgagttattttttcggagttgcgcggtttattatttcgttttagggtttttacgaagttttcgattttttttgataatttcgagtttttcgttgcggatttcggtatttttaaggtagttgtttttagtttttatcggcggaatttatatttgttagattatatagtttgtattttcggggcgggcgaggtcggttttcgttgtgaggggatggggggaaattttaagtttgagtggaagtcggttacgtttttcgttgtcgatttttcgttttttttttttgtttgagttaattagagacgtggggttcgggttgtttagttataatcgggcgttcgcgcgttttcgcgtttcgggggttggaggatcggaagcggttttttttggtttagtcgacggtgaacggaagtaattcgttaggtttgtagagggtggttggtttcgttgttatgggagtagtaagtttttacgcgttttttatcgcgatttaaggttatattgaagaagttgcggtatttttttttgtttttttagttcggtgattgttcgagttgttattttcgagtgttagttgatattgacgt

SEQ ID NO: 28934 - DNA, 666 bp, Artificial Sequence
  chemically treated genomic DNA (Homo sapiens) CpG-island No: 28934
acgtcaatatcaactaacactcgaaaataacaactcgaacaatcaccgaactaaaaaaacaaaaaaaaataccgcaacttcttcaatataaccttaaatcgcgataaaaaacgcgtaaaaacttactactcccataacaacgaaaccaaccaccctctacaaacctaacgaattacttccgttcaccgtcgactaaaccaaaaaaaaccgcttccgatcctccaacccccgaaacgcgaaaacgcgcgaacgcccgattataactaaacaacccgaaccccacgtctctaattaactcaaacaaaaaaaaaaaacgaaaaatcgacaacgaaaaacgtaaccgacttccactcaaacttaaaatttccccccatcccctcacaacgaaaaccgacctcgcccgccccgaaaatacaaactatataatctaacaaatataaattccgccgataaaaactaaaaacaactaccttaaaaataccgaaatccgcaacgaaaaactcgaaattatcaaaaaaaatcgaaaacttcgtaaaaaccctaaaacgaaataataaaccgcgcaactccgaaaaaataactcgaaaaaccctaaaattactacgccaaatcatcacgaaccaccgctaaaacaacgcgaataaaaccgacctacctccgccgacg

SEQ ID NO: 28935 - DNA, 666 bp, Artificial Sequence
  chemically treated genomic DNA (Homo sapiens) CpG-island No: 28935
gcgttagtgttagttgatattcgggagtgatagttcgggtagttatcgagttgggaagataggagggagtgtcgtaatttttttagtgtagttttaagtcgcggtgaggggcgcgtagagatttgttgtttttatagtaacgggattagttattttttataggtttgacgggttattttcgtttatcgtcggttgagttaagaaaggtcgttttcgattttttagttttcgaggcgcgggggcgcgcggacgttcggttataattgaataattcgagttttacgtttttgattggtttaggtagaggaagggggcgggagatcggtaacgaagggcgtagtcggtttttatttaaatttgaggtttttttttatttttttatagcggaagtcgatttcgttcgtttcggaagtgtaaattgtgtggtttggtaggtgtggatttcgtcggtgaaggttgaaggtagttattttaaagatgtcgggattcgtagcgaagggttcggagttgttagagaggatcgagagtttcgtggagattttgaagcggggtggtgggtcgcgtagtttcgaggaaatggttcgggagattttagggttgttgcgttagattattacggattatcgttggagtaacgcgggtgaggtcggtttgttttcgtcggcg

SEQ ID NO: 28936 - DNA, 666 bp, Artificial Sequence
  chemically treated genomic DNA (Homo sapiens) CpG-island No: 28936
cgccgacgaaaacaaaccgacctcacccgcgttactccaacgataatccgtaataatctaacgcaacaaccctaaaatctcccgaaccatttcctcgaaactacgcgacccaccaccccgcttcaaaatctccacgaaactctcgatcctctctaacaactccgaacccttcgctacgaatcccgacatctttaaaataactaccttcaaccttcaccgacgaaatccacacctaccaaaccacacaatttacacttccgaaacgaacgaaatcgacttccgctataaaaaaataaaaaaaaacctcaaatttaaataaaaaccgactacgcccttcgttaccgatctcccgcccccttcctctacctaaaccaatcaaaaacgtaaaactcgaattattcaattataaccgaacgtccgcgcgcccccgcgcctcgaaaactaaaaaatcgaaaacgacctttcttaactcaaccgacgataaacgaaaataacccgtcaaacctataaaaaataactaatcccgttactataaaaacaacaaatctctacgcgcccctcaccgcgacttaaaactacactaaaaaaattacgacactccctcctatcttcccaactcgataactacccgaactatcactcccgaatatcaactaacactaacgc

SEQ ID NO: 28937 - DNA, 520 bp, Artificial Sequence
  chemically treated genomic DNA (Homo sapiens) CpG-island No: 28937
  unsure (498)
atcgagtttcgcggggttgttgggttgacggattcgcgggtcggtatttgaagcgagcgggacgtagcgcggttagggttttcgggtatacgtaggttggtttttaaggttcgcggtcgtcgttatgtcggtgttgggcgagtacgagcgatattgcgattttattaattcggattttgggagcgagttcgggggttgcggggattcgagttcggggtttagcgttagttaggggtcgcgagtcggcggcggcgcggcggagtaggaggaattgtattatatttttattcgcgttttgggtcgcggcgttttcggggaagttacgttgtatcgtcgtatcgaggtagcggttttcggcgtcggtcgttttgtttggcgttgtcgggtcgtttcgagtttttttttttcggtttcgtttttttagcgtcgtgagtttagtgttttaggcgtttacggggtatatgttttagggtttttattattttttttatttatcgnattagaaattggttagattatt

SEQ ID NO: 28938 - DNA, 520 bp, Artificial Sequence
  chemically treated genomic DNA (Homo sapiens) CpG-island No: 28938
  unsure (23)
aataatctaaccaatttctaatncgataaataaaaaaaataataaaaaccctaaaacatataccccgtaaacgcctaaaacactaaactcacgacgctaaaaaaacgaaaccgaaaaaaaaaaactcgaaacgacccgacaacgccaaacaaaacgaccgacgccgaaaaccgctacctcgatacgacgatacaacgtaacttccccgaaaacgccgcgacccaaaacgcgaataaaaatataatacaattcctcctactccgccgcgccgccgccgactcgcgacccctaactaacgctaaaccccgaactcgaatccccgcaacccccgaactcgctcccaaaatccgaattaataaaatcgcaatatcgctcgtactcgcccaacaccgacataacgacgaccgcgaaccttaaaaaccaacctacgtatacccgaaaaccctaaccgcgctacgtcccgctcgcttcaaataccgacccgcgaatccgtcaacccaacaaccccgcgaaactcgat

SEQ ID NO: 28939 - DNA, 520 bp, Artificial Sequence
  chemically treated genomic DNA (Homo sapiens) CpG-island No: 28939
  unsure (23)
aatgatttagttaatttttagtncggtgagtgggaagagtggtgaagattttaagatatatatttcgtgggcgtttaaagtattaagtttacgacgttgggaaagcggggtcgagaaggagggattcggggcgattcgatagcgttagatagggcggtcggcgtcgagggtcgttatttcggtgcggcggtatagcgtggttttttcgaaggcgtcgcggtttaggacgcggatggggatgtagtgtagttttttttgtttcgtcgcgtcgtcgtcggttcgcggtttttgattggcgttaggtttcggattcgagttttcgtaattttcggattcgtttttaaagttcgagttgatggaatcgtagtgtcgttcgtattcgtttagtatcgatatggcggcggtcgcgggttttggggattagtttgcgtatgttcggaggttttggtcgcgttgcgtttcgttcgttttagatgtcggttcgcggattcgttagtttagtaatttcgcgaagttcgat

SEQ ID NO: 28940 - DNA, 520 bp, Artificial Sequence
  chemically treated genomic DNA (Homo sapiens) CpG-island No: 28940
  unsure (498)
atcgaacttcgcgaaattactaaactaacgaatccgcgaaccgacatctaaaacgaacgaaacgcaacgcgaccaaaacctccgaacatacgcaaactaatccccaaaacccgcgaccgccgccatatcgatactaaacgaatacgaacgacactacgattccatcaactcgaactttaaaaacgaatccgaaaattacgaaaactcgaatccgaaacctaacgccaatcaaaaaccgcgaaccgacgacgacgcgacgaaacaaaaaaaactacactacatccccatccgcgtcctaaaccgcgacgccttcgaaaaaaccacgctataccgccgcaccgaaataacgaccctcgacgccgaccgccctatctaacgctatcgaatcgccccgaatccctccttctcgaccccgctttcccaacgtcgtaaacttaatactttaaacgcccacgaaatatatatcttaaaatcttcaccactcttcccactcaccgnactaaaaattaactaaatcatt

SEQ ID NO: 28941 - DNA, 564 bp, Artificial Sequence
  chemically treated genomic DNA (Homo sapiens) CpG-island No: 28941
tttgtcggggcgttcgttttcgaggtcgttttcgtttcgttttttttagtaagtttcgcgtcggcgtcggttattgattggttgaggcgggagtaggcggttggtcggtagtagttattcggggttttcggtgcgaggttagaggtggggaagttatcggacgtcggcggtgaggtacgtgtagcggcggtcggtgggcgagattatttgagagtgtgcgggtcgggatgttttcggtttgtggggaaattacgttaatttttcgcgtgggtcgggggttgtttggggatatgcgtatgcgcgggcgtgtttcgcggtttgagggcgcgcggggcgtgggtggttgcgcgcgcggggggcgtacgtggggtttgaggggcgggggcggtgtcgggagtttcgttacgttagttttcggttttgagttaatttcgcgttcggtttgtcgcgagggggtcggttgtgtcgggaagtggttttagggagaagaggtttttttttttattcgttgtgggagttgcgtttcgaaagtttgtttcggtacgtcgggtttttttgattcgt

SEQ ID NO: 28942 - DNA, 564 bp, Artificial Sequence
  chemically treated genomic DNA (Homo sapiens) CpG-island No: 28942
acgaatcaaaaaaacccgacgtaccgaaacaaactttcgaaacgcaactcccacaacgaataaaaaaaaaaacctcttctccctaaaaccacttcccgacacaaccgaccccctcgcgacaaaccgaacgcgaaattaactcaaaaccgaaaactaacgtaacgaaactcccgacaccgcccccgcccctcaaaccccacgtacgccccccgcgcgcgcaaccacccacgccccgcgcgccctcaaaccgcgaaacacgcccgcgcatacgcatatccccaaacaacccccgacccacgcgaaaaattaacgtaatttccccacaaaccgaaaacatcccgacccgcacactctcaaataatctcgcccaccgaccgccgctacacgtacctcaccgccgacgtccgataacttccccacctctaacctcgcaccgaaaaccccgaataactactaccgaccaaccgcctactcccgcctcaaccaatcaataaccgacgccgacgcgaaacttactaaaaaaaacgaaacgaaaacgacctcgaaaacgaacgccccgacaaa

SEQ ID NO: 28943 - DNA, 564 bp, Artificial Sequence
  chemically treated genomic DNA (Homo sapiens) CpG-island No: 28943
gcgggttaggagagttcgacgtgtcggggtaggttttcggggcgtagtttttatagcgggtgagggaagaggttttttttttttggagttatttttcggtataatcggttttttcgcggtaggtcgggcgcgggattggtttagggtcggagattgacgtggcgggattttcggtatcgttttcgttttttaggttttacgtgcgtttttcgcgcgcgtagttatttacgtttcgcgcgtttttaagtcgcgaggtacgttcgcgtatgcgtatatttttagatagttttcggtttacgcggggagttggcgtgatttttttataggtcgagaatatttcggttcgtatatttttaaatagtttcgtttatcggtcgtcgttgtacgtattttatcgtcgacgttcgatggtttttttatttttggtttcgtatcggaaatttcgagtaattgttgtcggttagtcgtttgttttcgttttagttaattaatagtcggcgtcggcgcggagtttgttgggaaggacgaagcgagggcggtttcggaggcgggcgtttcggtagg

SEQ ID NO: 28944 - DNA, 564 bp, Artificial Sequence
  chemically treated genomic DNA (Homo sapiens) CpG-island No: 28944
cctaccgaaacgcccgcctccgaaaccgccctcgcttcgtccttcccaacaaactccgcgccgacgccgactattaattaactaaaacgaaaacaaacgactaaccgacaacaattactcgaaatttccgatacgaaaccaaaaataaaaaaaccatcgaacgtcgacgataaaatacgtacaacgacgaccgataaacgaaactatttaaaaatatacgaaccgaaatattctcgacctataaaaaaatcacgccaactccccgcgtaaaccgaaaactatctaaaaatatacgcatacgcgaacgtacctcgcgacttaaaaacgcgcgaaacgtaaataactacgcgcgcgaaaaacgcacgtaaaacctaaaaaacgaaaacgataccgaaaatcccgccacgtcaatctccgaccctaaaccaatcccgcgcccgacctaccgcgaaaaaaccgattataccgaaaaataactccaaaaaaaaaaaacctcttccctcacccgctataaaaactacgccccgaaaacctaccccgacacgtcgaactctcctaacccgc

SEQ ID NO: 28945 - DNA, 901 bp, Artificial Sequence
  chemically treated genomic DNA (Homo sapiens) CpG-island No: 28945
ggttttcgcggagatagttttcggttatggaggtatcgtttgcgggattggagtgttttttgcggttgtgggaggggtagtcgggggttggggggacgtaggtacgtttgtcgttaggacgtttttattttggacggtaggaggttgtcgtgggaacggttggggtaaagtttacgttcgcgtatgtttaggagcgacgtcgattaatgacgtatttcgtaggcgcgcgggcgggtttggtagttggcgtttatggagttagagttgttggttcggaaggtgtttgtattgtaggtgcgggggcgggcgcggggtttataggattttttttttagggaaattatggggtttcgtatttggattttttagcgagatgttattacgtttagttttttaattgcgcgttaatttttggagatatcggttgtttttaatcgcgttgaggaaagttgggatttacggattttttgttttgcgcgtttttatttttattatacgttcgcgtcggattagggaaacgggaagagttttaaggcgaggaggggtatttagtttggtatcgtttttcgagtttttcggagttttagcgtatagtttatttatttttttttcgtcgttaggtttttttttgtattcgtcgggacgatttttttaggatagtttttcgagatgtttttttttttatcgtgataagggattttttttttttcgttttttatattaggtttgcgttcggggttttttggttcgacgttagttttagagtttgcgagttgagtatgaggcgattgtacgagaggtcgagggcgatttgggtacgttttagtggatcgagggtcgtatttttaggtcgcgattttttttagaggtagaatatatttaggagagaagggaaggaggg

SEQ ID NO: 28946 - DNA, 901 bp, Artificial Sequence
  chemically treated genomic DNA (Homo sapiens) CpG-island No: 28946
ccctccttcccttctctcctaaatatattctacctctaaaaaaaatcgcgacctaaaaatacgaccctcgatccactaaaacgtacccaaatcgccctcgacctctcgtacaatcgcctcatactcaactcgcaaactctaaaactaacgtcgaaccaaaaaaccccgaacgcaaacctaatataaaaaacgaaaaaaaaaaaatcccttatcacgataaaaaaaaaaacatctcgaaaaactatcctaaaaaaatcgtcccgacgaatacaaaaaaaaacctaacgacgaaaaaaaaataaataaactatacgctaaaactccgaaaaactcgaaaaacgataccaaactaaatacccctcctcgccttaaaactcttcccgtttccctaatccgacgcgaacgtataataaaaataaaaacgcgcaaaacaaaaaatccgtaaatcccaactttcctcaacgcgattaaaaacaaccgatatctccaaaaattaacgcgcaattaaaaaactaaacgtaataacatctcgctaaaaaatccaaatacgaaaccccataatttccctaaaaaaaaaatcctataaaccccgcgcccgcccccgcacctacaatacaaacaccttccgaaccaacaactctaactccataaacgccaactaccaaacccgcccgcgcgcctacgaaatacgtcattaatcgacgtcgctcctaaacatacgcgaacgtaaactttaccccaaccgttcccacgacaacctcctaccgtccaaaataaaaacgtcctaacgacaaacgtacctacgtccccccaacccccgactacccctcccacaaccgcaaaaaacactccaatcccgcaaacgatacctccataaccgaaaactatctccgcgaaaacc

SEQ ID NO: 28947 - DNA, 901 bp, Artificial Sequence
  chemically treated genomic DNA (Homo sapiens) CpG-island No: 28947
ttttttttttttttttttttaggtgtgttttatttttgggaggaatcgcggtttgggaatgcggttttcggtttattgaagcgtgtttaggtcgttttcgatttttcgtataatcgttttatatttagttcgtaggttttggaattggcgtcggattaagaagtttcggacgtaggtttggtatggagaacgagaggaaagaagttttttattacggtaagagagggggtatttcggaggattgttttgaagaggtcgtttcggcgaatgtaagaggggatttgacggcggggaaaggataggtgggttgtgcgttagggtttcggggggttcgagggacgatgttagattggatgttttttttcgttttaaggtttttttcgtttttttgattcggcgcgagcgtgtggtgggagtggggacgcgtagggtagggagttcgtgggttttagttttttttagcgcggttggggatagtcggtatttttagaggttggcgcgtagttaggggattgaacgtggtagtatttcgttgggaggtttaggtacgagattttatgatttttttaaaggaaaaattttgtgaatttcgcgttcgttttcgtatttgtaatgtagatatttttcgaattagtagttttggttttatgggcgttaattgttaggttcgttcgcgcgtttgcgaagtacgttattggtcggcgtcgtttttgagtatgcgcgggcgtgggttttgttttagtcgtttttacggtaattttttatcgtttagggtagaggcgttttggcgataggcgtatttgcgtttttttagttttcgattgttttttttatagtcgtaaggggtattttaatttcgtaggcggtatttttataatcgagggttgttttcgcggagatt

SEQ ID NO: 28948 - DNA, 901 bp, Artificial Sequence
  chemically treated genomic DNA (Homo sapiens) CpG-island No: 28948
aatctccgcgaaaacaaccctcgattataaaaataccgcctacgaaattaaaataccccttacgactataaaaaaaacaatcgaaaactaaaaaaacgcaaatacgcctatcgccaaaacgcctctaccctaaacgataaaaaattaccgtaaaaacgactaaaacaaaacccacgcccgcgcatactcaaaaacgacgccgaccaataacgtacttcgcaaacgcgcgaacgaacctaacaattaacgcccataaaaccaaaactactaattcgaaaaatatctacattacaaatacgaaaacgaacgcgaaattcacaaaatttttcctttaaaaaaatcataaaatctcgtacctaaacctcccaacgaaatactaccacgttcaatcccctaactacgcgccaacctctaaaaataccgactatccccaaccgcgctaaaaaaaactaaaacccacgaactccctaccctacgcgtccccactcccaccacacgctcgcgccgaatcaaaaaaacgaaaaaaaccttaaaacgaaaaaaaacatccaatctaacatcgtccctcgaaccccccgaaaccctaacgcacaacccacctatcctttccccgccgtcaaatcccctcttacattcgccgaaacgacctcttcaaaacaatcctccgaaataccccctctcttaccgtaataaaaaacttctttcctctcgttctccataccaaacctacgtccgaaacttcttaatccgacgccaattccaaaacctacgaactaaatataaaacgattatacgaaaaatcgaaaacgacctaaacacgcttcaataaaccgaaaaccgcattcccaaaccgcgattcctcccaaaaataaaacacacctaaaaaaaaaaaaaaaaaaaa

SEQ ID NO: 28949 - DNA, 660 bp, Artificial Sequence
  chemically treated genomic DNA (Homo sapiens) CpG-island No: 28949
ttttacgcgcgtcgtttcggttttttgcgtgtagcgcgtgagtgcgcgggttgtcgtttcggttttttcgcgttgttagagttcgttgtcgaggcgttggtatacgtgcgcgatgttttcgagtaggtgtttttgttttaggcgtagttgtttaggcgtagtatcgtatcgcgcgttttacggatttcgcggttcgtttgttgttgttgtagggtcgttgtttcgttttttaggttgcggttgtgtatttttagttgtcgttttttgtcgatgtagttcgtaaagcggttcgtcggcgtttgtagttgtttttttttattgttcgttgtagtagtcgttattacgtatttttttggttggttgtttagcgtgtttagcgagtcggtgttcgaggcggcggttgggcgaggcggatacggagtttacggacgtttacgtttacgagtggaagtcgttggaggagttagcggtcgagcgcgtttcgtttgtgtcgttttttggggttagagcgtagtggaggttgttatcgtcgtgtaacggtaggaatagggcgtttagtaacgcgttcgcgtttcggaagtttattatggttggagtaggtgcgcggggtcgggtcgggacggggcgggatatattgtttttttattttttaagtggaga

SEQ ID NO: 28950 - DNA, 660 bp, Artificial Sequence
  chemically treated genomic DNA (Homo sapiens) CpG-island No: 28950
tctccacttaaaaaataaaaaaacaatatatcccgccccgtcccgacccgaccccgcgcacctactccaaccataataaacttccgaaacgcgaacgcgttactaaacgccctattcctaccgttacacgacgataacaacctccactacgctctaaccccaaaaaacgacacaaacgaaacgcgctcgaccgctaactcctccaacgacttccactcgtaaacgtaaacgtccgtaaactccgtatccgcctcgcccaaccgccgcctcgaacaccgactcgctaaacacgctaaacaaccaaccaaaaaaatacgtaataacgactactacaacgaacaataaaaaaaaacaactacaaacgccgacgaaccgctttacgaactacatcgacaaaaaacgacaactaaaaatacacaaccgcaacctaaaaaacgaaacaacgaccctacaacaacaacaaacgaaccgcgaaatccgtaaaacgcgcgatacgatactacgcctaaacaactacgcctaaaacaaaaacacctactcgaaaacatcgcgcacgtataccaacgcctcgacaacgaactctaacaacgcgaaaaaaccgaaacgacaacccgcgcactcacgcgctacacgcaaaaaaccgaaacgacgcgcgtaaaa

SEQ ID NO: 28951 - DNA, 660 bp, Artificial Sequence
  chemically treated genomic DNA (Homo sapiens) CpG-island No: 28951
tttttatttaaaagatagagaggtagtgtgtttcgtttcgtttcggttcggtttcgcgtatttgttttagttatgatgagttttcgaagcgcggacgcgttgttgggcgttttgtttttgtcgttgtacggcggtggtagtttttattacgttttggttttaaagagcggtataggcgggacgcgttcggtcgttggtttttttagcggtttttattcgtggacgtggacgttcgtgagtttcgtgttcgtttcgtttagtcgtcgtttcgagtatcgattcgttggatacgttgagtaattagttagagggatgcgtggtggcggttgttataacgagtagtgaggaggagtagttgtaggcgtcgacggatcgttttgcgggttatatcgataaggagcggtagttggaggtgtataatcgtagtttggagggcgaggtagcggttttgtagtagtagtaggcgggtcgcgaggttcgtgagacgcgcggtgcgatgttgcgtttgggtagttgcgtttggaataggagtatttgttcgaggatatcgcgtacgtgtgttagcgtttcgataacgagttttggtagcgcgaggaggtcgaggcggtagttcgcgtatttacgcgttgtacgtaggaggtcgaggcggcgcgcgtggaa

SEQ ID NO: 28952 - DNA, 660 bp, Artificial Sequence
  chemically treated genomic DNA (Homo sapiens) CpG-island No: 28952
ttccacgcgcgccgcctcgacctcctacgtacaacgcgtaaatacgcgaactaccgcctcgacctcctcgcgctaccaaaactcgttatcgaaacgctaacacacgtacgcgatatcctcgaacaaatactcctattccaaacgcaactacccaaacgcaacatcgcaccgcgcgtctcacgaacctcgcgacccgcctactactactacaaaaccgctacctcgccctccaaactacgattatacacctccaactaccgctccttatcgatataacccgcaaaacgatccgtcgacgcctacaactactcctcctcactactcgttataacaaccgccaccacgcatccctctaactaattactcaacgtatccaacgaatcgatactcgaaacgacgactaaacgaaacgaacacgaaactcacgaacgtccacgtccacgaataaaaaccgctaaaaaaaccaacgaccgaacgcgtcccgcctataccgctctttaaaaccaaaacgtaataaaaactaccaccgccgtacaacgacaaaaacaaaacgcccaacaacgcgtccgcgcttcgaaaactcatcataactaaaacaaatacgcgaaaccgaaccgaaacgaaacgaaacacactacctctctatcttttaaataaaaa

SEQ ID NO: 28953 - DNA, 676 bp, Artificial Sequence
  chemically treated genomic DNA (Homo sapiens) CpG-island No: 28953
gattttcgttttttattttcgttttcggttttgttcgttagtttttattttcgttttcgattttgttattcgttttttattttcgttttcgattttgattttcgttttttattttcgttttcggttttgattttcgttttttattttcgttttcgattttgattttcgttttttattttcgttttcggttttgattttcgttttttattttcgttttcgattttgtttttcgttttttattttcgttttcggttttgttcgtcgttttttattttcgttttcgattttgtttttcgttttttattttagttttcgattttgttcgttagtttttattttcgttttcgattttgtttttcgttttttattttcgttttcgattttgtttttcgttttttattttcgttttcgattttgtttttcgttttttattttcgttttcggttttgtttttcgttttttattttcgttttcggttttgttcgtcgttttttattttcgttttcggttttgttcgttagtttttattttttttttcgattttgtttttcgttttttattttcgttttcgattttgttcgttcgtttttattttcgtttttgattttgttcgttagtttttttgttgtcgtgtgtcgtgtttgtgttgggatagtttttcgagatgtggtagtta

SEQ ID NO: 28954 - DNA, 676 bp, Artificial Sequence
  chemically treated genomic DNA (Homo sapiens) CpG-island No: 28954
taactaccacatctcgaaaaactatcccaacacaaacacgacacacgacaacaaaaaaactaacgaacaaaatcaaaaacgaaaataaaaacgaacgaacaaaatcgaaaacgaaaataaaaaacgaaaaacaaaatcgaaaaaaaaaataaaaactaacgaacaaaaccgaaaacgaaaataaaaaacgacgaacaaaaccgaaaacgaaaataaaaaacgaaaaacaaaaccgaaaacgaaaataaaaaacgaaaaacaaaatcgaaaacgaaaataaaaaacgaaaaacaaaatcgaaaacgaaaataaaaaacgaaaaacaaaatcgaaaacgaaaataaaaactaacgaacaaaatcgaaaactaaaataaaaaacgaaaaacaaaatcgaaaacgaaaataaaaaacgacgaacaaaaccgaaaacgaaaataaaaaacgaaaaacaaaatcgaaaacgaaaataaaaaacgaaaatcaaaaccgaaaacgaaaataaaaaacgaaaatcaaaatcgaaaacgaaaataaaaaacgaaaatcaaaaccgaaaacgaaaataaaaaacgaaaatcaaaatcgaaaacgaaaataaaaaacgaataacaaaatcgaaaacgaaaataaaaactaacgaacaaaaccgaaaacgaaaataaaaaacgaaaatc

SEQ ID NO: 28955 - DNA, 676 bp, Artificial Sequence
  chemically treated genomic DNA (Homo sapiens) CpG-island No: 28955
tggttgttatatttcggaaaattgttttagtataagtacggtatacggtagtaggagagttggcgggtagggttaaaggcgagggtgagggcgggcgggtagggtcggaggcggaggtgagggacggagggtagggtcggagaagggggtgagggttggcgggtagggtcggaggcgggggtgggggacggcgggtagggtcggaggcggaggtgagggacggagggtagggtcggaggcggaggtgagggacggagggtagggtcggaggcggaggtgagggacggagggtagggtcggaggcgggggtgagggacggagggtagggtcggaggcgggggtgagggttggcgggtagggtcggaggttggggtgggggacggagggtagggtcggaggcgggggtgggggacggcgggtagggtcggaggcggaggtgagggacggagggtagggtcggaggcggaggtgagggacggaggttagggtcggaggcgggggtgagggacggaggttagggtcggaggcggaggtgagggacggaggttagggtcggaggcgggggtgagggacggaggttagggtcggaggcggaggtgagggacggatggtagggtcggaggcgggggtgagggttggcgggtagggtcggaggcgggggtgagggacggaggtt

SEQ ID NO: 28956 - DNA, 676 bp, Artificial Sequence
  chemically treated genomic DNA (Homo sapiens) CpG-island No: 28956
aacctccgtccctcacccccgcctccgaccctacccgccaaccctcacccccgcctccgaccctaccatccgtccctcacctccgcctccgaccctaacctccgtccctcacccccgcctccgaccctaacctccgtccctcacctccgcctccgaccctaacctccgtccctcacccccgcctccgaccctaacctccgtccctcacctccgcctccgaccctaccctccgtccctcacctccgcctccgaccctacccgccgtcccccacccccgcctccgaccctaccctccgtcccccaccccaacctccgaccctacccgccaaccctcacccccgcctccgaccctaccctccgtccctcacccccgcctccgaccctaccctccgtccctcacctccgcctccgaccctaccctccgtccctcacctccgcctccgaccctaccctccgtccctcacctccgcctccgaccctacccgccgtcccccacccccgcctccgaccctacccgccaaccctcacccccttctccgaccctaccctccgtccctcacctccgcctccgaccctacccgcccgccctcaccctcgcctttaaccctacccgccaactctcctactaccgtataccgtacttatactaaaacaattttccgaaatataacaacca

SEQ ID NO: 28957 - DNA, 840 bp, Artificial Sequence
  chemically treated genomic DNA (Homo sapiens) CpG-island No: 28957
tcgtttttcggtttttattgcgcgtttatatttcgttttggttttttttgttttatttaagtttcggtttcgcggtatagcggggagattcgttcgcgtttacggaagaagtcgagttttttcgaagggagaattagtgattttacggatttcggaatttttcgggagtgggattattaggtagcgggcggaattaattttgtcgcggaggcgttgggcgaggatgagggcggcgagcgcggaggggatcgagttatatagtagttcggcggtttttgtcggtaggtttcgttcgtttttttcggttcgattcgggcgggggtttcggtgtcgttttttttatttcgtacgtaggttcgtgggggcggggatagggggacgaaaataatcgcgtttttagtttgattgaataggttcggattttttcgacggcgtcgcgtcgcgtatagatgagtttttgtgggatttcgcggaaggaggcgtcggtcgtagttatattttttttcgggtaagcgcggtcgtcgtttgtaggtatcgttcgtttcgcgcgttcgtaggttttttttggaggcgggaggcggcggtcgttcgtatagcgtgttttttaaagtttttgttgatatagtttcgcgtatatatgagtcggcgcggttagatttacgtaggtatcgagtgttttttttgcgtcgtttcgcgtcgtcgtttcgttatttcgtcgcgcgtttttaatttttgcgtttcgcgtggcgcgtttagcgtttaaggttttattttttttttattttttttggtgtattttttttttttttttaaaattattatttaaatttaaaggttgga

SEQ ID NO: 28958 - DNA, 840 bp, Artificial Sequence
  chemically treated genomic DNA (Homo sapiens) CpG-island No: 28958
tccaacctttaaatttaaataataattttaaaaaaaaaaaaaaaatacaccaaaaaaaataaaaaaaaaataaaaccttaaacgctaaacgcgccacgcgaaacgcaaaaattaaaaacgcgcgacgaaataacgaaacgacgacgcgaaacgacgcaaaaaaaacactcgatacctacgtaaatctaaccgcgccgactcatatatacgcgaaactatatcaacaaaaactttaaaaaacacgctatacgaacgaccgccgcctcccgcctccaaaaaaaacctacgaacgcgcgaaacgaacgatacctacaaacgacgaccgcgcttacccgaaaaaaaatataactacgaccgacgcctccttccgcgaaatcccacaaaaactcatctatacgcgacgcgacgccgtcgaaaaaatccgaacctattcaatcaaactaaaaacgcgattattttcgtccccctatccccgcccccacgaacctacgtacgaaataaaaaaaacgacaccgaaacccccgcccgaatcgaaccgaaaaaaacgaacgaaacctaccgacaaaaaccgccgaactactatataactcgatcccctccgcgctcgccgccctcatcctcgcccaacgcctccgcgacaaaattaattccgcccgctacctaataatcccactcccgaaaaattccgaaatccgtaaaatcactaattctcccttcgaaaaaactcgacttcttccgtaaacgcgaacgaatctccccgctataccgcgaaaccgaaacttaaataaaacaaaaaaaaccaaaacgaaatataaacgcgcaataaaaaccgaaaaacga

SEQ ID NO: 28959 - DNA, 840 bp, Artificial Sequence
  chemically treated genomic DNA (Homo sapiens) CpG-island No: 28959
tttagtttttaagtttgggtggtggttttgagagggggaaagagatgtattaaaggaagtaggggaaaaataaaattttaagcgttgggcgcgttacgcgggacgtagaggttaggggcgcgcggcgaggtagcggggcggcggcgcgagacggcgtaggggaaatattcggtgtttgcgtgagtttggtcgcgtcggtttatgtgtacgcgaagttgtgttagtagaaattttagaaaatacgttgtgcgagcggtcgtcgtttttcgtttttagaaggagtttgcgggcgcgcggggcggacggtgtttgtaggcggcggtcgcgtttgttcggaaaggaatgtggttgcggtcggcgttttttttcgcggggttttataaaggtttatttgtgcgcggcgcggcgtcgtcggaggagttcgagtttgtttagttaggttgaggacgcggttgttttcgtttttttgttttcgtttttacgagtttacgtgcggggtagggagggcggtatcggaattttcgttcgggtcgggtcgaaaggagcgagcggggtttgtcggtagaggtcgtcgggttgttgtgtgattcggtttttttcgcgttcgtcgtttttattttcgtttagcgttttcgcggtagggttaatttcgttcgttgtttggtggttttattttcgggggatttcggggttcgtggaattattggtttttttttcggaggagttcggtttttttcgtgggcgcgggcgagttttttcgttgtatcgcggggtcggggtttgaataaaataaaagaaattaaggcgaggtgtggacgcgtagtgaggatcggaaagcga

SEQ ID NO: 28960 - DNA, 840 bp, Artificial Sequence
  chemically treated genomic DNA (Homo sapiens) CpG-island No: 28960
tcgctttccgatcctcactacgcgtccacacctcgccttaatttcttttattttattcaaaccccgaccccgcgatacaacgaaaaaactcgcccgcgcccacgaaaaaaaccgaactcctccgaaaaaaaaaccaataattccacgaaccccgaaatcccccgaaaataaaaccaccaaacaacgaacgaaattaaccctaccgcgaaaacgctaaacgaaaataaaaacgacgaacgcgaaaaaaaccgaatcacacaacaacccgacgacctctaccgacaaaccccgctcgctcctttcgacccgacccgaacgaaaattccgataccgccctccctaccccgcacgtaaactcgtaaaaacgaaaacaaaaaaacgaaaacaaccgcgtcctcaacctaactaaacaaactcgaactcctccgacgacgccgcgccgcgcacaaataaacctttataaaaccccgcgaaaaaaaacgccgaccgcaaccacattcctttccgaacaaacgcgaccgccgcctacaaacaccgtccgccccgcgcgcccgcaaactccttctaaaaacgaaaaacgacgaccgctcgcacaacgtattttctaaaatttctactaacacaacttcgcgtacacataaaccgacgcgaccaaactcacgcaaacaccgaatatttcccctacgccgtctcgcgccgccgccccgctacctcgccgcgcgcccctaacctctacgtcccgcgtaacgcgcccaacgcttaaaattttatttttcccctacttcctttaatacatctctttccccctctcaaaaccaccacccaaacttaaaaactaaa

SEQ ID NO: 28961 - DNA, 712 bp, Artificial Sequence
  chemically treated genomic DNA (Homo sapiens) CpG-island No: 28961
cggagtttttttggtttcgtttatttttttcgtttttacgtttttacgtttttacgtttttgatttttttatttttttcgtttttttcggtttgatttttttggatcgttttcgttaattttggttttttttattttttttcgttatatcgggtcgtttcgttttcgggtgtttttggtgtttttcgtcgtcggtcgtaggcgtttcgttttagataaagtggatttagtttgcggtttcggagttcgttattgttcgggtgttcgggtttacgtagagtatagttacggtcgtcgttgttgttttagaattcgtgatttgttatacggtagcgtaaggcgaagagtagggcgtttttaatcggcggcgcgggtaggcggaaggcgaagcggtcggcgcgcggcgggggcggggtcggatcggcgtagtgcgtggcgtttcgcgttcgttcgttagtcgtcgggttttagcgtagtttacgcgtttttcgtaggttaggtttattacgcgcgcgttttcggttacgtttagcgggttcgtttcggcgcgttttaggtagatgcgttgcgttagtaagcgggcggcgaagtcgggttcgttggtcggttttagggcggcgcgcgttttttgggggaaagaagaagcgggaggagggagtttagggcggagagaggggagagatagggggcggtgttagagtaaggtattggat

SEQ ID NO: 28962 - DNA, 712 bp, Artificial Sequence
  chemically treated genomic DNA (Homo sapiens) CpG-island No: 28962
atccaataccttactctaacaccgccccctatctctcccctctctccgccctaaactccctcctcccgcttcttctttcccccaaaaaacgcgcgccgccctaaaaccgaccaacgaacccgacttcgccgcccgcttactaacgcaacgcatctacctaaaacgcgccgaaacgaacccgctaaacgtaaccgaaaacgcgcgcgtaataaacctaacctacgaaaaacgcgtaaactacgctaaaacccgacgactaacgaacgaacgcgaaacgccacgcactacgccgatccgaccccgcccccgccgcgcgccgaccgcttcgccttccgcctacccgcgccgccgattaaaaacgccctactcttcgccttacgctaccgtataacaaatcacgaattctaaaacaacaacgacgaccgtaactatactctacgtaaacccgaacacccgaacaataacgaactccgaaaccgcaaactaaatccactttatctaaaacgaaacgcctacgaccgacgacgaaaaacaccaaaaacacccgaaaacgaaacgacccgatataacgaaaaaaaataaaaaaaaccaaaattaacgaaaacgatccaaaaaaatcaaaccgaaaaaaacgaaaaaaataaaaaaatcaaaaacgtaaaaacgtaaaaacgtaaaaacgaaaaaaataaacgaaaccaaaaaaactccg

SEQ ID NO: 28963 - DNA, 712 bp, Artificial Sequence
  chemically treated genomic DNA (Homo sapiens) CpG-island No: 28963
gtttagtgttttgttttgatatcgttttttgtttttttttttttttcgttttgggtttttttttttcgtttttttttttttttaggaggcgcgcgtcgttttggagtcggttagcgagttcggtttcgtcgttcgtttgttgacgtagcgtatttgtttggaacgcgtcgaggcgggttcgttgggcgtggtcgggagcgcgcgcgtggtggatttggtttacgagaagcgcgtgagttgcgttggagttcgacggttggcggacgaacgcgaggcgttacgtattacgtcggttcggtttcgttttcgtcgcgcgtcgatcgtttcgtttttcgtttgttcgcgtcgtcgattgggggcgttttgtttttcgttttgcgttatcgtgtgataggttacgagttttgggataataacggcggtcgtgattatgttttacgtgggttcgagtattcgggtagtggcggatttcggagtcgtaggttggatttattttatttgagacgaggcgtttgcggtcgacggcggaaaatattaaaggtattcgggggcggggcgattcgatgtggcggggaggagtaggagagattaggattggcgggagcggtttaagggagttaagtcggggagggcgaaaagggtggggaaattaggggcgtgggggcgtgggggcgtgggggcggggggagtgagcggaattaaagaagtttcg

SEQ ID NO: 28964 - DNA, 712 bp, Artificial Sequence
  chemically treated genomic DNA (Homo sapiens) CpG-island No: 28964
cgaaacttctttaattccgctcactccccccgcccccacgcccccacgcccccacgcccctaatttccccacccttttcgccctccccgacttaactcccttaaaccgctcccgccaatcctaatctctcctactcctccccgccacatcgaatcgccccgcccccgaatacctttaatattttccgccgtcgaccgcaaacgcctcgtctcaaataaaataaatccaacctacgactccgaaatccgccactacccgaatactcgaacccacgtaaaacataatcacgaccgccgttattatcccaaaactcgtaacctatcacacgataacgcaaaacgaaaaacaaaacgcccccaatcgacgacgcgaacaaacgaaaaacgaaacgatcgacgcgcgacgaaaacgaaaccgaaccgacgtaatacgtaacgcctcgcgttcgtccgccaaccgtcgaactccaacgcaactcacgcgcttctcgtaaaccaaatccaccacgcgcgcgctcccgaccacgcccaacgaacccgcctcgacgcgttccaaacaaatacgctacgtcaacaaacgaacgacgaaaccgaactcgctaaccgactccaaaacgacgcgcgcctcctaaaaaaaaaaaaaaacgaaaaaaaaaaacccaaaacgaaaaaaaaaaaaaaacaaaaaacgatatcaaaacaaaacactaaac

SEQ ID NO: 28965 - DNA, 580 bp, Artificial Sequence
  chemically treated genomic DNA (Homo sapiens) CpG-island No: 28965
gggcgcggggttggtagggcgcgaagtggcggagggcgtttttttgtaattggatttgtacgtggcggggtattcggggtagtttatcgggacggaagcggcgtacgatagttagttttaattttagtgcgtcggcgaaacgtatttttttgcgggtgtttgggttacggttgcggggcgttcgggtttcgtcgttttcggttggtgtagatcgggttcggcggtttcgattcggtgcgtgagcgcgggatcgggtttcgaatcgcgtttcgttttcgtttggtttttttttcggttttttttcgaggttgggtcgttggttacggtagtaggcgcgtttcgttagcgcggcgatgaagtttaggttgcggggaatgtcggtgttcgggggtcgtttacgggatatggtagtttttttttcggcggggttagttcgtagcgttatcgcgtttttttttttttttttttttcgttcgtttcgcgttagcgtagaagtcgttgggttcgtttttgtagtttttcgttgttgtgtattttttttgtagatatttttaggattttttatttttcgttgttttgt

SEQ ID NO: 28966 - DNA, 580 bp, Artificial Sequence
  chemically treated genomic DNA (Homo sapiens) CpG-island No: 28966
acaaaacaacgaaaaataaaaaatcctaaaaatatctacaaaaaaaatacacaacaacgaaaaactacaaaaacgaacccaacgacttctacgctaacgcgaaacgaacgaaaaaaaaaaaaaaaaaaaaacgcgataacgctacgaactaaccccgccgaaaaaaaaactaccatatcccgtaaacgacccccgaacaccgacattccccgcaacctaaacttcatcgccgcgctaacgaaacgcgcctactaccgtaaccaacgacccaacctcgaaaaaaaaccgaaaaaaaaaccaaacgaaaacgaaacgcgattcgaaacccgatcccgcgctcacgcaccgaatcgaaaccgccgaacccgatctacaccaaccgaaaacgacgaaacccgaacgccccgcaaccgtaacccaaacacccgcaaaaaaatacgtttcgccgacgcactaaaattaaaactaactatcgtacgccgcttccgtcccgataaactaccccgaataccccgccacgtacaaatccaattacaaaaaaacgccctccgccacttcgcgccctaccaaccccgcgccc

SEQ ID NO: 28967 - DNA, 580 bp, Artificial Sequence
  chemically treated genomic DNA (Homo sapiens) CpG-island No: 28967
gtaaagtaacgggaggtggaggattttggaggtgtttgtaaggagaatatatagtagcgaggggttgtagaagcggatttagcgatttttgcgttgacgcggggcgggcgggagagaggaagagaggggagcgcggtggcgttgcgagttggtttcgtcggggaaggggttgttatgtttcgtgagcggttttcgggtatcgatatttttcgtaatttgagttttatcgtcgcgttaacggagcgcgtttattatcgtagttagcggtttagtttcgaggaggagtcggaggaggagttaggcgagggcgggacgcggttcggggttcgatttcgcgtttacgtatcgagtcggggtcgtcgggttcgatttgtattagtcggaggcggcggggttcgggcgtttcgtagtcgtagtttagatattcgtaagagagtgcgtttcgtcgacgtattggggttggagttggttgtcgtgcgtcgttttcgtttcggtgagttgtttcgggtgtttcgttacgtgtagatttaattgtagagggacgtttttcgttatttcgcgttttgttagtttcgcgttt

SEQ ID NO: 28968 - DNA, 580 bp, Artificial Sequence
  chemically treated genomic DNA (Homo sapiens) CpG-island No: 28968
aaacgcgaaactaacaaaacgcgaaataacgaaaaacgtccctctacaattaaatctacacgtaacgaaacacccgaaacaactcaccgaaacgaaaacgacgcacgacaaccaactccaaccccaatacgtcgacgaaacgcactctcttacgaatatctaaactacgactacgaaacgcccgaaccccgccgcctccgactaatacaaatcgaacccgacgaccccgactcgatacgtaaacgcgaaatcgaaccccgaaccgcgtcccgccctcgcctaactcctcctccgactcctcctcgaaactaaaccgctaactacgataataaacgcgctccgttaacgcgacgataaaactcaaattacgaaaaatatcgatacccgaaaaccgctcacgaaacataacaaccccttccccgacgaaaccaactcgcaacgccaccgcgctcccctctcttcctctctcccgcccgccccgcgtcaacgcaaaaatcgctaaatccgcttctacaacccctcgctactatatattctccttacaaacacctccaaaatcctccacctcccgttactttac

SEQ ID NO: 28969 - DNA, 587 bp, Artificial Sequence
  chemically treated genomic DNA (Homo sapiens) CpG-island No: 28969
cgggttgttgggttgtgcgcgttttgattttagacgtcgattttttcggttttgtatattatttatagtttttcgtttttttttttcgattttttttcgtaaggtagcgcgtgtgtaagaaagtagtatcgtttgtttgtgtaagtttttcgagttaggtaagtaatacgggtaagtgtttcgcggtcgttagttgttcgagtttaaatcgtttttattttttttttttttttttttcggtgacgttttcgacgacgacgttttgttttattttttcgcgtttttcgatttttttgatgaggatcgtttttgtcgtttttatttggcgcggcggtttttaaattagatttgttgcgtaacggaggataaaatagtttagattaaaggcgcgttttttttagtttcggggtattcggggagtttggtgtggcggcgggatatttcgcgtaggttaataaaaggaggggagtcgttcgttttcgttttcgcgtttttatttaattttttgggtttaaagcgttttttagtagtttgcgggtcgttatcgggatgtttttaaagtgcggggagagttaagtagggttggg

SEQ ID NO: 28970 - DNA, 587 bp, Artificial Sequence
  chemically treated genomic DNA (Homo sapiens) CpG-island No: 28970
cccaaccctacttaactctccccgcactttaaaaacatcccgataacgacccgcaaactactaaaaaacgctttaaacccaaaaaattaaataaaaacgcgaaaacgaaaacgaacgactcccctccttttattaacctacgcgaaatatcccgccgccacaccaaactccccgaataccccgaaactaaaaaaaacgcgcctttaatctaaactattttatcctccgttacgcaacaaatctaatttaaaaaccgccgcgccaaataaaaacgacaaaaacgatcctcatcaaaaaaatcgaaaaacgcgaaaaaataaaacaaaacgtcgtcgtcgaaaacgtcaccgaaaaaaaaaaaaaaaaaaaataaaaacgatttaaactcgaacaactaacgaccgcgaaacacttacccgtattacttacctaactcgaaaaacttacacaaacaaacgatactactttcttacacacgcgctaccttacgaaaaaaaatcgaaaaaaaaaaacgaaaaactataaataatatacaaaaccgaaaaaatcgacgtctaaaatcaaaacgcgcacaacccaacaacccg

SEQ ID NO: 28971 - DNA, 587 bp, Artificial Sequence
  chemically treated genomic DNA (Homo sapiens) CpG-island No: 28971
tttagttttgtttggtttttttcgtattttaaaaatatttcgatggcggttcgtaggttgttggagggcgttttaggtttaggaagttgaatgaaaacgcggaagcgggagcgagcggtttttttttttttgttggtttgcgcggggtgtttcgtcgttatattaagtttttcgggtgtttcgggattgggggaagcgcgtttttgatttgaattgttttgtttttcgttgcgtaataggtttggtttaagaatcgtcgcgttaaatggaggcggtagaagcggtttttattagaggagtcggagaacgcggagaagtggaataagacgtcgtcgtcgaaggcgttatcggagaagagggaagaggaaggtaaaagcgatttggattcggatagttgacggtcgcgggatatttgttcgtattatttatttaattcgaaggatttgtatagatagacgatgttatttttttgtatacgcgttgttttgcgggagggggtcgagaaagaggaacgaggagttgtaaatagtgtatagagtcgggagggtcggcgtttggggttagggcgcgtatagtttagtagttcg

SEQ ID NO: 28972 - DNA, 587 bp, Artificial Sequence
  chemically treated genomic DNA (Homo sapiens) CpG-island No: 28972
cgaactactaaactatacgcgccctaaccccaaacgccgaccctcccgactctatacactatttacaactcctcgttcctctttctcgaccccctcccgcaaaacaacgcgtatacaaaaaaataacatcgtctatctatacaaatccttcgaattaaataaataatacgaacaaatatcccgcgaccgtcaactatccgaatccaaatcgcttttaccttcctcttccctcttctccgataacgccttcgacgacgacgtcttattccacttctccgcgttctccgactcctctaataaaaaccgcttctaccgcctccatttaacgcgacgattcttaaaccaaacctattacgcaacgaaaaacaaaacaattcaaatcaaaaacgcgcttcccccaatcccgaaacacccgaaaaacttaatataacgacgaaacaccccgcgcaaaccaacaaaaaaaaaaaaaccgctcgctcccgcttccgcgttttcattcaacttcctaaacctaaaacgccctccaacaacctacgaaccgccatcgaaatatttttaaaatacgaaaaaaaccaaacaaaactaaa

SEQ ID NO: 28973 - DNA, 851 bp, Artificial Sequence
  chemically treated genomic DNA (Homo sapiens) CpG-island No: 28973
gcgggggcgtacggattttcgttttttcggtagatatgataaaggtcgatcgggagtcgggggcgcgatagtatcggagcggttagttttcgtttttatttttagggtaggatatttgcgtcgtttttatttatttgcggatttatgtttatttcggttttatacgcgtcgggggaatgtagtggaagagaattgggtgtcggggattttgggattcgcgttttttcgttcgttcgcgaagtagggtagagaattcgtacggtttcggtcgttattagtttcgcgttatattcgttatttttgaattttaacggttattatttatttttatcgcgttttgtacgtagggattaatcgtcgttgtcgttatagtcgagggttaatcgtagcgtttttcgttattcgaagttatatttcgttcgataggcgttttgttttttttgtttcgtaggcgtaggagaggtaggcggattaattttattttcggtgttatttatgttttttatttttttttttttttagcggtaatagtgttggattttcgttcggtttttcgtcgtcgttcgttacgttagaaaatgcgtggacgtcgtcgtacgaacgtaattggttaagcgaaattggtggcggtcggaggagaaggggcggggacgttggaggaaagaaatgacgcgtgcgtaaacgaggattcgtgtcgggagataggcgggattagcgttttttggtgattgtagtagggagcgtatttgtttttcgtcgacgtgattgaggttttagcgttgttttttttggtcgtggttgattgggttcggaagtggtttttggagtttttacgtggatgtgagtggttt

SEQ ID NO: 28974 - DNA, 851 bp, Artificial Sequence
  chemically treated genomic DNA (Homo sapiens) CpG-island No: 28974
aaaccactcacatccacgtaaaaactccaaaaaccacttccgaacccaatcaaccacgaccaaaaaaaacaacgctaaaacctcaatcacgtcgacgaaaaacaaatacgctccctactacaatcaccaaaaaacgctaatcccgcctatctcccgacacgaatcctcgtttacgcacgcgtcatttctttcctccaacgtccccgccccttctcctccgaccgccaccaatttcgcttaaccaattacgttcgtacgacgacgtccacgcattttctaacgtaacgaacgacgacgaaaaaccgaacgaaaatccaacactattaccgctaaaaaaaaaaaaaaataaaaaacataaataacaccgaaaataaaattaatccgcctacctctcctacgcctacgaaacaaaaaaaacaaaacgcctatcgaacgaaatataacttcgaataacgaaaaacgctacgattaaccctcgactataacgacaacgacgattaatccctacgtacaaaacgcgataaaaataaataataaccgttaaaattcaaaaataacgaatataacgcgaaactaataacgaccgaaaccgtacgaattctctaccctacttcgcgaacgaacgaaaaaacgcgaatcccaaaatccccgacacccaattctcttccactacattcccccgacgcgtataaaaccgaaataaacataaatccgcaaataaataaaaacgacgcaaatatcctaccctaaaaataaaaacgaaaactaaccgctccgatactatcgcgcccccgactcccgatcgacctttatcatatctaccgaaaaaacgaaaatccgtacgcccccgc

SEQ ID NO: 28975 - DNA, 851 bp, Artificial Sequence
  chemically treated genomic DNA (Homo sapiens) CpG-island No: 28975
aggttatttatatttacgtgagggttttaggagttattttcgggtttagttaattacgattaggagaggtagcgttggagttttaattacgtcgacggaaaataagtgcgttttttattgtagttattaggaggcgttagtttcgtttgtttttcggtacgggttttcgtttgcgtacgcgttattttttttttttagcgttttcgttttttttttttcggtcgttattagtttcgtttggttagttgcgttcgtgcggcgacgtttacgtattttttgacgtagcgagcgacggcggggagtcgagcggaagtttagtattattgtcgttagaggaggggaggggtgagaagtataagtggtatcggaagtggaattaattcgtttattttttttgcgtttgcgaaatagaaaagataaggcgtttgtcgggcggggtgtggtttcgggtggcggagaacgttgcgattggttttcggttgtggcgatagcgacgattggtttttgcgtgtagagcgcggtgagagtgggtggtggtcgttggaatttaaaagtggcgggtgtggcgcggggttggtagcggtcggagtcgtgcgagttttttattttgtttcgcgagcgggcgagagaacgcgagttttaggattttcggtatttagtttttttttattgtattttttcggcgcgtgtgggatcgaggtggatatggattcgtaggtgagtaggggcggcgtaggtgttttgttttggggatggggacgaaggttgatcgtttcgatgttgtcgcgttttcggttttcggtcggtttttgttatgtttatcgggagagcgaaggttcgtgcgttttcgt

SEQ ID NO: 28976 - DNA, 851 bp, Artificial Sequence
  chemically treated genomic DNA (Homo sapiens) CpG-island No: 28976
acgaaaacgcacgaaccttcgctctcccgataaacataacaaaaaccgaccgaaaaccgaaaacgcgacaacatcgaaacgatcaaccttcgtccccatccccaaaacaaaacacctacgccgcccctactcacctacgaatccatatccacctcgatcccacacgcgccgaaaaaatacaataaaaaaaaactaaataccgaaaatcctaaaactcgcgttctctcgcccgctcgcgaaacaaaataaaaaactcgcacgactccgaccgctaccaaccccgcgccacacccgccacttttaaattccaacgaccaccacccactctcaccgcgctctacacgcaaaaaccaatcgtcgctatcgccacaaccgaaaaccaatcgcaacgttctccgccacccgaaaccacaccccgcccgacaaacgccttatcttttctatttcgcaaacgcaaaaaaaataaacgaattaattccacttccgataccacttatacttctcacccctcccctcctctaacgacaataatactaaacttccgctcgactccccgccgtcgctcgctacgtcaaaaaatacgtaaacgtcgccgcacgaacgcaactaaccaaacgaaactaataacgaccgaaaaaaaaaaaacgaaaacgctaaaaaaaaaaaataacgcgtacgcaaacgaaaacccgtaccgaaaaacaaacgaaactaacgcctcctaataactacaataaaaaacgcacttattttccgtcgacgtaattaaaactccaacgctacctctcctaatcgtaattaactaaacccgaaaataactcctaaaaccctcacgtaaatataaataacct

SEQ ID NO: 28977 - DNA, 509 bp, Artificial Sequence
  chemically treated genomic DNA (Homo sapiens) CpG-island No: 28977
gtcgtatttcgatatttggagacgttttttaggattagtttgaatcgcgttcgggttgggttttggattcggattcgtagcggtgatagcggaggcggggacgggggtggataaattgcggattaatttttcgagaagacggttatttgtcggaatttgtttttttttatttcgtttaggagtttcgtagcggggcgttggtttgcggaaaggttacgggggagtatagggtttcgcgtcgtttttttgggagggttcggagtttagcgtatttcgagttttggtgggtgagttcggcgggaggcgcggtaggtgcggcgggagattggatttcgatttatttttataaagagttcgatttcggggtttttgtcgttttcgttagttgtcgtcgagtttgttatgtcgttggcgttcggggttatcgtttcgggtcggggaggcgttatttttgtagtatttgggttagtattttgcgtttttgtcgttgtttagcggggttttttttt

SEQ ID NO: 28978 - DNA, 509 bp, Artificial Sequence
  chemically treated genomic DNA (Homo sapiens) CpG-island No: 28978
aaaaaaaaaccccgctaaacaacgacaaaaacgcaaaatactaacccaaatactacaaaaataacgcctccccgacccgaaacgataaccccgaacgccaacgacataacaaactcgacgacaactaacgaaaacgacaaaaaccccgaaatcgaactctttataaaaataaatcgaaatccaatctcccgccgcacctaccgcgcctcccgccgaactcacccaccaaaactcgaaatacgctaaactccgaaccctcccaaaaaaacgacgcgaaaccctatactcccccgtaacctttccgcaaaccaacgccccgctacgaaactcctaaacgaaataaaaaaaaacaaattccgacaaataaccgtcttctcgaaaaattaatccgcaatttatccacccccgtccccgcctccgctatcaccgctacgaatccgaatccaaaacccaacccgaacgcgattcaaactaatcctaaaaaacgtctccaaatatcgaaatacgac

SEQ ID NO: 28979 - DNA, 509 bp, Artificial Sequence
  chemically treated genomic DNA (Homo sapiens) CpG-island No: 28979
gaagaggagtttcgttgggtagcggtaggagcgtagagtgttggtttaggtgttgtagaggtggcgttttttcggttcgggacggtagtttcgggcgttaacggtatgatagattcggcgatagttaacggggacgatagggatttcgagatcgagttttttgtgaaggtaggtcggggtttagtttttcgtcgtatttgtcgcgtttttcgtcgggtttatttattagggttcggggtgcgttggatttcggatttttttaggagggcggcgcggagttttgtgttttttcgtggttttttcgtaggttagcgtttcgttgcgaggtttttgggcggaatggaggaaggtaggtttcggtaggtggtcgttttttcggagagttgattcgtagtttgtttattttcgttttcgttttcgttgttatcgttgcgagttcgagtttagagtttagttcggacgcgatttaggttggttttgaaagacgtttttaggtgtcgggatgcggt

SEQ ID NO: 28980 - DNA, 509 bp, Artificial Sequence
  chemically treated genomic DNA (Homo sapiens) CpG-island No: 28980
accgcatcccgacacctaaaaacgtctttcaaaaccaacctaaatcgcgtccgaactaaactctaaactcgaactcgcaacgataacaacgaaaacgaaaacgaaaataaacaaactacgaatcaactctccgaaaaaacgaccacctaccgaaacctaccttcctccattccgcccaaaaacctcgcaacgaaacgctaacctacgaaaaaaccacgaaaaaacacaaaactccgcgccgccctcctaaaaaaatccgaaatccaacgcaccccgaaccctaataaataaacccgacgaaaaacgcgacaaatacgacgaaaaactaaaccccgacctaccttcacaaaaaactcgatctcgaaatccctatcgtccccgttaactatcgccgaatctatcataccgttaacgcccgaaactaccgtcccgaaccgaaaaaacgccacctctacaacacctaaaccaacactctacgctcctaccgctacccaacgaaactcctcttc

SEQ ID NO: 28981 - DNA, 1670 bp, Artificial Sequence
  chemically treated genomic DNA (Homo sapiens) CpG-island No: 28981
  unsure (1149, 1152, 1161..1162, 1176)
tttttattcgggcgtttttattttgagatagtcgtttttcgagcgtagtttttttagttttcgtattaagtcgttgggttcgtagtttagtattttttcggtgaggtcggagaaggtaagcgaggcgttgagcggtaagcggttgttgtttatcgacgacgcggttatcgacggttcgttcggggaggcgggcggtcgcgggggttgttgcgcggagggcgcgggttgggtcggttgtttcgtacggattttcgtcgggttttcggtcgcggattcggcgtcgttgtttagcgttagttttaggtttagtaggcgcgtttttttcgacgcgtagttcgatattttcgagttgttattcgtgaggttggggggcggcggtggcggttacggtttcgtattcgagcgcggacggtttttggtacggatttcggtgcggatttcggttattcgtataatcgtatcgcgcgtttcgggagttattgcgcgtttttttttgttcggtcgtgaggaggacgcggcgttgtaggcgattgttgagttcgggtttgggtcgcggcggtttttagttagcgattagtcggttacgtttttgggtcgggtcggcgacggcgcgcggtggttttttttttttttcggggtaggcgcgggtgtaggcgcgggttggggatcgtagtttcggatcgggggttcggtcgtcggcgtttttatcgcggtttttttcggttttagcgagttgcgcgtatggtttaggttcgttcggtttcgacgtttttggggagggattcggcgcggtttcggtcgttggggttgcggttgttttcggtttatttcggtttcgatatcgcgttttcgttttaagtttcgtcgcgcggttttttcgttgttttgggttcggagagtgcggttcgatcgtttttaggcgtttcggtttcggttgcggtttcgttcggcgttcgttttttcggtttcgtcgcgttttcggagcgcgttcgggttttcgtcgttcgtacgtcgatcgttttttcgggtttcgagttcggttgcggttcgggtttcggtttcgttcggcgtagttcgtttttcgcgtagtttcgttagtttttcgtttcgtcgtttcggttcggggcgcgcggtttcgcgaataaaagncgnacgcgcggnnagcggtaaggaggnacgtaggtagggagcgaggaagggatttgcgaggtaatagcgattttttcgagggttaggttggcgcgggtagtcgcggttcgggtttttttttttttcgtttcgtcgtttttttttttgttcgttcggggaaggtattcggcggaggcgtttttgcgttcggcgttcgggtagggtttgcgagagcggcgggagtcgggattttcgggtcgaggtcgggcggattttagttcgtaggaattcgtatttatgtacgtttagcgtttcgtttttcgtttcgtgtcgagcgtgcgcgaatttcgtttttttagtcggtatcgtcggagtcgcgattttatcgtatagatgcgtaaattgaagtttggggtgtacgcgttaagtttacggtttaggcggcgtcgatgggatttaaagtttatatttttcgggcgcgttcgggttttttttgtttcggttttttttttttggtatagggatcgtgaagttttgtgtgt

SEQ ID NO: 28982 - DNA, 1670 bp, Artificial Sequence
  chemically treated genomic DNA (Homo sapiens) CpG-island No: 28982
  unsure (495, 509..510, 519, 522)
acacacaaaacttcacgatccctataccaaaaaaaaaaaaccgaaacaaaaaaaacccgaacgcgcccgaaaaatataaactttaaatcccatcgacgccgcctaaaccgtaaacttaacgcgtacaccccaaacttcaatttacgcatctatacgataaaatcgcgactccgacgataccgactaaaaaaacgaaattcgcgcacgctcgacacgaaacgaaaaacgaaacgctaaacgtacataaatacgaattcctacgaactaaaatccgcccgacctcgacccgaaaatcccgactcccgccgctctcgcaaaccctacccgaacgccgaacgcaaaaacgcctccgccgaataccttccccgaacgaacaaaaaaaaaaacgacgaaacgaaaaaaaaaaaaacccgaaccgcgactacccgcgccaacctaaccctcgaaaaaatcgctattacctcgcaaatcccttcctcgctccctacctacgtncctccttaccgctnnccgcgcgtncgncttttattcgcgaaaccgcgcgccccgaaccgaaacgacgaaacgaaaaactaacgaaactacgcgaaaaacgaactacgccgaacgaaaccgaaacccgaaccgcaaccgaactcgaaacccgaaaaaacgatcgacgtacgaacgacgaaaacccgaacgcgctccgaaaacgcgacgaaaccgaaaaaacgaacgccgaacgaaaccgcaaccgaaaccgaaacgcctaaaaacgatcgaaccgcactctccgaacccaaaacaacgaaaaaaccgcgcgacgaaacttaaaacgaaaacgcgatatcgaaaccgaaataaaccgaaaacaaccgcaaccccaacgaccgaaaccgcgccgaatccctccccaaaaacgtcgaaaccgaacgaacctaaaccatacgcgcaactcgctaaaaccgaaaaaaaccgcgataaaaacgccgacgaccgaacccccgatccgaaactacgatccccaacccgcgcctacacccgcgcctaccccgaaaaaaaaaaaaaaccaccgcgcgccgtcgccgacccgacccaaaaacgtaaccgactaatcgctaactaaaaaccgccgcgacccaaacccgaactcaacaatcgcctacaacgccgcgtcctcctcacgaccgaacaaaaaaaaacgcgcaataactcccgaaacgcgcgatacgattatacgaataaccgaaatccgcaccgaaatccgtaccaaaaaccgtccgcgctcgaatacgaaaccgtaaccgccaccgccgccccccaacctcacgaataacaactcgaaaatatcgaactacgcgtcgaaaaaaacgcgcctactaaacctaaaactaacgctaaacaacgacgccgaatccgcgaccgaaaacccgacgaaaatccgtacgaaacaaccgacccaacccgcgccctccgcgcaacaacccccgcgaccgcccgcctccccgaacgaaccgtcgataaccgcgtcgtcgataaacaacaaccgcttaccgctcaacgcctcgcttaccttctccgacctcaccgaaaaaatactaaactacgaacccaacgacttaatacgaaaactaaaaaaactacgctcgaaaaacgactatctcaaaataaaaacgcccgaataaaaa

SEQ ID NO: 28983 - DNA, 1670 bp, Artificial Sequence
  chemically treated genomic DNA (Homo sapiens) CpG-island No: 28983
  unsure (495, 509..510, 519, 522)
gtatatagggttttacggtttttatgttaggagagggaagtcgaggtagggggagttcgagcgcgttcgggaggtgtgagttttgggttttatcggcgtcgtttagatcgtgagtttggcgcgtgtattttaggttttagtttacgtatttgtgcgatgggatcgcggtttcggcgatgtcggttaagggggcggagttcgcgtacgttcggtacggggcgaggggcgaggcgttgggcgtgtatggatgcgggtttttgcgaattgaggttcgttcggtttcggttcgggagtttcggttttcgtcgttttcgtaggttttgttcggacgtcgggcgtaggggcgttttcgtcgggtgtttttttcgagcgggtaggggaggaggcggcggagcggaggaggagggagttcgggtcgcggttgttcgcgttagtttgattttcgaaggggtcgttgttgtttcgtagatttttttttcgttttttgtttgcgtntttttttgtcgttnntcgcgcgtncgntttttgttcgcggaatcgcgcgtttcgagtcgaggcggcggggcggggagttggcggggttgcgcggggggcgggttgcgtcgggcggagtcggggttcgggtcgtagtcggattcggagttcgagggagcgatcggcgtgcgggcggcgggggttcgggcgcgtttcgggggcgcggcgaggtcgagggggcgggcgtcgggcggagtcgtagtcggagtcggggcgtttggaggcggtcgggtcgtatttttcgagtttagagtagcggagagatcgcgcggcggggtttgggacggggacgcggtgtcggggtcgaggtgggtcgagagtagtcgtagttttagcggtcggagtcgcgtcgggtttttttttagggacgtcgaggtcgggcgggtttgggttatgcgcgtagttcgttgaggtcgagggaggtcgcgatggaggcgtcggcggtcgagttttcggttcggggttgcggtttttagttcgcgtttgtattcgcgtttgtttcggagaggaaaaagagttatcgcgcgtcgtcgtcggttcggtttaaagacgtggtcggttggtcgttggttaagggtcgtcgcggtttaggttcgggtttagtagtcgtttgtagcgtcgcgttttttttacggtcggataagaaggggcgcgtagtggttttcggggcgcgcggtgcggttgtgcgggtggtcggggttcgtatcggggttcgtgttaagggtcgttcgcgttcgggtgcggggtcgtgatcgttatcgtcgttttttagttttacggatagtagttcggaggtgtcggattgcgcgtcggaggaggcgcgtttgttgggtttggagttggcgttgagtagcgacgtcgagttcgcggtcgggggttcggcgggggttcgtacggggtagtcggtttagttcgcgtttttcgcgtagtagttttcgcggtcgttcgttttttcggacgagtcgtcggtggtcgcgtcgtcggtgggtagtagtcgtttgtcgtttagcgtttcgtttgtttttttcgattttatcgaggagatgttggattgcgggtttagcggtttggtgcgggagttggaggagttgcgttcggagaacgattattttaaggtgggggcgttcgggtagaaa

SEQ ID NO: 28984 - DNA, 1670 bp, Artificial Sequence
  chemically treated genomic DNA (Homo sapiens) CpG-island No: 28984
  unsure (1149, 1152, 1161..1162, 1176)
tttctacccgaacgcccccaccttaaaataatcgttctccgaacgcaactcctccaactcccgcaccaaaccgctaaacccgcaatccaacatctcctcgataaaatcgaaaaaaacaaacgaaacgctaaacgacaaacgactactacccaccgacgacgcgaccaccgacgactcgtccgaaaaaacgaacgaccgcgaaaactactacgcgaaaaacgcgaactaaaccgactaccccgtacgaacccccgccgaacccccgaccgcgaactcgacgtcgctactcaacgccaactccaaacccaacaaacgcgcctcctccgacgcgcaatccgacacctccgaactactatccgtaaaactaaaaaacgacgataacgatcacgaccccgcacccgaacgcgaacgacccttaacacgaaccccgatacgaaccccgaccacccgcacaaccgcaccgcgcgccccgaaaaccactacgcgccccttcttatccgaccgtaaaaaaaacgcgacgctacaaacgactactaaacccgaacctaaaccgcgacgacccttaaccaacgaccaaccgaccacgtctttaaaccgaaccgacgacgacgcgcgataactctttttcctctccgaaacaaacgcgaatacaaacgcgaactaaaaaccgcaaccccgaaccgaaaactcgaccgccgacgcctccatcgcgacctccctcgacctcaacgaactacgcgcataacccaaacccgcccgacctcgacgtccctaaaaaaaaacccgacgcgactccgaccgctaaaactacgactactctcgacccacctcgaccccgacaccgcgtccccgtcccaaaccccgccgcgcgatctctccgctactctaaactcgaaaaatacgacccgaccgcctccaaacgccccgactccgactacgactccgcccgacgcccgccccctcgacctcgccgcgcccccgaaacgcgcccgaacccccgccgcccgcacgccgatcgctccctcgaactccgaatccgactacgacccgaaccccgactccgcccgacgcaacccgccccccgcgcaaccccgccaactccccgccccgccgcctcgactcgaaacgcgcgattccgcgaacaaaaancgnacgcgcgannaacgacaaaaaaanacgcaaacaaaaaacgaaaaaaaaatctacgaaacaacaacgaccccttcgaaaatcaaactaacgcgaacaaccgcgacccgaactccctcctcctccgctccgccgcctcctcccctacccgctcgaaaaaaacacccgacgaaaacgcccctacgcccgacgtccgaacaaaacctacgaaaacgacgaaaaccgaaactcccgaaccgaaaccgaacgaacctcaattcgcaaaaacccgcatccatacacgcccaacgcctcgcccctcgccccgtaccgaacgtacgcgaactccgcccccttaaccgacatcgccgaaaccgcgatcccatcgcacaaatacgtaaactaaaacctaaaatacacgcgccaaactcacgatctaaacgacgccgataaaacccaaaactcacacctcccgaacgcgctcgaactccccctacctcgacttccctctcctaacataaaaaccgtaaaaccctatatac

SEQ ID NO: 28985 - DNA, 716 bp, Artificial Sequence
  chemically treated genomic DNA (Homo sapiens) CpG-island No: 28985
gaggagtattgcgattgtttgtatcgtggtcgtttttttttatcgacgatgagtagtattgcgattgtttggatcgtgggagtttttttttatcgacgatgaggagtattgcgatcgtttgtatcgtggtcgtttttttttatcgacgacgaggagtattgcgattgtttgtatcgtggtcgtttttttttattgacgacgaggagtattgcgattgtttgtatcgtggtcgtttttttttatcgacggcgaggagtattgcgattgtttgtatcgtggtcgtttttttttattgacgacgaggagtattgcgattgtttgtatcgtggtcgtttttttttattaacgatgaggagtattgcgattgtttgtattatggtcgtttttttttatcgacgatgagtagtattgcgattgtttggatcgtgggagtttttttttatcgacgacgaggagtattgcgattgtttgtatcgtggtcgtttttttttattgacgacgaggagtattgcgattgtttgtattatggtcgtttttttttatcgacgacgaggagtattgcgatcgtttgtatcgtggttatttttttttatcgacgatgaggagtatcgagattgtttgtatcgtggtcgtttttttttatcgatgacgaggagtattgcgattgtttgtattttggttgtttttttttatcgatgttgaggagtattgagatt

SEQ ID NO: 28986 - DNA, 716 bp, Artificial Sequence
  chemically treated genomic DNA (Homo sapiens) CpG-island No: 28986
aatctcaatactcctcaacatcgataaaaaaaaacaaccaaaatacaaacaatcgcaatactcctcgtcatcgataaaaaaaaacgaccacgatacaaacaatctcgatactcctcatcgtcgataaaaaaaaataaccacgatacaaacgatcgcaatactcctcgtcgtcgataaaaaaaaacgaccataatacaaacaatcgcaatactcctcgtcgtcaataaaaaaaaacgaccacgatacaaacaatcgcaatactcctcgtcgtcgataaaaaaaaactcccacgatccaaacaatcgcaatactactcatcgtcgataaaaaaaaacgaccataatacaaacaatcgcaatactcctcatcgttaataaaaaaaaacgaccacgatacaaacaatcgcaatactcctcgtcgtcaataaaaaaaaacgaccacgatacaaacaatcgcaatactcctcgccgtcgataaaaaaaaacgaccacgatacaaacaatcgcaatactcctcgtcgtcaataaaaaaaaacgaccacgatacaaacaatcgcaatactcctcgtcgtcgataaaaaaaaacgaccacgatacaaacgatcgcaatactcctcatcgtcgataaaaaaaaactcccacgatccaaacaatcgcaatactactcatcgtcgataaaaaaaaacgaccacgatacaaacaatcgcaatactcctc

SEQ ID NO: 28987 - DNA, 716 bp, Artificial Sequence
  chemically treated genomic DNA (Homo sapiens) CpG-island No: 28987
agttttagtgttttttagtatcggtgagaaggggtagttagggtgtagatagtcgtagtgtttttcgttatcggtgagaaggggcggttacggtgtagatagtttcggtgttttttatcgtcggtgagaaggggtggttacggtgtagacggtcgtagtgtttttcgtcgtcggtgagaaggggcggttatggtgtagatagtcgtagtgtttttcgtcgttagtgagaaggggcggttacggtgtagatagtcgtagtgtttttcgtcgtcggtgagaaggggtttttacgatttagatagtcgtagtgttatttatcgtcggtgagaaggggcggttatggtgtagatagtcgtagtgttttttatcgttggtgagaaggggcggttacggtgtagatagtcgtagtgtttttcgtcgttagtgagaaggggcggttacggtgtagatagtcgtagtgtttttcgtcgtcggtgagaaggggcggttacggtgtagatagtcgtagtgtttttcgtcgttagtgagaaggggcggttacggtgtagatagtcgtagtgtttttcgtcgtcggtgagaaggggcggttacggtgtagacggtcgtagtgttttttatcgtcggtgagaaggggtttttacgatttagatagtcgtagtgttatttatcgtcggtgagaaggggcggttacggtgtagatagtcgtagtgtttttt

SEQ ID NO: 28988 - DNA, 716 bp, Artificial Sequence
  chemically treated genomic DNA (Homo sapiens) CpG-island No: 28988
aaaaaacactacgactatctacaccgtaaccgccccttctcaccgacgataaataacactacgactatctaaatcgtaaaaaccccttctcaccgacgataaaaaacactacgaccgtctacaccgtaaccgccccttctcaccgacgacgaaaaacactacgactatctacaccgtaaccgccccttctcactaacgacgaaaaacactacgactatctacaccgtaaccgccccttctcaccgacgacgaaaaacactacgactatctacaccgtaaccgccccttctcactaacgacgaaaaacactacgactatctacaccgtaaccgccccttctcaccaacgataaaaaacactacgactatctacaccataaccgccccttctcaccgacgataaataacactacgactatctaaatcgtaaaaaccccttctcaccgacgacgaaaaacactacgactatctacaccgtaaccgccccttctcactaacgacgaaaaacactacgactatctacaccataaccgccccttctcaccgacgacgaaaaacactacgaccgtctacaccgtaaccaccccttctcaccgacgataaaaaacaccgaaactatctacaccgtaaccgccccttctcaccgataacgaaaaacactacgactatctacaccctaactaccccttctcaccgatactaaaaaacactaaaact

SEQ ID NO: 28989 - DNA, 545 bp, Artificial Sequence
  chemically treated genomic DNA (Homo sapiens) CpG-island No: 28989
tgcgattgtttgtatcgtggtcgtttcgattgatgatgaggaatattgcgatcgtttgtatcgtggtcgtttttttttattgatgttgaggagtattacgatcgtttgtattatggtcgtttttttttatcgatgaggagtattgcgattgtttgtatcgtggtcgtttttttttattaaagacgaggagtatcgcggttgtttgtattatggtcgttttttttttttaacgatgaggaatattgtgattgtttgtatcgtggtcgtttttttttattaacgatgaggagtattgcgatcgtttgtatcgtggtcgtttttttttattgacgatgaggagtattgcgatcgtttgtatcgtggtcgtttttttttattaacgatgaggagtattgcgattgtttgtatcgtggtcgtttttttttattaacgacgaggagtatcgcggttgtttgtattatggtcgttttttttttttaacgatgaggaatattgtgattgtttgtatcgtggtcgtttttttttattaacgatgaggagtattg

SEQ ID NO: 28990 - DNA, 545 bp, Artificial Sequence
  chemically treated genomic DNA (Homo sapiens) CpG-island No: 28990
caatactcctcatcgttaataaaaaaaaacgaccacgatacaaacaatcacaatattcctcatcgttaaaaaaaaaaaacgaccataatacaaacaaccgcgatactcctcgtcgttaataaaaaaaaacgaccacgatacaaacaatcgcaatactcctcatcgttaataaaaaaaaacgaccacgatacaaacgatcgcaatactcctcatcgtcaataaaaaaaaacgaccacgatacaaacgatcgcaatactcctcatcgttaataaaaaaaaacgaccacgatacaaacaatcacaatattcctcatcgttaaaaaaaaaaaacgaccataatacaaacaaccgcgatactcctcgtctttaataaaaaaaaacgaccacgatacaaacaatcgcaatactcctcatcgataaaaaaaaacgaccataatacaaacgatcgtaatactcctcaacatcaataaaaaaaaacgaccacgatacaaacgatcgcaatattcctcatcatcaatcgaaacgaccacgatacaaacaatcgca

SEQ ID NO: 28991 - DNA, 545 bp, Artificial Sequence
  chemically treated genomic DNA (Homo sapiens) CpG-island No: 28991
taatgttttttatcgttggtgagaaggggcggttacggtgtagatagttataatgttttttatcgttggggagaaggggcggttatggtgtagatagtcgcgatgtttttcgtcgttggtgagaaggggcggttacggtgtagatagtcgtagtgttttttatcgttggtgagaaggggcggttacggtgtagacggtcgtagtgttttttatcgttagtgagaaggggcggttacggtgtagacggtcgtagtgttttttatcgttggtgagaaggggcggttacggtgtagatagttataatgttttttatcgttggggagaaggggcggttatggtgtagatagtcgcgatgtttttcgtttttggtgagaaggggcggttacggtgtagatagtcgtagtgttttttatcggtgagaaggggcggttatggtgtagacggtcgtagtgttttttagtattagtgagaaggggcggttacggtgtagacggtcgtaatgttttttattattagtcggggcggttacggtgtagatagtcgta

SEQ ID NO: 28992 - DNA, 545 bp, Artificial Sequence
  chemically treated genomic DNA (Homo sapiens) CpG-island No: 28992
tacgactatctacaccgtaaccgccccgactaataataaaaaacattacgaccgtctacaccgtaaccgccccttctcactaatactaaaaaacactacgaccgtctacaccataaccgccccttctcaccgataaaaaacactacgactatctacaccgtaaccgccccttctcaccaaaaacgaaaaacatcgcgactatctacaccataaccgccccttctccccaacgataaaaaacattataactatctacaccgtaaccgccccttctcaccaacgataaaaaacactacgaccgtctacaccgtaaccgccccttctcactaacgataaaaaacactacgaccgtctacaccgtaaccgccccttctcaccaacgataaaaaacactacgactatctacaccgtaaccgccccttctcaccaacgacgaaaaacatcgcgactatctacaccataaccgccccttctccccaacgataaaaaacattataactatctacaccgtaaccgccccttctcaccaacgataaaaaacatta

SEQ ID NO: 28993 - DNA, 936 bp, Artificial Sequence
  chemically treated genomic DNA (Homo sapiens) CpG-island No: 28993
tatatcgggtagacgtgcgtttaatattgggtagacgggtatttagttttattattgcgttatatatcgggtagacgtgtatttaatatcggttagacgggtatttagttttattattgcgttatatatcgggtagacgtgtatttaatatcggttagacgtgtatttagttttattattgtattatatatcgggtagacgtgtatttaatattgggtagacgggtatttagttttattattgtattatatatcgggtagacgtgcgtttaatattgggtagacgtgtatttagttttattattgtattatatatcgggtagacgtgtatttaatattgggtagacgtgtatttagttttattattgtattatatatcgggtagacgtgtatttaatattgggtagacgtgtatttagttttattattgcgttatatatcgggtagacgtgtatttaatattgggtagacgtgtatttagttttattattgtattatatatcgggtagacgtgtatttaatattgggtagacgggtatttagttttattattgcgttatatatcgggtagacgtgtatttaatattgggtagacgtgtatttagttttattattgcgttatatatcgggtagacgtgtatttaatattgggtagacgtgtatttagttttattattgcgttatatatcgggtagacgtgtatttaatattgggtagacgtgtatttagttttattattgtattatatatcgggtagacgtgtatttaatattgggtagacgtgtatttagttttattattgtattatatatcgggtagacgtgtatttaatattgggtagacgggtatttagttttattattgcgttatatatcgggtagacgtgcgtttagttttttgtgttatataatatgttattattggatgagagtttttt

SEQ ID NO: 28994 - DNA, 936 bp, Artificial Sequence
  chemically treated genomic DNA (Homo sapiens) CpG-island No: 28994
aaaaaactctcatccaataataacatattatataacacaaaaaactaaacgcacgtctacccgatatataacgcaataataaaactaaatacccgtctacccaatattaaatacacgtctacccgatatataatacaataataaaactaaatacacgtctacccaatattaaatacacgtctacccgatatataatacaataataaaactaaatacacgtctacccaatattaaatacacgtctacccgatatataacgcaataataaaactaaatacacgtctacccaatattaaatacacgtctacccgatatataacgcaataataaaactaaatacacgtctacccaatattaaatacacgtctacccgatatataacgcaataataaaactaaatacccgtctacccaatattaaatacacgtctacccgatatataatacaataataaaactaaatacacgtctacccaatattaaatacacgtctacccgatatataacgcaataataaaactaaatacacgtctacccaatattaaatacacgtctacccgatatataatacaataataaaactaaatacacgtctacccaatattaaatacacgtctacccgatatataatacaataataaaactaaatacacgtctacccaatattaaacgcacgtctacccgatatataatacaataataaaactaaatacccgtctacccaatattaaatacacgtctacccgatatataatacaataataaaactaaatacacgtctaaccgatattaaatacacgtctacccgatatataacgcaataataaaactaaatacccgtctaaccgatattaaatacacgtctacccgatatataacgcaataataaaactaaatacccgtctacccaatattaaacgcacgtctacccgatata

SEQ ID NO: 28995 - DNA, 936 bp, Artificial Sequence
  chemically treated genomic DNA (Homo sapiens) CpG-island No: 28995
gaaagatttttatttagtggtggtatgttgtgtgatataggaagttgaacgtacgtttgttcggtgtgtgacgtagtgatgaagttgaatgttcgtttatttagtgttgaatgtacgtttattcggtgtgtgatgtagtgatgaagttgaatgtacgtttatttagtgttgaatgtacgtttgttcggtgtgtgatgtagtgatgaagttgaatgtacgtttatttagtgttgaatgtacgtttattcggtgtgtgacgtagtgatgaagttgaatgtacgtttatttagtgttgaatgtacgtttgttcggtgtgtgacgtagtgatgaagttgaatgtacgtttatttagtgttgaatgtacgtttgttcggtgtgtgacgtagtgatgaagttgaatgttcgtttatttagtgttgaatgtacgtttgttcggtgtgtgatgtagtgatgaagttgaatgtacgtttatttagtgttgaatgtacgtttgttcggtgtgtgacgtagtgatgaagttgaatgtacgtttatttagtgttgaatgtacgtttattcggtgtgtgatgtagtgatgaagttgaatgtacgtttatttagtgttgaatgtacgtttattcggtgtgtgatgtagtgatgaagttgaatgtacgtttatttagtgttgaacgtacgtttgttcggtgtgtgatgtagtgatgaagttgaatgttcgtttatttagtgttgaatgtacgtttattcggtgtgtgatgtagtgatgaagttgaatgtacgtttaatcggtgttgaatgtacgtttgttcggtgtgtgacgtagtgatgaagttgaatgttcgtttaatcggtgttgaatgtacgtttgttcggtgtgtgacgtagtgatgaagttgaatgttcgtttatttagtgttgaacgtacgtttgttcggtgtg

SEQ ID NO: 28996 - DNA, 936 bp, Artificial Sequence
  chemically treated genomic DNA (Homo sapiens) CpG-island No: 28996
cacaccgaacaaacgtacgttcaacactaaataaacgaacattcaacttcatcactacgtcacacaccgaacaaacgtacattcaacaccgattaaacgaacattcaacttcatcactacgtcacacaccgaacaaacgtacattcaacaccgattaaacgtacattcaacttcatcactacatcacacaccgaataaacgtacattcaacactaaataaacgaacattcaacttcatcactacatcacacaccgaacaaacgtacgttcaacactaaataaacgtacattcaacttcatcactacatcacacaccgaataaacgtacattcaacactaaataaacgtacattcaacttcatcactacatcacacaccgaataaacgtacattcaacactaaataaacgtacattcaacttcatcactacgtcacacaccgaacaaacgtacattcaacactaaataaacgtacattcaacttcatcactacatcacacaccgaacaaacgtacattcaacactaaataaacgaacattcaacttcatcactacgtcacacaccgaacaaacgtacattcaacactaaataaacgtacattcaacttcatcactacgtcacacaccgaacaaacgtacattcaacactaaataaacgtacattcaacttcatcactacgtcacacaccgaataaacgtacattcaacactaaataaacgtacattcaacttcatcactacatcacacaccgaacaaacgtacattcaacactaaataaacgtacattcaacttcatcactacatcacacaccgaataaacgtacattcaacactaaataaacgaacattcaacttcatcactacgtcacacaccgaacaaacgtacgttcaacttcctatatcacacaacataccaccactaaataaaaatctttc

SEQ ID NO: 28997 - DNA, 539 bp, Artificial Sequence
  chemically treated genomic DNA (Homo sapiens) CpG-island No: 28997
gggcgcgatattaattaagggagggcgcgagattaattaagggagggcgcgagattaattaagggagggcgcgagattaattaagggagggcgcgagattaattaagggagggcgcgagattaattaagggagggcgcgagattaattaagggagggcgcgagattaattaagggagggcgcgagattaattaagggagggcgcgatattaagggagggcgcgatattaattaagggagggcgcgatattaattaagggagggcgcgatattaattaagggagggcgcgatattaattaagggagggcgcgatattaattaagggagggcgcgatattaattaagggagggcgcgatattaattaagggagggcgcgagattaattaagggagggcgcgatattaattaagtgagggttcgatattaattaagggagggcgcgatattaattaagggagggcgcgagattaattaaggtcgggggcgagattaattaaaggagggggtgagattaattaaggtcgggggcgagattaat

SEQ ID NO: 28998 - DNA, 539 bp, Artificial Sequence
  chemically treated genomic DNA (Homo sapiens) CpG-island No: 28998
attaatctcgcccccgaccttaattaatctcaccccctcctttaattaatctcgcccccgaccttaattaatctcgcgccctcccttaattaatatcgcgccctcccttaattaatatcgaaccctcacttaattaatatcgcgccctcccttaattaatctcgcgccctcccttaattaatatcgcgccctcccttaattaatatcgcgccctcccttaattaatatcgcgccctcccttaattaatatcgcgccctcccttaattaatatcgcgccctcccttaattaatatcgcgccctcccttaattaatatcgcgccctcccttaatatcgcgccctcccttaattaatctcgcgccctcccttaattaatctcgcgccctcccttaattaatctcgcgccctcccttaattaatctcgcgccctcccttaattaatctcgcgccctcccttaattaatctcgcgccctcccttaattaatctcgcgccctcccttaattaatctcgcgccctcccttaattaatatcgcgccc

SEQ ID NO: 28999 - DNA, 539 bp, Artificial Sequence
  chemically treated genomic DNA (Homo sapiens) CpG-island No: 28999
gttggtttcgttttcggttttggttggttttatttttttttttggttggtttcgttttcggttttggttggtttcgcgtttttttttggttggtgtcgcgtttttttttggttggtgtcgagtttttatttggttggtgtcgcgtttttttttggttggtttcgcgtttttttttggttggtgtcgcgtttttttttggttggtgtcgcgtttttttttggttggtgtcgcgtttttttttggttggtgtcgcgtttttttttggttggtgtcgcgtttttttttggttggtgtcgcgtttttttttggttggtgtcgcgtttttttttggtgtcgcgtttttttttggttggtttcgcgtttttttttggttggtttcgcgtttttttttggttggtttcgcgtttttttttggttggtttcgcgtttttttttggttggtttcgcgtttttttttggttggtttcgcgtttttttttggttggtttcgcgtttttttttggttggtttcgcgtttttttttggttggtgtcgcgttt

SEQ ID NO: 29000 - DNA, 539 bp, Artificial Sequence
  chemically treated genomic DNA (Homo sapiens) CpG-island No: 29000
aaacgcgacaccaaccaaaaaaaaacgcgaaaccaaccaaaaaaaaacgcgaaaccaaccaaaaaaaaacgcgaaaccaaccaaaaaaaaacgcgaaaccaaccaaaaaaaaacgcgaaaccaaccaaaaaaaaacgcgaaaccaaccaaaaaaaaacgcgaaaccaaccaaaaaaaaacgcgaaaccaaccaaaaaaaaacgcgacaccaaaaaaaaacgcgacaccaaccaaaaaaaaacgcgacaccaaccaaaaaaaaacgcgacaccaaccaaaaaaaaacgcgacaccaaccaaaaaaaaacgcgacaccaaccaaaaaaaaacgcgacaccaaccaaaaaaaaacgcgacaccaaccaaaaaaaaacgcgaaaccaaccaaaaaaaaacgcgacaccaaccaaataaaaactcgacaccaaccaaaaaaaaacgcgacaccaaccaaaaaaaaacgcgaaaccaaccaaaaccgaaaacgaaaccaaccaaaaaaaaaaataaaaccaaccaaaaccgaaaacgaaaccaac

SEQ ID NO: 29001 - DNA, 1661 bp, Artificial Sequence
  chemically treated genomic DNA (Homo sapiens) CpG-island No: 29001
gagtattgcgatcgtttgtatcgtggtcgtttttttttatcgattacgaggagtattgcgatcgtttgtatcgtggtcgtttttttttatcgacgacgaggagtattgcgatcgtttgtatcgtggtcgtttttttttatcgacgacgaggagtattgcgatcgtttgtatcgtggtcgtttttttttatcgacgacgaggagtattgcgatcgtttgtatcgtggtcgtttttttttatcgattacgaggagtattgcgatcgtttgtatcgtggtcgtttttttttatcgattacgaggagtattgcgatcgtttgtatcgtggtcgtttttttttatcgattacgaggagtattgcgatcgtttgtatcgtggtcgtttttttttatcgacgacgaggagtattgcgatcgtttgtatcgtggtcgtttttttttatcgacgacgaggagtattgcgatcgtttgtatcgtggtcgtttttttttatcgacgacgaggagtattgcgatcgtttgtatcgtggtcgtttttttttatcgattacgaggagtattgcgatcgtttgtatcgtggtcgtttttttttatcgacgacgaggagtattgcgatcgtcggtatcgtggtcgtttttttttatcgacgacgaggagtattgcgatcgtttgtatcgtggtcgtttttttttatcgacgacgaggagtattgcgattttttgtatcgtggtcgtttttttttatcgacgacgaggagtattgcgatcgtttgtatcgtggtcgttttttttttatcgacgacgaggagtattgcgatcgtttgtatcgtggtcgtttttttttatcgattacgaggagtattgcgatcgtttgtatcgtggtcgtttttttttatcgacgacgaggagtattgcgatcgtttgtatcgtggtcgtttttttttatcgattacgaggagtattgcgatcgtttgtatcgtggtcgtttttttttatcgattacgaggagtattgcgatcgtttgtatcgtggtcgtttttttttatcgacgacgaggagtattgcgatcgtttgtatcgtggtcgtttttttttatcgattacgaggagtattgcgatcgtttgtatcgtggtcgtttttttttattgacgatgaggagtattgcgattgtatgtatcgtggtcgtttttttttatcgacgacgaggagtattgcgatcgtttgtatcgtggtcgtttttttttattgacgatgaggagtattgcgatcgtttgtatcgtggtcgtttttttttatcgacgacgaggagtattgcgattgtttgtatcgtggtcgtttttttttatcgacgacgaggagtattgcgatcgtttgtatcgtggtcgtttttttttattgacgatgaggagtattgcgattgtatgtatcgtggtcgtttttttttattaacgatgaggagtattgcgattgtttgtatcgtggtcgtttttttttatcgacgatgaggagtattgcgattgtatgtatcgtggtcgtttttttttatcgacgacgaggagtattgcgatcgtttgtatcgtggtcgtttttttttattaacgatgaggagtatcgcggttgtttgtattatgggagtttttttttattgataatgaggagtatttag

SEQ ID NO: 29002 - DNA, 1661 bp, Artificial Sequence
  chemically treated genomic DNA (Homo sapiens) CpG-island No: 29002
ctaaatactcctcattatcaataaaaaaaaactcccataatacaaacaaccgcgatactcctcatcgttaataaaaaaaaacgaccacgatacaaacgatcgcaatactcctcgtcgtcgataaaaaaaaacgaccacgatacatacaatcgcaatactcctcatcgtcgataaaaaaaaacgaccacgatacaaacaatcgcaatactcctcatcgttaataaaaaaaaacgaccacgatacatacaatcgcaatactcctcatcgtcaataaaaaaaaacgaccacgatacaaacgatcgcaatactcctcgtcgtcgataaaaaaaaacgaccacgatacaaacaatcgcaatactcctcgtcgtcgataaaaaaaaacgaccacgatacaaacgatcgcaatactcctcatcgtcaataaaaaaaaacgaccacgatacaaacgatcgcaatactcctcgtcgtcgataaaaaaaaacgaccacgatacatacaatcgcaatactcctcatcgtcaataaaaaaaaacgaccacgatacaaacgatcgcaatactcctcgtaatcgataaaaaaaaacgaccacgatacaaacgatcgcaatactcctcgtcgtcgataaaaaaaaacgaccacgatacaaacgatcgcaatactcctcgtaatcgataaaaaaaaacgaccacgatacaaacgatcgcaatactcctcgtaatcgataaaaaaaaacgaccacgatacaaacgatcgcaatactcctcgtcgtcgataaaaaaaaacgaccacgatacaaacgatcgcaatactcctcgtaatcgataaaaaaaaacgaccacgatacaaacgatcgcaatactcctcgtcgtcgataaaaaaaaaacgaccacgatacaaacgatcgcaatactcctcgtcgtcgataaaaaaaaacgaccacgatacaaaaaatcgcaatactcctcgtcgtcgataaaaaaaaacgaccacgatacaaacgatcgcaatactcctcgtcgtcgataaaaaaaaacgaccacgataccgacgatcgcaatactcctcgtcgtcgataaaaaaaaacgaccacgatacaaacgatcgcaatactcctcgtaatcgataaaaaaaaacgaccacgatacaaacgatcgcaatactcctcgtcgtcgataaaaaaaaacgaccacgatacaaacgatcgcaatactcctcgtcgtcgataaaaaaaaacgaccacgatacaaacgatcgcaatactcctcgtcgtcgataaaaaaaaacgaccacgatacaaacgatcgcaatactcctcgtaatcgataaaaaaaaacgaccacgatacaaacgatcgcaatactcctcgtaatcgataaaaaaaaacgaccacgatacaaacgatcgcaatactcctcgtaatcgataaaaaaaaacgaccacgatacaaacgatcgcaatactcctcgtcgtcgataaaaaaaaacgaccacgatacaaacgatcgcaatactcctcgtcgtcgataaaaaaaaacgaccacgatacaaacgatcgcaatactcctcgtcgtcgataaaaaaaaacgaccacgatacaaacgatcgcaatactcctcgtaatcgataaaaaaaaacgaccacgatacaaacgatcgcaatactc

SEQ ID NO: 29003 - DNA, 1661 bp, Artificial Sequence
  chemically treated genomic DNA (Homo sapiens) CpG-island No: 29003
ttgaatgttttttattgttagtgagaaggggtttttatggtgtagatagtcgcgatgttttttatcgttggtgagaaggggcggttacggtgtagacggtcgtagtgtttttcgtcgtcggtgagaaggggcggttacggtgtatatagtcgtaatgttttttatcgtcggtgagaaggggcggttacggtgtagatagtcgtagtgttttttatcgttggtgagaaggggcggttacggtgtatatagtcgtaatgttttttatcgttagtgagaaggggcggttacggtgtagacggtcgtagtgtttttcgtcgtcggtgagaaggggcggttacggtgtagatagtcgtagtgtttttcgtcgtcggtgagaaggggcggttacggtgtagacggtcgtagtgttttttatcgttagtgagaaggggcggttacggtgtagacggtcgtagtgtttttcgtcgtcggtgagaaggggcggttacggtgtatatagtcgtaatgttttttatcgttagtgagaaggggcggttacggtgtagacggtcgtagtgtttttcgtggtcggtgagaaggggcggttacggtgtagacggtcgtagtgtttttcgtcgtcggtgagagggggcggttacggtgtagacggtcgtagtgtttttcgtggtcggtgagagggggcggttacggtgtagacggtcgtagtgtttttcgtggtcggtgagaaggggcggttacggtgtagacggtcgtagtgtttttcgtcgtcggtgagagggggcggttacggtgtagacggtcgtagtgtttttcgtggtcggtgagagggggcggttacggtgtagacggtcgtagtgtttttcgtcgtcggtgagagaggggcggttacggtgtagacggtcgtagtgtttttcgtcgtcggtgagagggggcggttacggtgtagagggtcgtagtgtttttcgtcgtcggtgagagggggcggttacggtgtagacggtcgtagtgtttttcgtcgtcggtgagagggggcggttacggtgtcgacggtcgtagtgtttttcgtcgtcggtgagagggggcggttacggtgtagacggtcgtagtgtttttcgtggtcggtgagagggggcggttacggtgtagacggtcgtagtgtttttcgtcgtcggtgagagggggcggttacggtgtagacggtcgtagtgtttttcgtcgtcggtgagagggggcggttacggtgtagacggtcgtagtgtttttcgtcgtcggtgagagggggcggttacggtgtagacggtcgtagtgtttttcgtggtcggtgagagggggcggttacggtgtagacggtcgtagtgtttttcgtggtcggtgagaaggggcggttacggtgtagacggtcgtagtgtttttcgtggtcggtgagagggggcggttacggtgtagacggtcgtagtgtttttcgtcgtcggtgagagggggcggttacggtgtagacggtcgtagtgtttttcgtcgtcggtgagagggggcggttacggtgtagacggtcgtagtgtttttcgtcgtcggtgagagggggcggttacggtgtagacggtcgtagtgtttttcgtggtcggtgagagggggcggttacggtgtagacggtcgtagtgttt

SEQ ID NO: 29004 - DNA, 1661 bp, Artificial Sequence
  chemically treated genomic DNA (Homo sapiens) CpG-island No: 29004
aaacactacgaccgtctacaccgtaaccgccccctctcaccgaccacgaaaaacactacgaccgtctacaccgtaaccgccccctctcaccgacgacgaaaaacactacgaccgtctacaccgtaaccgccccctctcaccgacgacgaaaaacactacgaccgtctacaccgtaaccgccccctctcaccgacgacgaaaaacactacgaccgtctacaccgtaaccgccccctctcaccgaccacgaaaaacactacgaccgtctacaccgtaaccgccccttctcaccgaccacgaaaaacactacgaccgtctacaccgtaaccgccccctctcaccgaccacgaaaaacactacgaccgtctacaccgtaaccgccccctctcaccgacgacgaaaaacactacgaccgtctacaccgtaaccgccccctctcaccgacgacgaaaaacactacgaccgtctacaccgtaaccgccccctctcaccgacgacgaaaaacactacgaccgtctacaccgtaaccgccccctctcaccgaccacgaaaaacactacgaccgtctacaccgtaaccgccccctctcaccgacgacgaaaaacactacgaccgtcgacaccgtaaccgccccctctcaccgacgacgaaaaacactacgaccgtctacaccgtaaccgccccctctcaccgacgacgaaaaacactacgaccctctacaccgtaaccgccccctctcaccgacgacgaaaaacactacgaccgtctacaccgtaaccgcccctctctcaccgacgacgaaaaacactacgaccgtctacaccgtaaccgccccctctcaccgaccacgaaaaacactacgaccgtctacaccgtaaccgccccctctcaccgacgacgaaaaacactacgaccgtctacaccgtaaccgccccttctcaccgaccacgaaaaacactacgaccgtctacaccgtaaccgccccctctcaccgaccacgaaaaacactacgaccgtctacaccgtaaccgccccctctcaccgacgacgaaaaacactacgaccgtctacaccgtaaccgccccttctcaccgaccacgaaaaacactacgaccgtctacaccgtaaccgccccttctcactaacgataaaaaacattacgactatatacaccgtaaccgccccttctcaccgacgacgaaaaacactacgaccgtctacaccgtaaccgccccttctcactaacgataaaaaacactacgaccgtctacaccgtaaccgccccttctcaccgacgacgaaaaacactacgactatctacaccgtaaccgccccttctcaccgacgacgaaaaacactacgaccgtctacaccgtaaccgccccttctcactaacgataaaaaacattacgactatatacaccgtaaccgccccttctcaccaacgataaaaaacactacgactatctacaccgtaaccgccccttctcaccgacgataaaaaacattacgactatatacaccgtaaccgccccttctcaccgacgacgaaaaacactacgaccgtctacaccgtaaccgccccttctcaccaacgataaaaaacatcgcgactatctacaccataaaaaccccttctcactaacaataaaaaacattcaa

SEQ ID NO: 29005 - DNA, 847 bp, Artificial Sequence
  chemically treated genomic DNA (Homo sapiens) CpG-island No: 29005
ttgtatcgtggtcgtttttttttatcgatgacgaggagtattgcgatcgtttgtatcgtggtcgtttttttttatcgacgacgaagagtattgcgatcgtttgtattatggtcgtttttttttattgacgacgaggagtattgcgattgtttgtatcgtggtcgtttttttttatcgacgacgaggagtattgcgattgtttgtatcgtggtcgtttttttttatcgacgatgaggagtattgcgattgtttgtattatggtcgtttttttttatcgacgatgagtagtattgcgattgtttggatcgtgggagtttttttttatcgacgatgaggagtattgcgatcgtttgtatcgtggtcgtttttttttatcgacgacgaggagtattgcgattgtttgtatcgtggtcgtttttttttattgacgacgaggagtattgcgattgtttgtatcgtggtcgtttttttttattaacgatgaggagtattgcgattgtttgtattatggtcgtttttttttatcgacgatgagttgtattgcgattgtttggatcgtgggagtttttttttatcgacgacgaggagtattgcgattgtttgtatcgtggtcgtttttttttatcgacgacgaggagtattgcgattatttgtatcgtggtcgtttttttttatcgacgacgaggagtattgcgattgtttgtatcgtggtcgtttttttttattgacgatgaggagtattgcgattgtttgtatcgtggtcgttttttttgattgatgataaggaatattgcgattgtttgtatcgtggttgtttttttttattaacgttgaggagtattgtaat

SEQ ID NO: 29006 - DNA, 847 bp, Artificial Sequence
  chemically treated genomic DNA (Homo sapiens) CpG-island No: 29006
attacaatactcctcaacgttaataaaaaaaaacaaccacgatacaaacaatcgcaatattccttatcatcaatcaaaaaaaacgaccacgatacaaacaatcgcaatactcctcatcgtcaataaaaaaaaacgaccacgatacaaacaatcgcaatactcctcgtcgtcgataaaaaaaaacgaccacgatacaaataatcgcaatactcctcgtcgtcgataaaaaaaaacgaccacgatacaaacaatcgcaatactcctcgtcgtcgataaaaaaaaactcccacgatccaaacaatcgcaatacaactcatcgtcgataaaaaaaaacgaccataatacaaacaatcgcaatactcctcatcgttaataaaaaaaaacgaccacgatacaaacaatcgcaatactcctcgtcgtcaataaaaaaaaacgaccacgatacaaacaatcgcaatactcctcgtcgtcgataaaaaaaaacgaccacgatacaaacgatcgcaatactcctcatcgtcgataaaaaaaaactcccacgatccaaacaatcgcaatactactcatcgtcgataaaaaaaaacgaccataatacaaacaatcgcaatactcctcatcgtcgataaaaaaaaacgaccacgatacaaacaatcgcaatactcctcgtcgtcgataaaaaaaaacgaccacgatacaaacaatcgcaatactcctcgtcgtcaataaaaaaaaacgaccataatacaaacgatcgcaatactcttcgtcgtcgataaaaaaaaacgaccacgatacaaacgatcgcaatactcctcgtcatcgataaaaaaaaacgaccacgatacaa

SEQ ID NO: 29007 - DNA, 847 bp, Artificial Sequence
  chemically treated genomic DNA (Homo sapiens) CpG-island No: 29007
gttgtagtgttttttagcgttggtgagaaggggtagttacggtgtagatagtcgtaatgttttttattattagttagaaagggcggttacggtgtagatagtcgtagtgttttttatcgttagtgagaaggggcggttacggtgtagatagtcgtagtgtttttcgtcgtcggtgagagggggcggttacggtgtagatggtcgtagtgtttttcgtcgtcggtgagagggggcggttacggtgtagatagtcgtagtgtttttcgtcgtcggtgagaaggggtttttacgatttagatagtcgtagtgtaatttatcgtcggtgagaaggggcggttatggtgtagatagtcgtagtgttttttatcgttggtgagaaggggcggttacggtgtagatagtcgtagtgtttttcgtcgttagtgagaaggggcggttacggtgtagatagtcgtagtgtttttcgtcgtcggtgagaaggggcggttacggtgtagacggtcgtagtgttttttatcgtcggtgagaaggggtttttacgatttagatagtcgtagtgttatttatcgtcggtgagaaggggcggttatggtgtagatagtcgtagtgttttttatcgtcggtgagaaggggcggttacggtgtagatagtcgtagtgtttttcgtcgtcggtgagaaggggcggttacggtgtagatagtcgtagtgtttttcgtcgttagtgagaaggggcggttatggtgtagacggtcgtagtgtttttcgtcgtcggtgagaaggggcggttacggtgtagacggtcgtagtgtttttcgttatcggtgagaaggggcggttacggtgtag

SEQ ID NO: 29008 - DNA, 847 bp, Artificial Sequence
  chemically treated genomic DNA (Homo sapiens) CpG-island No: 29008
ctacaccgtaaccgccccttctcaccgataacgaaaaacactacgaccgtctacaccgtaaccgccccttctcaccgacgacgaaaaacactacgaccgtctacaccataaccgccccttctcactaacgacgaaaaacactacgactatctacaccgtaaccgccccttctcaccgacgacgaaaaacactacgactatctacaccgtaaccgccccttctcaccgacgataaaaaacactacgactatctacaccataaccgccccttctcaccgacgataaataacactacgactatctaaatcgtaaaaaccccttctcaccgacgataaaaaacactacgaccgtctacaccgtaaccgccccttctcaccgacgacgaaaaacactacgactatctacaccgtaaccgccccttctcactaacgacgaaaaacactacgactatctacaccgtaaccgccccttctcaccaacgataaaaaacactacgactatctacaccataaccgccccttctcaccgacgataaattacactacgactatctaaatcgtaaaaaccccttctcaccgacgacgaaaaacactacgactatctacaccgtaaccgccccctctcaccgacgacgaaaaacactacgaccatctacaccgtaaccgccccctctcaccgacgacgaaaaacactacgactatctacaccgtaaccgccccttctcactaacgataaaaaacactacgactatctacaccgtaaccgccctttctaactaataataaaaaacattacgactatctacaccgtaactaccccttctcaccaacgctaaaaaacactacaac

SEQ ID NO: 29009 - DNA, 527 bp, Artificial Sequence
  chemically treated genomic DNA (Homo sapiens) CpG-island No: 29009
atagcggcgcgagataggggtagaacgatgaggcgtcggagttagttcgtcggtgcgggtgcgggtgcgcggcgcgtcgcggtttttttttcgcgacgcgtcgggtggttacgtgacggtcgcgcgcgttttcggtagttgcgggtttcgaggttagagagaaaagattgcgaggtggtcgtagttgtggtcggagaggtgggagtcggagcgaggttttttcgggggagtagggtgaacgtcggttattttaggatttttattcggggagaggaggtatagttcgcggtgttatttttagtcgtaacgtatttcgggtcggttttgcgttcggggtttgagaggggcggcggcggggttaggggtcggtacgtagatggacgtttttgggttggcgcggtttcggttgttcgcgtagaggcgggatgggatagtttagtttttttcgttattttcgttttggttgttggggtaggtaagacgatcgtgatagtttttgcgttgttcgagggcgtcgtagtttttgt

SEQ ID NO: 29010 - DNA, 527 bp, Artificial Sequence
  chemically treated genomic DNA (Homo sapiens) CpG-island No: 29010
acaaaaactacgacgccctcgaacaacgcaaaaactatcacgatcgtcttacctaccccaacaaccaaaacgaaaataacgaaaaaaactaaactatcccatcccgcctctacgcgaacaaccgaaaccgcgccaacccaaaaacgtccatctacgtaccgacccctaaccccgccgccgcccctctcaaaccccgaacgcaaaaccgacccgaaatacgttacgactaaaaataacaccgcgaactatacctcctctccccgaataaaaatcctaaaataaccgacgttcaccctactcccccgaaaaaacctcgctccgactcccacctctccgaccacaactacgaccacctcgcaatcttttctctctaacctcgaaacccgcaactaccgaaaacgcgcgcgaccgtcacgtaaccacccgacgcgtcgcgaaaaaaaaaccgcgacgcgccgcgcacccgcacccgcaccgacgaactaactccgacgcctcatcgttctacccctatctcgcgccgctat

SEQ ID NO: 29011 - DNA, 527 bp, Artificial Sequence
  chemically treated genomic DNA (Homo sapiens) CpG-island No: 29011
gtaggggttgcggcgttttcgggtagcgtaggggttgttacggtcgttttgtttgttttagtagttaaggcgggggtggcggaaagggttgaattgttttatttcgtttttgcgcggatagtcggggtcgcgttagtttaagggcgtttatttacgtatcggtttttgatttcgtcgtcgttttttttaggtttcgagcgtaaggtcgattcggagtacgttgcggttggaggtgatatcgcgagttatgtttttttttttcgagtgaggattttagagtggtcggcgtttattttgttttttcgagagggtttcgtttcgatttttattttttcggttatagttgcggttatttcgtagttttttttttttggtttcggagttcgtagttgtcgggaacgcgcgcggtcgttacgtgattattcggcgcgtcgcggaggaggggtcgcgacgcgtcgcgtattcgtattcgtatcggcgagttaatttcggcgttttatcgttttgtttttgtttcgcgtcgttgt

SEQ ID NO: 29012 - DNA, 527 bp, Artificial Sequence
  chemically treated genomic DNA (Homo sapiens) CpG-island No: 29012
acaacgacgcgaaacaaaaacaaaacgataaaacgccgaaattaactcgccgatacgaatacgaatacgcgacgcgtcgcgacccctcctccgcgacgcgccgaataatcacgtaacgaccgcgcgcgttcccgacaactacgaactccgaaaccaaaaaaaaaaaactacgaaataaccgcaactataaccgaaaaaataaaaatcgaaacgaaaccctctcgaaaaaacaaaataaacgccgaccactctaaaatcctcactcgaaaaaaaaaaacataactcgcgatatcacctccaaccgcaacgtactccgaatcgaccttacgctcgaaacctaaaaaaaacgacgacgaaatcaaaaaccgatacgtaaataaacgcccttaaactaacgcgaccccgactatccgcgcaaaaacgaaataaaacaattcaaccctttccgccacccccgccttaactactaaaacaaacaaaacgaccgtaacaacccctacgctacccgaaaacgccgcaacccctac

SEQ ID NO: 29013 - DNA, 604 bp, Artificial Sequence
  chemically treated genomic DNA (Homo sapiens) CpG-island No: 29013
ttttcgtttttttttttcggtcggcgtatagtcggttcgtggcgttcggtatcgcgtttttacgtttagcgcggggtaggtttgcgcggcgtttgtaagggataagtcgcggagtcggggaggttcgtcgtttgggatacgtttggagaagcgagcggtatagtttattttacggcgatattttaggatttttttattgataatattaaattgaagcgttaagattaatttttacgattatttatcgtcgtaggttacggtggtgattttttttttcgtttttttatatacgttttttcgttttgcgtgtttttgttttcgtttttttcgggattatcgtgcgtttttgtttttcgtttttgtaggtttttttttttttttcgcgtttttttttttattattttacgtttttttttttttttttcgggaattttatttcgtttttttgtcggttttcgtgatttcggaaatttcgtttttgtcgcgaggcgtttttcgtttcgcgttttttcgtgttacgagggagttagggtgggcggttttttattgtatttggtttttgaattttcgtttttgtagtataaaggtagggttgggaaaggag

SEQ ID NO: 29014 - DNA, 604 bp, Artificial Sequence
  chemically treated genomic DNA (Homo sapiens) CpG-island No: 29014
ctcctttcccaaccctacctttatactacaaaaacgaaaattcaaaaaccaaatacaataaaaaaccgcccaccctaactccctcgtaacacgaaaaaacgcgaaacgaaaaacgcctcgcgacaaaaacgaaatttccgaaatcacgaaaaccgacaaaaaaacgaaataaaattcccgaaaaaaaaaaaaaaaaacgtaaaataataaaaaaaaaaacgcgaaaaaaaaaaaaaaacctacaaaaacgaaaaacaaaaacgcacgataatcccgaaaaaaacgaaaacaaaaacacgcaaaacgaaaaaacgtatataaaaaaacgaaaaaaaaaatcaccaccgtaacctacgacgataaataatcgtaaaaattaatcttaacgcttcaatttaatattatcaataaaaaaatcctaaaatatcgccgtaaaataaactataccgctcgcttctccaaacgtatcccaaacgacgaacctccccgactccgcgacttatcccttacaaacgccgcgcaaacctaccccgcgctaaacgtaaaaacgcgataccgaacgccacgaaccgactatacgccgaccgaaaaaaaaaaacgaaaa

SEQ ID NO: 29015 - DNA, 604 bp, Artificial Sequence
  chemically treated genomic DNA (Homo sapiens) CpG-island No: 29015
ttttttttttagttttatttttgtgttgtaaaagcgaaaatttaaaagttaagtataataggagatcgtttattttggttttttcgtgatacgagggagcgcgaagcggagggcgtttcgcggtaggagcgggattttcggggttacgggaatcggtaggggaacgggataaagttttcggagaaaggaaaggagagcgtgggatagtaaaagagaagacgcggagaagaggagaggatttataagaacggaggataggggcgtacgatggtttcggggggagcggaaataaaggtacgtaaaacggaaaagcgtgtgtaggggagcggaaaaggaagttattatcgtggtttgcgacggtaagtggtcgtaagggttggttttagcgttttagtttagtgttgttagtgggagaattttaaaatgtcgtcgtggaatggattgtatcgttcgtttttttaaacgtgttttagacggcgagttttttcggtttcgcggtttgttttttgtaagcgtcgcgtaggtttgtttcgcgttggacgtggagacgcggtgtcgagcgttacgggtcggttgtgcgtcggtcggggaaagagggcgaggg

SEQ ID NO: 29016 - DNA, 604 bp, Artificial Sequence
  chemically treated genomic DNA (Homo sapiens) CpG-island No: 29016
ccctcgccctctttccccgaccgacgcacaaccgacccgtaacgctcgacaccgcgtctccacgtccaacgcgaaacaaacctacgcgacgcttacaaaaaacaaaccgcgaaaccgaaaaaactcgccgtctaaaacacgtttaaaaaaacgaacgatacaatccattccacgacgacattttaaaattctcccactaacaacactaaactaaaacgctaaaaccaacccttacgaccacttaccgtcgcaaaccacgataataacttccttttccgctcccctacacacgcttttccgttttacgtacctttatttccgctccccccgaaaccatcgtacgcccctatcctccgttcttataaatcctctcctcttctccgcgtcttctcttttactatcccacgctctcctttcctttctccgaaaactttatcccgttcccctaccgattcccgtaaccccgaaaatcccgctcctaccgcgaaacgccctccgcttcgcgctccctcgtatcacgaaaaaaccaaaataaacgatctcctattatacttaacttttaaattttcgcttttacaacacaaaaataaaactaaaaaaaaaa

SEQ ID NO: 29017 - DNA, 882 bp, Artificial Sequence
  chemically treated genomic DNA (Homo sapiens) CpG-island No: 29017
tatcgtcgcgggatttttagtggtcgttaagatcggtttcgtagtcgttataattttagtttcgggcgttattttttgttcggtagttgtgtgtttagtattgcgtttgcgcgggggtggggtgagtagggagacgttttcggttaaagggtagagttcgcgttatttttgagggagtcggattcgggatcggtcgagagtgtgcggagtttatttgtattagcgaagcgtttgcggtagtcggaagcgaaagtttttggtttttttgcgtttaggtcggcgcgcgagtattcggaagtcgtttgcgggttttcggaagcggcgttttttagcgttttcgagtcgtatgaggcggttgttgttttcgcggtgcgggagggcgagttgcgcgtggtttgggtttttttcgaatggtggcgtttttgagcgttagttcgaggaggagtcggaggaggagtttgaatgtttggagatagattttaagtttcggattttattcgtgcgtcgtttcggtttgtaggtgatttttgcgtgcgggcgttttttttgattgattttgatgagttgtagttttgatggtttttttttcgggaatgattagggtgacggttggtcggggttcgttcgagtggcgttcggtcggtggtgattcgaataggagagcgggacggcgattattttttcgggaggggtttatttggagaaagttttttcgtttggttaaattaggagggcgatagtatcggttttattgcgacgatgataaagtataatatatcgtttggcgcgaaggagatgttcgagaattttttgttgttgttatttttcgcgtgtttttcgaaattaagggaaatgcggttttgtgggttttgttaacgttag

SEQ ID NO: 29018 - DNA, 882 bp, Artificial Sequence
  chemically treated genomic DNA (Homo sapiens) CpG-island No: 29018
ctaacgttaacaaaacccacaaaaccgcatttcccttaatttcgaaaaacacgcgaaaaataacaacaacaaaaaattctcgaacatctccttcgcgccaaacgatatattatactttatcatcgtcgcaataaaaccgatactatcgccctcctaatttaaccaaacgaaaaaactttctccaaataaacccctcccgaaaaaataatcgccgtcccgctctcctattcgaatcaccaccgaccgaacgccactcgaacgaaccccgaccaaccgtcaccctaatcattcccgaaaaaaaaaccatcaaaactacaactcatcaaaatcaatcaaaaaaaacgcccgcacgcaaaaatcacctacaaaccgaaacgacgcacgaataaaatccgaaacttaaaatctatctccaaacattcaaactcctcctccgactcctcctcgaactaacgctcaaaaacgccaccattcgaaaaaaacccaaaccacgcgcaactcgccctcccgcaccgcgaaaacaacaaccgcctcatacgactcgaaaacgctaaaaaacgccgcttccgaaaacccgcaaacgacttccgaatactcgcgcgccgacctaaacgcaaaaaaaccaaaaactttcgcttccgactaccgcaaacgcttcgctaatacaaataaactccgcacactctcgaccgatcccgaatccgactccctcaaaaataacgcgaactctaccctttaaccgaaaacgtctccctactcaccccacccccgcgcaaacgcaatactaaacacacaactaccgaacaaaaaataacgcccgaaactaaaattataacgactacgaaaccgatcttaacgaccactaaaaatcccgcgacgata

SEQ ID NO: 29019 - DNA, 882 bp, Artificial Sequence
  chemically treated genomic DNA (Homo sapiens) CpG-island No: 29019
ttgacgttaatagaatttatagagtcgtattttttttggtttcggaggatacgcgaaaaataataatagtaaagggttttcgagtatttttttcgcgttagacggtgtgttgtattttgttatcgtcgtagtaaggtcggtgttatcgtttttttagtttgattaagcgagaggattttttttagatgggtttttttcgagagaatggtcgtcgtttcgtttttttgttcgggttattatcggtcgggcgttattcgaacgagtttcggttagtcgttattttaattattttcgaaggaggggttattagagttatagtttattagggttaattagaaggggcgttcgtacgtaaaggttatttgtaaatcgaagcggcgtacggataaggttcgggatttgaagtttatttttaaatatttaggtttttttttcgattttttttcgaattggcgtttagaggcgttattattcggaaggagtttaggttacgcgtagttcgttttttcgtatcgcgagggtagtagtcgttttatgcgattcgagaacgttagagggcgtcgttttcgggagttcgtaagcggttttcgggtgttcgcgcgtcgatttggacgtagagaagttagagattttcgttttcggttgtcgtaggcgtttcgttggtgtaggtaagtttcgtatattttcggtcggtttcgagttcgatttttttaagggtgacgcgagttttgttttttaatcggaaacgtttttttgtttattttattttcgcgtagacgtagtgttgagtatatagttatcggataaagagtgacgttcggagttggagttatggcggttacggagtcgattttggcggttattgggagtttcgcggcggtg

SEQ ID NO: 29020 - DNA, 882 bp, Artificial Sequence
  chemically treated genomic DNA (Homo sapiens) CpG-island No: 29020
caccgccgcgaaactcccaataaccgccaaaatcgactccgtaaccgccataactccaactccgaacgtcactctttatccgataactatatactcaacactacgtctacgcgaaaataaaataaacaaaaaaacgtttccgattaaaaaacaaaactcgcgtcacccttaaaaaaatcgaactcgaaaccgaccgaaaatatacgaaacttacctacaccaacgaaacgcctacgacaaccgaaaacgaaaatctctaacttctctacgtccaaatcgacgcgcgaacacccgaaaaccgcttacgaactcccgaaaacgacgccctctaacgttctcgaatcgcataaaacgactactaccctcgcgatacgaaaaaacgaactacgcgtaacctaaactccttccgaataataacgcctctaaacgccaattcgaaaaaaaatcgaaaaaaaaacctaaatatttaaaaataaacttcaaatcccgaaccttatccgtacgccgcttcgatttacaaataacctttacgtacgaacgccccttctaattaaccctaataaactataactctaataacccctccttcgaaaataattaaaataacgactaaccgaaactcgttcgaataacgcccgaccgataataacccgaacaaaaaaacgaaacgacgaccattctctcgaaaaaaacccatctaaaaaaaatcctctcgcttaatcaaactaaaaaaacgataacaccgaccttactacgacgataacaaaatacaacacaccgtctaacgcgaaaaaaatactcgaaaaccctttactattattatttttcgcgtatcctccgaaaccaaaaaaaatacgactctataaattctattaacgtcaa

SEQ ID NO: 29021 - DNA, 528 bp, Artificial Sequence
  chemically treated genomic DNA (Homo sapiens) CpG-island No: 29021
gaggacgcggagggtgagtaagggagggtaggggcgagggtggattgggggtttcgcgcggtttgggggtgggagagagggaacgtttttgtcgtttggtttgggttcgaattttgtttcggtttttgtgtttttaaagggaatgcgtaagtttcgcgtttgtgataagtgaggttggatttttttttttttgaggtgaaggatgttcggaggttttcgtaggacggcgtagaaacgggttttttgtttaatagatgcgcgttttttttattttttttttttagaatttcgttgtttttataattatttgtggtcggcgtcgtcgcggtgttattgcgatgtcgaggcgaatggggtggggggaagcgttcgcggggcggggagggattttgtaggcgcggattttatatttagtttttggttagcgttattcggtttgttgtgttttcgtaggtcgtagttttattgtttgatgttttcgggaagtattttgaagttatcgtggttgtggattggggaattttttgt

SEQ ID NO: 29022 - DNA, 528 bp, Artificial Sequence
  chemically treated genomic DNA (Homo sapiens) CpG-island No: 29022
acaaaaaattccccaatccacaaccacgataacttcaaaatacttcccgaaaacatcaaacaataaaactacgacctacgaaaacacaacaaaccgaataacgctaaccaaaaactaaatataaaatccgcgcctacaaaatccctccccgccccgcgaacgcttccccccaccccattcgcctcgacatcgcaataacaccgcgacgacgccgaccacaaataattataaaaacaacgaaattctaaaaaaaaaaaataaaaaaaacgcgcatctattaaacaaaaaacccgtttctacgccgtcctacgaaaacctccgaacatccttcacctcaaaaaaaaaaaaatccaacctcacttatcacaaacgcgaaacttacgcattccctttaaaaacacaaaaaccgaaacaaaattcgaacccaaaccaaacgacaaaaacgttccctctctcccacccccaaaccgcgcgaaacccccaatccaccctcgcccctaccctcccttactcaccctccgcgtcctc

SEQ ID NO: 29023 - DNA, 528 bp, Artificial Sequence
  chemically treated genomic DNA (Homo sapiens) CpG-island No: 29023
ataagaaattttttaatttatagttacgatgattttaaaatatttttcgaagatattaggtaatgaagttgcgatttgcgaggatatagtaagtcgagtgacgttggttagaggttgggtgtggagttcgcgtttgtagggttttttttcgtttcgcgggcgtttttttttattttattcgtttcggtatcgtagtgatatcgcggcgacgtcgattataggtggttgtgaggatagcgagattttgaggggaaagaatgagagaagcgcgtatttattgggtagaaggttcgtttttgcgtcgttttgcggaggttttcgggtattttttattttagggaagagaaaatttaattttatttgttataggcgcgggatttgcgtattttttttgggagtataagaatcgaggtaggattcggatttaggttaggcggtaaaggcgtttttttttttttatttttaggtcgcgcggaatttttagtttattttcgtttttgtttttttttatttatttttcgcgttttt

SEQ ID NO: 29024 - DNA, 528 bp, Artificial Sequence
  chemically treated genomic DNA (Homo sapiens) CpG-island No: 29024
aaaaacgcgaaaaataaataaaaaaaaacaaaaacgaaaataaactaaaaattccgcgcgacctaaaaataaaaaaaaaaaaacgcctttaccgcctaacctaaatccgaatcctacctcgattcttatactcccaaaaaaaatacgcaaatcccgcgcctataacaaataaaattaaattttctcttccctaaaataaaaaatacccgaaaacctccgcaaaacgacgcaaaaacgaaccttctacccaataaatacgcgcttctctcattctttcccctcaaaatctcgctatcctcacaaccacctataatcgacgtcgccgcgatatcactacgataccgaaacgaataaaataaaaaaaaacgcccgcgaaacgaaaaaaaaccctacaaacgcgaactccacacccaacctctaaccaacgtcactcgacttactatatcctcgcaaatcgcaacttcattacctaatatcttcgaaaaatattttaaaatcatcgtaactataaattaaaaaatttcttat

SEQ ID NO: 29025 - DNA, 1215 bp, Artificial Sequence
  chemically treated genomic DNA (Homo sapiens) CpG-island No: 29025
aatatcgcgtttagggattacgtagttttggttttagtattcggagatgcgggtaggaaatgaatatcgcgtttagggagtacgtagttttggttttagtattcggggatgcgggtaggaaatgaatatcgcgtttagggagtacgtagttttggttttagtattcggggatgcgggtaggaaatgaatatcgcgtttagggagtacgtagttttggttttagtattcggggatgcggggaggaaatgaatatcgcgtttagggagtatatagttttggtttcggtattcggggatgcggggaggaagtgaatatcgcgtttagggagtacgtagttttggttttagtattcggggatgcggggaggaaatgaatatcgcgtttagggagtacgtagttttggtttcggtattcggggatgcggggaggaagtgaatatcgcgtttagggagtacgtagttttggttttagtattcggggatgcggggaggaaatgaatatcgcgtttagggagtacgtagttttggtttcggtattcggggatgcggggaggaaatgaatatcgcgtttagggagtatatagttttggtttcggtattcggggatgcggggagaaagtgaatattgcgtttagggagtacgtagttttggtttcggtattcggggatgcggggaggaagtgaatatcgcgtttagggattacgtagttttggtttcggtattcggagatgcggggaggaaatgaatatcgcgtttagggagtacgtagttttggtttcggtattcggggatgcggggaggaaatgaatatcgcgtttagggagtacgtagttttggtttcggtattcggggatgcggggaggaaatgaatatcgcgtttagggagtacgtagttttggtttcggtattcggggatgcggggaggaagtgaatatcgcgtttagggagtacgtagttttggtttcggtattcggggatgcggggaggaagtgaatatcgcgtttagggagtacgtagttttggttttcgtattcggggatgcggggaggaaatgaatatcgcgtttagggagtacgtagttttggttttagtatttagggatgcggggagaaagtgaatattgcgtttagtgaataaataaatgaggatttaacgtcggaaatattagtttttttcggtagggtatttttatgagtttttaggaaatttattttg

SEQ ID NO: 29026 - DNA, 1215 bp, Artificial Sequence
  chemically treated genomic DNA (Homo sapiens) CpG-island No: 29026
caaaataaatttcctaaaaactcataaaaataccctaccgaaaaaaactaatatttccgacgttaaatcctcatttatttattcactaaacgcaatattcactttctccccgcatccctaaatactaaaaccaaaactacgtactccctaaacgcgatattcatttcctccccgcatccccgaatacgaaaaccaaaactacgtactccctaaacgcgatattcacttcctccccgcatccccgaataccgaaaccaaaactacgtactccctaaacgcgatattcacttcctccccgcatccccgaataccgaaaccaaaactacgtactccctaaacgcgatattcatttcctccccgcatccccgaataccgaaaccaaaactacgtactccctaaacgcgatattcatttcctccccgcatccccgaataccgaaaccaaaactacgtactccctaaacgcgatattcatttcctccccgcatctccgaataccgaaaccaaaactacgtaatccctaaacgcgatattcacttcctccccgcatccccgaataccgaaaccaaaactacgtactccctaaacgcaatattcactttctccccgcatccccgaataccgaaaccaaaactatatactccctaaacgcgatattcatttcctccccgcatccccgaataccgaaaccaaaactacgtactccctaaacgcgatattcatttcctccccgcatccccgaatactaaaaccaaaactacgtactccctaaacgcgatattcacttcctccccgcatccccgaataccgaaaccaaaactacgtactccctaaacgcgatattcatttcctccccgcatccccgaatactaaaaccaaaactacgtactccctaaacgcgatattcacttcctccccgcatccccgaataccgaaaccaaaactatatactccctaaacgcgatattcatttcctccccgcatccccgaatactaaaaccaaaactacgtactccctaaacgcgatattcatttcctacccgcatccccgaatactaaaaccaaaactacgtactccctaaacgcgatattcatttcctacccgcatccccgaatactaaaaccaaaactacgtactccctaaacgcgatattcatttcctacccgcatctccgaatactaaaaccaaaactacgtaatccctaaacgcgatatt

SEQ ID NO: 29027 - DNA, 1215 bp, Artificial Sequence
  chemically treated genomic DNA (Homo sapiens) CpG-island No: 29027
taggatggattttttggggatttatggaggtgttttgtcgagggagattgatgttttcgacgttgagtttttatttgtttgtttattgaacgtaatgtttatttttttttcgtatttttgggtgttgggattagggttgcgtgttttttgaacgcgatgtttatttttttttcgtattttcgggtgcggggattagggttgcgtgttttttgaacgcgatgtttatttttttttcgtattttcgggtgtcgggattagggttgcgtgttttttgaacgcgatgtttatttttttttcgtattttcgggtgtcgggattagggttgcgtgttttttgaacgcgatgtttatttttttttcgtattttcgggtgtcgggattagggttgcgtgttttttgaacgcgatgtttatttttttttcgtattttcgggtgtcgggattagggttgcgtgttttttgaacgcgatgtttatttttttttcgtattttcgggtgtcgggattagggttgcgtggtttttgaacgcgatgtttatttttttttcgtattttcgggtgtcgggattagggttgcgtgttttttgaacgtaatgtttatttttttttcgtattttcgggtgtcgggattagggttgtgtgttttttgaacgcgatgtttatttttttttcgtattttcgggtgtcgggattagggttgcgtgttttttgaacgcgatgtttatttttttttcgtattttcgggtgttgggattagggttgcgtgttttttgaacgcgatgtttatttttttttcgtattttcgggtgtcgggattagggttgcgtgttttttgaacgcgatgtttatttttttttcgtattttcgggtgttgggattagggttgcgtgttttttgaacgcgatgtttatttttttttcgtattttcgggtgtcgggattagggttgtgtgttttttgaacgcgatgtttatttttttttcgtattttcgggtgttgggattagggttgcgtgttttttgaacgcgatgtttattttttgttcgtattttcgggtgttgggattagggttgcgtgttttttgaacgcgatgtttattttttgttcgtattttcgggtgttgggattagggttgcgtgttttttgaacgcgatgtttattttttgttcgtattttcgggtgttgggattagggttgcgtggtttttgaacgcgatgtt

SEQ ID NO: 29028 - DNA, 1215 bp, Artificial Sequence
  chemically treated genomic DNA (Homo sapiens) CpG-island No: 29028
aacatcgcgttcaaaaaccacgcaaccctaatcccaacacccgaaaatacgaacaaaaaataaacatcgcgttcaaaaaacacgcaaccctaatcccaacacccgaaaatacgaacaaaaaataaacatcgcgttcaaaaaacacgcaaccctaatcccaacacccgaaaatacgaacaaaaaataaacatcgcgttcaaaaaacacgcaaccctaatcccaacacccgaaaatacgaaaaaaaaataaacatcgcgttcaaaaaacacacaaccctaatcccgacacccgaaaatacgaaaaaaaaataaacatcgcgttcaaaaaacacgcaaccctaatcccaacacccgaaaatacgaaaaaaaaataaacatcgcgttcaaaaaacacgcaaccctaatcccgacacccgaaaatacgaaaaaaaaataaacatcgcgttcaaaaaacacgcaaccctaatcccaacacccgaaaatacgaaaaaaaaataaacatcgcgttcaaaaaacacgcaaccctaatcccgacacccgaaaatacgaaaaaaaaataaacatcgcgttcaaaaaacacacaaccctaatcccgacacccgaaaatacgaaaaaaaaataaacattacgttcaaaaaacacgcaaccctaatcccgacacccgaaaatacgaaaaaaaaataaacatcgcgttcaaaaaccacgcaaccctaatcccgacacccgaaaatacgaaaaaaaaataaacatcgcgttcaaaaaacacgcaaccctaatcccgacacccgaaaatacgaaaaaaaaataaacatcgcgttcaaaaaacacgcaaccctaatcccgacacccgaaaatacgaaaaaaaaataaacatcgcgttcaaaaaacacgcaaccctaatcccgacacccgaaaatacgaaaaaaaaataaacatcgcgttcaaaaaacacgcaaccctaatcccgacacccgaaaatacgaaaaaaaaataaacatcgcgttcaaaaaacacgcaaccctaatccccgcacccgaaaatacgaaaaaaaaataaacatcgcgttcaaaaaacacgcaaccctaatcccaacacccaaaaatacgaaaaaaaaataaacattacgttcaataaacaaacaaataaaaactcaacgtcgaaaacatcaatctccctcgacaaaacacctccataaatccccaaaaaatccatccta

SEQ ID NO: 29029 - DNA, 697 bp, Artificial Sequence
  chemically treated genomic DNA (Homo sapiens) CpG-island No: 29029
gtattcgggttatttttcgaggaagaacgtagttttgtttttcggagcgtacgcgtagtttggttttgcgtttaggtcggttgaaaacgcggggcgttcggatttatttcgtttaaggaacgtgtcgttgagatttaggatttcgagcgtgattaggggcgcgttattttttttagcgaacgtcgtttcggcgatgtttttttgggtttcgcgatttagcgcggtgtaggagaggttgaggagttgtagcgcggggaagtaggcgaaggttcggggttgtagcgttcgtagcggattttcggcgagcgttagggcgcggaggttgtttagcgcgggttcggtgtacggcggtagagcggttagttggttgtagttgaggtttagggtgtgtagtttcgtcggtttattcgggttttagcgtagcgcggcgatgcggttgtggcgtagggttagtatttgtagttgttttaggtggtcgagttcggaagtgtttagggcgcgtagtaggttgtggttggcgtcgaggttgcgtagtgtgcgcggtaggtagtcgggtaggcgttttaggttgcggttcgttagggttaaggtcgtcgtattcgcggcgggtagtttttcgtagggcgagtcggtggcgttgttgttattgtttttttaggggttttgttgagtgattcggaagagcgggatttttttt

SEQ ID NO: 29030 - DNA, 697 bp, Artificial Sequence
  chemically treated genomic DNA (Homo sapiens) CpG-island No: 29030
aaaaaaaatcccgctcttccgaatcactcaacaaaacccctaaaaaaacaataacaacaacgccaccgactcgccctacgaaaaactacccgccgcgaatacgacgaccttaaccctaacgaaccgcaacctaaaacgcctacccgactacctaccgcgcacactacgcaacctcgacgccaaccacaacctactacgcgccctaaacacttccgaactcgaccacctaaaacaactacaaatactaaccctacgccacaaccgcatcgccgcgctacgctaaaacccgaataaaccgacgaaactacacaccctaaacctcaactacaaccaactaaccgctctaccgccgtacaccgaacccgcgctaaacaacctccgcgccctaacgctcgccgaaaatccgctacgaacgctacaaccccgaaccttcgcctacttccccgcgctacaactcctcaacctctcctacaccgcgctaaatcgcgaaacccaaaaaaacatcgccgaaacgacgttcgctaaaaaaaataacgcgcccctaatcacgctcgaaatcctaaatctcaacgacacgttccttaaacgaaataaatccgaacgccccgcgttttcaaccgacctaaacgcaaaaccaaactacgcgtacgctccgaaaaacaaaactacgttcttcctcgaaaaataacccgaatac

SEQ ID NO: 29031 - DNA, 697 bp, Artificial Sequence
  chemically treated genomic DNA (Homo sapiens) CpG-island No: 29031
ggagaaggtttcgttttttcgggttatttagtagggtttttgggggagtagtggtagtaacgttatcgattcgttttgcgaggggttgttcgtcgcggatgcgacggttttgattttggcgaatcgtaatttggagcgtttgttcggttgtttatcgcgtatattgcgtagtttcgacgttagttataatttgttgcgcgttttgagtattttcgagttcggttatttggagtagttgtaggtgttgattttgcgttataatcgtatcgtcgcgttgcgttggggttcgggtgggtcggcggggttgtatattttggattttagttataattagttggtcgttttgtcgtcgtgtatcgggttcgcgttgagtagttttcgcgttttggcgttcgtcgggaattcgttgcgggcgttgtagtttcgggttttcgtttgttttttcgcgttgtagttttttaattttttttgtatcgcgttgggtcgcggagtttaggggggtatcgtcgaggcggcgttcgttggagaggatggcgcgtttttggttacgttcgaagttttggattttagcggtacgttttttgaacggggtgagttcgggcgtttcgcgtttttagtcggtttgagcgtagagttaggttgcgcgtgcgtttcggggggtagggttgcgttttttttcgaggggtgattcgggtgt

SEQ ID NO: 29032 - DNA, 697 bp, Artificial Sequence
  chemically treated genomic DNA (Homo sapiens) CpG-island No: 29032
acacccgaatcacccctcgaaaaaaaacgcaaccctaccccccgaaacgcacgcgcaacctaactctacgctcaaaccgactaaaaacgcgaaacgcccgaactcaccccgttcaaaaaacgtaccgctaaaatccaaaacttcgaacgtaaccaaaaacgcgccatcctctccaacgaacgccgcctcgacgatacccccctaaactccgcgacccaacgcgatacaaaaaaaattaaaaaactacaacgcgaaaaaacaaacgaaaacccgaaactacaacgcccgcaacgaattcccgacgaacgccaaaacgcgaaaactactcaacgcgaacccgatacacgacgacaaaacgaccaactaattataactaaaatccaaaatatacaaccccgccgacccacccgaaccccaacgcaacgcgacgatacgattataacgcaaaatcaacacctacaactactccaaataaccgaactcgaaaatactcaaaacgcgcaacaaattataactaacgtcgaaactacgcaatatacgcgataaacaaccgaacaaacgctccaaattacgattcgccaaaatcaaaaccgtcgcatccgcgacgaacaacccctcgcaaaacgaatcgataacgttactaccactactcccccaaaaaccctactaaataacccgaaaaaacgaaaccttctcc

SEQ ID NO: 29033 - DNA, 545 bp, Artificial Sequence
  chemically treated genomic DNA (Homo sapiens) CpG-island No: 29033
gtttttttggttcgatttcggagttcgttttcggttttttcggtaggttgggtcgggtaggtaggagttaagtcgcgttcgttttcgattcgtaggtggcgtcgttttgttttggtgttcggtttcgggcgtttcgaagtgcgggatagaatagtagcgagcgcggagtcgaagtttagtttcgatttgttgatttcgtttaggtagtcgtcgtcgtcgtcgtcgcgggagtaggaggaggaggaggtggaggaggtgtcgcgcggtcgcggttttgttttcgcgttttcggcgttcgtcggcgtttttcgtttcggagagcgcgtttcggtttcgcggcgtttgtagttcgggcgagttgtttgttcggtcggggtaggttcggtttagttcggtttcgggatcgtcgttgtttacgggcgggggcgttcgggcggtcgggacgatgcgcggtttttggttttaggaggcggtcgttttgggggtgagtgttggggcgtacggtttttcgtgggggtgtatggggatacggatagggggtttgt

SEQ ID NO: 29034 - DNA, 545 bp, Artificial Sequence
  chemically treated genomic DNA (Homo sapiens) CpG-island No: 29034
acaaaccccctatccgtatccccatacacccccacgaaaaaccgtacgccccaacactcacccccaaaacgaccgcctcctaaaaccaaaaaccgcgcatcgtcccgaccgcccgaacgcccccgcccgtaaacaacgacgatcccgaaaccgaactaaaccgaacctaccccgaccgaacaaacaactcgcccgaactacaaacgccgcgaaaccgaaacgcgctctccgaaacgaaaaacgccgacgaacgccgaaaacgcgaaaacaaaaccgcgaccgcgcgacacctcctccacctcctcctcctcctactcccgcgacgacgacgacgacgactacctaaacgaaatcaacaaatcgaaactaaacttcgactccgcgctcgctactattctatcccgcacttcgaaacgcccgaaaccgaacaccaaaacaaaacgacgccacctacgaatcgaaaacgaacgcgacttaactcctacctacccgacccaacctaccgaaaaaaccgaaaacgaactccgaaatcgaaccaaaaaaac

SEQ ID NO: 29035 - DNA, 545 bp, Artificial Sequence
  chemically treated genomic DNA (Homo sapiens) CpG-island No: 29035
gtaaattttttgttcgtgtttttatgtatttttacggaaggtcgtacgttttaatatttatttttagggcggtcgttttttggggttagggatcgcgtatcgtttcggtcgttcgggcgttttcgttcgtgggtagcggcggtttcggggtcgggttgagtcgggtttatttcggtcgggtaggtaattcgttcgggttgtaggcgtcgcggggtcggggcgcgtttttcgaggcggggggcgtcggcgggcgtcgggggcgcgggggtaggatcgcggtcgcgcggtattttttttatttttttttttttttgttttcgcggcggcggcggcggcggttgtttgggcgagattaataagtcggggttgagtttcggtttcgcgttcgttgttattttgtttcgtatttcggagcgttcggagtcgggtattaaggtaggacggcgttatttgcgggtcggaagcgagcgcggtttaatttttgtttgttcggtttagtttgtcggggaggtcgggggcgggtttcgggatcgggttaaggagat

SEQ ID NO: 29036 - DNA, 545 bp, Artificial Sequence
  chemically treated genomic DNA (Homo sapiens) CpG-island No: 29036
atctccttaacccgatcccgaaacccgcccccgacctccccgacaaactaaaccgaacaaacaaaaattaaaccgcgctcgcttccgacccgcaaataacgccgtcctaccttaatacccgactccgaacgctccgaaatacgaaacaaaataacaacgaacgcgaaaccgaaactcaaccccgacttattaatctcgcccaaacaaccgccgccgccgccgccgcgaaaacaaaaaaaaaaaaaaataaaaaaaataccgcgcgaccgcgatcctacccccgcgcccccgacgcccgccgacgccccccgcctcgaaaaacgcgccccgaccccgcgacgcctacaacccgaacgaattacctacccgaccgaaataaacccgactcaacccgaccccgaaaccgccgctacccacgaacgaaaacgcccgaacgaccgaaacgatacgcgatccctaaccccaaaaaacgaccgccctaaaaataaatattaaaacgtacgaccttccgtaaaaatacataaaaacacgaacaaaaaatttac

SEQ ID NO: 29037 - DNA, 861 bp, Artificial Sequence
  chemically treated genomic DNA (Homo sapiens) CpG-island No: 29037
ttagttttcggggttttatttcgatgaaagatttgcggcgttttcgtttttcggttcggtttaggtcgaaggtttcgcggggatttttttaagacgttttcggcgtcgtagcggttttttcgttttcgaggttgttcgggtcgtcgtaggtttcgcggttttcgttcgtcgtaatcgcggtttagtttttcgcgttttcgtcgtcgttttagttcgaatcgggttttcgtcgttttcgttagttagttttattttagaagcgaatcgtgggtagcgcgcgggatttcggggttttagtgcggttatcgttcgtcggtttcggtttcggtttcgttttcgttttttggttcgtagtagcggttcgttaggttttttcgttttttagttttttcgttcgtttttatcgttcgatttgggtgcggtttgcggcgttgtagtttaataacgcgtcgttttataggttaagtcgcgtagtattgtcgagtaacgtattttgcgattggcgggatttatgaggggcgggttttttgcgggtagggcgattggattcgttaggttcgtttcggggcgatttcgtcggggtttgcggaggtttagggtttcgcgcggagtatatttcggtcggtagtttcgggcgttaggttatggttttacggtggttaggtagattgcggcgagtttttgtcgggttcgttggatacggttttattgtgattgattttcgtcggaggggttgtcggagtttagggattttgttttttcgtcgtcgtttagcgtatttttttagtagacgggttttgtttcgcgtagtttcgttttgtgtagtttttaggtcgagttttggggttcgggtggggttaa

SEQ ID NO: 29038 - DNA, 861 bp, Artificial Sequence
  chemically treated genomic DNA (Homo sapiens) CpG-island No: 29038
ttaaccccacccgaaccccaaaactcgacctaaaaactacacaaaacgaaactacgcgaaacaaaacccgtctactaaaaaaatacgctaaacgacgacgaaaaaacaaaatccctaaactccgacaacccctccgacgaaaatcaatcacaataaaaccgtatccaacgaacccgacaaaaactcgccgcaatctacctaaccaccgtaaaaccataacctaacgcccgaaactaccgaccgaaatatactccgcgcgaaaccctaaacctccgcaaaccccgacgaaatcgccccgaaacgaacctaacgaatccaatcgccctacccgcaaaaaacccgcccctcataaatcccgccaatcgcaaaatacgttactcgacaatactacgcgacttaacctataaaacgacgcgttattaaactacaacgccgcaaaccgcacccaaatcgaacgataaaaacgaacgaaaaaactaaaaaacgaaaaaacctaacgaaccgctactacgaaccaaaaaacgaaaacgaaaccgaaaccgaaaccgacgaacgataaccgcactaaaaccccgaaatcccgcgcgctacccacgattcgcttctaaaataaaactaactaacgaaaacgacgaaaacccgattcgaactaaaacgacgacgaaaacgcgaaaaactaaaccgcgattacgacgaacgaaaaccgcgaaacctacgacgacccgaacaacctcgaaaacgaaaaaaccgctacgacgccgaaaacgtcttaaaaaaatccccgcgaaaccttcgacctaaaccgaaccgaaaaacgaaaacgccgcaaatctttcatcgaaataaaaccccgaaaactaa

SEQ ID NO: 29039 - DNA, 861 bp, Artificial Sequence
  chemically treated genomic DNA (Homo sapiens) CpG-island No: 29039
ttgattttattcgggttttaaaattcggtttggggattgtataaggcggggttacgcggggtagggttcgtttgttgggggagtgcgttgggcggcggcgggagggtagggtttttgggtttcgatagttttttcggcggaggttaattataatgaaatcgtgtttagcggattcggtaggggttcgtcgtagtttatttggttatcgtgaagttatgatttggcgttcgaagttgtcggtcggggtgtatttcgcgcgggattttgggttttcgtaggtttcggcggggtcgtttcgaggcgggtttggcgagtttaatcgttttgttcgtaggggattcgttttttatgggtttcgttaatcgtagggtacgttgttcggtagtgttgcgcggtttggtttatgggacggcgcgttgttgggttgtagcgtcgtaggtcgtatttaggtcgggcggtgggggcgagcggaggggttgaggggcggagaggtttggcgggtcgttgttgcgggttaggggacgggggcggagtcggagtcggagtcgacgggcggtggtcgtattgggatttcggaatttcgcgcgttgtttacgattcgtttttgaggtgaggttagttagcgggggcggcgggggttcggttcgggttgaggcggcggcgggggcgcggggaattgggtcgcggttgcggcgggcgggggtcgcggggtttgcggcggttcgggtagtttcgggggcggggaggtcgttgcggcgtcgagggcgttttggaggggttttcgcggggttttcggtttgggtcgagtcggggagcgagggcgtcgtagattttttatcgggataggatttcggggattag

SEQ ID NO: 29040 - DNA, 861 bp, Artificial Sequence
  chemically treated genomic DNA (Homo sapiens) CpG-island No: 29040
ctaatccccgaaatcctatcccgataaaaaatctacgacgccctcgctccccgactcgacccaaaccgaaaaccccgcgaaaacccctccaaaacgccctcgacgccgcaacgacctccccgcccccgaaactacccgaaccgccgcaaaccccgcgacccccgcccgccgcaaccgcgacccaattccccgcgcccccgccgccgcctcaacccgaaccgaacccccgccgcccccgctaactaacctcacctcaaaaacgaatcgtaaacaacgcgcgaaattccgaaatcccaatacgaccaccgcccgtcgactccgactccgactccgcccccgtcccctaacccgcaacaacgacccgccaaacctctccgcccctcaacccctccgctcgcccccaccgcccgacctaaatacgacctacgacgctacaacccaacaacgcgccgtcccataaaccaaaccgcgcaacactaccgaacaacgtaccctacgattaacgaaacccataaaaaacgaatcccctacgaacaaaacgattaaactcgccaaacccgcctcgaaacgaccccgccgaaacctacgaaaacccaaaatcccgcgcgaaatacaccccgaccgacaacttcgaacgccaaatcataacttcacgataaccaaataaactacgacgaacccctaccgaatccgctaaacacgatttcattataattaacctccgccgaaaaaactatcgaaacccaaaaaccctaccctcccgccgccgcccaacgcactcccccaacaaacgaaccctaccccgcgtaaccccgccttatacaatccccaaaccgaattttaaaacccgaataaaatcaa

SEQ ID NO: 29041 - DNA, 646 bp, Artificial Sequence
  chemically treated genomic DNA (Homo sapiens) CpG-island No: 29041
  unsure (3, 69, 78, 98, 111, 139, 151..152, 156..157, 163..164, 576)
  unsure (580)
agnggtggggtcgggcgagaaggggttgggcgggttgtcgtcgggcggggttgcgcggggaagggcggngttgcgcgnggggcggggttgcgtggggnagggcggggtcgngttgttgtgggtgggcggggcgtatcgnggaaagtttcgnnaagnncggtanncggcggggttcgggcgcggaagttgtcggcggtcgcgcggtttttcgggcgggtttatagttatgtttcgggattcggggtcgggcggttgggaggaggtttcgcgcgtagttgtcgcgttttgtattttgtattacgaggtcggatagcggttgcgtcgtttgtaggattagttcgttgttcgcgacgtttttatcgttcgttttcgcgttcgtttggtcgcgttggagggggacgtcgcgtcgtttttagtggacgcgttgttggagtaggttgcgcgttttcgggagtagttgcgaaggtaggagggcggcgtcgtcgaggtttagatgcgttaggtacgagggcgggtattagaggagttgcgggagcgagagtgcgtgtggcggtcgtcgggttttgggtgggtgancgancgggtttcgggttttgaggggttgagggggtattgggttttggggttgagttggtttcgggttttg

SEQ ID NO: 29042 - DNA, 646 bp, Artificial Sequence
  chemically treated genomic DNA (Homo sapiens) CpG-island No: 29042
  unsure (67, 71, 483..484, 490..491, 495..496, 508, 536, 549, 569)
  unsure (578, 644)
caaaacccgaaaccaactcaaccccaaaacccaataccccctcaacccctcaaaacccgaaacccgntcgntcacccacccaaaacccgacgaccgccacacgcactctcgctcccgcaactcctctaatacccgccctcgtacctaacgcatctaaacctcgacgacgccgccctcctaccttcgcaactactcccgaaaacgcgcaacctactccaacaacgcgtccactaaaaacgacgcgacgtccccctccaacgcgaccaaacgaacgcgaaaacgaacgataaaaacgtcgcgaacaacgaactaatcctacaaacgacgcaaccgctatccgacctcgtaatacaaaatacaaaacgcgacaactacgcgcgaaacctcctcccaaccgcccgaccccgaatcccgaaacataactataaacccgcccgaaaaaccgcgcgaccgccgacaacttccgcgcccgaaccccgccgnntaccgnncttnncgaaactttccncgatacgccccgcccacccacaacaacncgaccccgccctnccccacgcaaccccgccccncgcgcaacnccgcccttccccgcgcaaccccgcccgacgacaacccgcccaaccccttctcgcccgaccccaccnct

SEQ ID NO: 29043 - DNA, 646 bp, Artificial Sequence
  chemically treated genomic DNA (Homo sapiens) CpG-island No: 29043
  unsure (67, 71, 483..484, 490..491, 495..496, 508, 536, 549, 569)
  unsure (578, 644)
taggattcgaggttaatttaattttaggatttagtatttttttaattttttaggattcggggttcgntcgnttatttatttaggattcggcggtcgttatacgtattttcgttttcgtagtttttttggtattcgttttcgtatttggcgtatttgggtttcggcggcgtcgtttttttgttttcgtagttgttttcggaagcgcgtaatttgttttagtagcgcgtttattagggacggcgcggcgtttttttttagcgcggttaggcgggcgcggaggcgagcgatgagggcgtcgcgggtagcgagttggttttgtaggcggcgtagtcgttgttcggtttcgtggtatagggtgtagagcgcggtagttgcgcgcggggtttttttttagtcgttcgatttcgggtttcgggatatggttgtaggttcgttcgggaggtcgcgcggtcgtcggtaattttcgcgttcgggtttcgtcgnntgtcgnntttnncggaattttttncggtgcgtttcgtttatttataatagtncggtttcgttttnttttacgtagtttcgttttncgcgtagtntcgttttttttcgcgtagtttcgttcgacggtagttcgtttagttttttttcgttcggttttattntt

SEQ ID NO: 29044 - DNA, 646 bp, Artificial Sequence
  chemically treated genomic DNA (Homo sapiens) CpG-island No: 29044
  unsure (3, 69, 78, 98, 111, 139, 151..152, 156..157, 163..164, 576)
  unsure (580)
aanaataaaaccgaacgaaaaaaaactaaacgaactaccgtcgaacgaaactacgcgaaaaaaaacganactacgcgnaaaacgaaactacgtaaaanaaaacgaaaccgnactattataaataaacgaaacgcaccgnaaaaaattccgnnaaanncgacanncgacgaaacccgaacgcgaaaattaccgacgaccgcgcgacctcccgaacgaacctacaaccatatcccgaaacccgaaatcgaacgactaaaaaaaaaccccgcgcgcaactaccgcgctctacaccctataccacgaaaccgaacaacgactacgccgcctacaaaaccaactcgctacccgcgacgccctcatcgctcgcctccgcgcccgcctaaccgcgctaaaaaaaaacgccgcgccgtccctaataaacgcgctactaaaacaaattacgcgcttccgaaaacaactacgaaaacaaaaaaacgacgccgccgaaacccaaatacgccaaatacgaaaacgaataccaaaaaaactacgaaaacgaaaatacgtataacgaccgccgaatcctaaataaataancgancgaaccccgaatcctaaaaaattaaaaaaatactaaatcctaaaattaaattaacctcgaatccta

SEQ ID NO: 29045 - DNA, 568 bp, Artificial Sequence
  chemically treated genomic DNA (Homo sapiens) CpG-island No: 29045
gatatcgcgttaagggagagaggagagggtatcgagcgttcgttttttcgacgtggttcgtttcggttttacgacgtttcgtttttgttacgtttttttttcgttttatgtaggttttcgtttcgttttttataaagtcggttttcgtttcgttttttagcggcgtttcgtttttacggcgttttgtttcgttttttgtaggcggttcggcgcggtgtttattcgcggtgtatggtggggcggtttttttcggtaatttcggtcgaacggttatttagaggttgtgttgagttggcgtagcggtagtagtatgagtcggattttcgtatcggtcgtgtttttgtcgagtttcgattattacgagaggttgggttaattttagtacgggttgcgggataggtaagggtattggggcgggggtggggagtcggttcgcgtcgggggtttttcgcgtgttttgttttattttttttttcgttttttcgttcgaggtttttcggggtttaggttcgcgcgtaacgttttttaggtttttagtggggtttggaggatagtgtttattagagtt

SEQ ID NO: 29046 - DNA, 568 bp, Artificial Sequence
  chemically treated genomic DNA (Homo sapiens) CpG-island No: 29046
aactctaataaacactatcctccaaaccccactaaaaacctaaaaaacgttacgcgcgaacctaaaccccgaaaaacctcgaacgaaaaaacgaaaaaaaaaataaaacaaaacacgcgaaaaacccccgacgcgaaccgactccccacccccgccccaatacccttacctatcccgcaacccgtactaaaattaacccaacctctcgtaataatcgaaactcgacaaaaacacgaccgatacgaaaatccgactcatactactaccgctacgccaactcaacacaacctctaaataaccgttcgaccgaaattaccgaaaaaaaccgccccaccatacaccgcgaataaacaccgcgccgaaccgcctacaaaaaacgaaacaaaacgccgtaaaaacgaaacgccgctaaaaaacgaaacgaaaaccgactttataaaaaacgaaacgaaaacctacataaaacgaaaaaaaaacgtaacaaaaacgaaacgtcgtaaaaccgaaacgaaccacgtcgaaaaaacgaacgctcgataccctctcctctctcccttaacgcgatatc

SEQ ID NO: 29047 - DNA, 568 bp, Artificial Sequence
  chemically treated genomic DNA (Homo sapiens) CpG-island No: 29047
ggttttagtaaatattgttttttaggttttattgggagtttggggggcgttgcgcgcgggtttgggtttcggggaatttcggacgggggagcgggaaggaaaatggggtagggtacgcggaagattttcggcgcgggtcgattttttattttcgttttagtgtttttatttgtttcgtagttcgtgttggagttggtttagtttttcgtagtagtcgggattcgataggggtacggtcgatgcgagggttcggtttatgttgttgtcgttgcgttagtttagtatagtttttgggtggtcgttcggtcggggttgtcgaaggagatcgttttattatgtatcgcgggtaaatatcgcgtcgggtcgtttgtaggaggcggggtaagacgtcgtgggggcggggcgtcgttgagggacggggcggaagtcggttttgtggggggcgggacgaagatttgtatggggcggggaagaggcgtggtagaggcggggcgtcgtgaggtcggggcggattacgtcggaggggcgggcgttcggtgttttttttttttttttttgacgcggtgtt

SEQ ID NO: 29048 - DNA, 568 bp, Artificial Sequence
  chemically treated genomic DNA (Homo sapiens) CpG-island No: 29048
aacaccgcgtcaaaaaaaaaaaaaaaaaacaccgaacgcccgcccctccgacgtaatccgccccgacctcacgacgccccgcctctaccacgcctcttccccgccccatacaaatcttcgtcccgccccccacaaaaccgacttccgccccgtccctcaacgacgccccgcccccacgacgtcttaccccgcctcctacaaacgacccgacgcgatatttacccgcgatacataataaaacgatctccttcgacaaccccgaccgaacgaccacccaaaaactatactaaactaacgcaacgacaacaacataaaccgaaccctcgcatcgaccgtacccctatcgaatcccgactactacgaaaaactaaaccaactccaacacgaactacgaaacaaataaaaacactaaaacgaaaataaaaaatcgacccgcgccgaaaatcttccgcgtaccctaccccattttccttcccgctcccccgtccgaaattccccgaaacccaaacccgcgcgcaacgccccccaaactcccaataaaacctaaaaaacaatatttactaaaacc

SEQ ID NO: 29049 - DNA, 1108 bp, Artificial Sequence
  chemically treated genomic DNA (Homo sapiens) CpG-island No: 29049
ataggcggtatattatgaatacgtcggcggttattatggtcgtcgcgtggattagcgtcgatatcggggtcgggttttttatcgcgttcggtagttaggtgtggagttcgagttgcgtcgatttgtttatcgcgtcgacgaatagtagtaggtagagtacggttatcgtgtcgaagcgatagtttaggaaatcgatggtcgaattcgttatgttcggcgcggcggttaggatcgtcgggatcgagacggtttcgaatattaggaaggtgtcgaagatgtcgagtatgaaatcgaggtcgtcgacgcggttgacgacgaacgttttgatcgcggcggtattggtcgaaggtttgcggaattagaagtcgattagtaggtaggacgcgagatttacgttttgttagtcgaagaatatttggattagattgttcgtcgttacgagtattagtatcgcgaaggtgaagaggtagagataggcgaagaagcgcggttgattcggtttttcgtttatatagtataagttatagaggtggacgagtgtagatacgttggtgatgattattagtatgatcgcggttagcgagtcgacgcgtagcgtttagtcgatcgatatggtgtcgttggtgatatagtgaagtataggtgtgatagttacgacgttatggttcgatagatagtcgatgaagatcggttatgatagtgcgtagaaaatgaatagcgcgtcggtcgtgacgattttggcgggtacgttttcgatggttttgttgtcgaattttgtaatggcggcggttagtaacggtaggaagacgatagcgaggattaattcgattatttttttattcggttgacgtcgtcgatcgcgatggtgtcgcggttacggaaatagatgattaggatcgttagatcgatcgtcgatttatcggcggttacggttagtacgaatatggcgaagatttgatttattagatcgtgaagcgcgatcgagaaggcgacgaggtttaggtttacggcgagtaggataagttcgatcgttatgaggatgacgattaggttttttcggttgaggaagatatttagtatttttatggtgaataggatcgtcgcgacg

SEQ ID NO: 29050 - DNA, 1108 bp, Artificial Sequence
  chemically treated genomic DNA (Homo sapiens) CpG-island No: 29050
cgtcgcgacgatcctattcaccataaaaatactaaatatcttcctcaaccgaaaaaacctaatcgtcatcctcataacgatcgaacttatcctactcgccgtaaacctaaacctcgtcgccttctcgatcgcgcttcacgatctaataaatcaaatcttcgccatattcgtactaaccgtaaccgccgataaatcgacgatcgatctaacgatcctaatcatctatttccgtaaccgcgacaccatcgcgatcgacgacgtcaaccgaataaaaaaataatcgaattaatcctcgctatcgtcttcctaccgttactaaccgccgccattacaaaattcgacaacaaaaccatcgaaaacgtacccgccaaaatcgtcacgaccgacgcgctattcattttctacgcactatcataaccgatcttcatcgactatctatcgaaccataacgtcgtaactatcacacctatacttcactatatcaccaacgacaccatatcgatcgactaaacgctacgcgtcgactcgctaaccgcgatcatactaataatcatcaccaacgtatctacactcgtccacctctataacttatactatataaacgaaaaaccgaatcaaccgcgcttcttcgcctatctctacctcttcaccttcgcgatactaatactcgtaacgacgaacaatctaatccaaatattcttcgactaacaaaacgtaaatctcgcgtcctacctactaatcgacttctaattccgcaaaccttcgaccaataccgccgcgatcaaaacgttcgtcgtcaaccgcgtcgacgacctcgatttcatactcgacatcttcgacaccttcctaatattcgaaaccgtctcgatcccgacgatcctaaccgccgcgccgaacataacgaattcgaccatcgatttcctaaactatcgcttcgacacgataaccgtactctacctactactattcgtcgacgcgataaacaaatcgacgcaactcgaactccacacctaactaccgaacgcgataaaaaacccgaccccgatatcgacgctaatccacgcgacgaccataataaccgccgacgtattcataatataccgcctat

SEQ ID NO: 29051 - DNA, 1108 bp, Artificial Sequence
  chemically treated genomic DNA (Homo sapiens) CpG-island No: 29051
cgtcgcggcgattttgtttattatgggggtgttgggtattttttttaatcggaagaatttgatcgttatttttatggcgatcgaatttattttgttcgtcgtgaatttgaatttcgtcgttttttcggtcgcgttttacgatttggtgggttaggttttcgttatgttcgtgttgatcgtggtcgtcggtgaatcggcgatcggtttggcgattttggttatttattttcgtggtcgcggtattatcgcggtcgacgacgttaatcggatgaaggggtaatcgggttgattttcgttatcgtttttttgtcgttgttggtcgtcgttattgtagagttcggtaataaggttatcgagaacgtgttcgttaaggtcgttacgatcggcgcgttgtttattttttgcgtattgttatggtcgatttttatcggttatttgtcgggttatagcgtcgtgattgttatatttgtgttttattgtattattagcggtattatgtcggtcgattgggcgttgcgcgtcgattcgttgatcgcgattatgttggtggttattattagcgtatttgtattcgtttatttttatagtttgtgttatatgagcgaggagtcggattagtcgcgttttttcgtttatttttgtttttttattttcgcgatgttgatgttcgtgacggcggataatttggtttagatgtttttcggttggtaaggcgtgggtttcgcgttttatttgttgatcggtttttggtttcgtaagttttcggttaatgtcgtcgcgattaaggcgttcgtcgttaatcgcgtcggcgatttcggttttatgttcggtattttcggtatttttttggtgttcgggatcgtttcgatttcggcgattttggtcgtcgcgtcgggtatggcgggttcgattatcggttttttgggttatcgtttcgatacgatgatcgtgttttgtttgttgttgttcgtcggcgcgatgggtaagtcggcgtagttcgggttttatatttggttgtcggacgcgatggaaggttcgatttcggtgtcggcgttgatttacgcggcgattatggtgatcgtcggcgtgtttatggtgtgtcgtttgt

SEQ ID NO: 29052 - DNA, 1108 bp, Artificial Sequence
  chemically treated genomic DNA (Homo sapiens) CpG-island No: 29052
acaaacgacacaccataaacacgccgacgatcaccataatcgccgcgtaaatcaacgccgacaccgaaatcgaaccttccatcgcgtccgacaaccaaatataaaacccgaactacgccgacttacccatcgcgccgacgaacaacaacaaacaaaacacgatcatcgtatcgaaacgataacccaaaaaaccgataatcgaacccgccatacccgacgcgacgaccaaaatcgccgaaatcgaaacgatcccgaacaccaaaaaaataccgaaaataccgaacataaaaccgaaatcgccgacgcgattaacgacgaacgccttaatcgcgacgacattaaccgaaaacttacgaaaccaaaaaccgatcaacaaataaaacgcgaaacccacgccttaccaaccgaaaaacatctaaaccaaattatccgccgtcacgaacatcaacatcgcgaaaataaaaaaacaaaaataaacgaaaaaacgcgactaatccgactcctcgctcatataacacaaactataaaaataaacgaatacaaatacgctaataataaccaccaacataatcgcgatcaacgaatcgacgcgcaacgcccaatcgaccgacataataccgctaataatacaataaaacacaaatataacaatcacgacgctataacccgacaaataaccgataaaaatcgaccataacaatacgcaaaaaataaacaacgcgccgatcgtaacgaccttaacgaacacgttctcgataaccttattaccgaactctacaataacgacgaccaacaacgacaaaaaaacgataacgaaaatcaacccgattaccccttcatccgattaacgtcgtcgaccgcgataataccgcgaccacgaaaataaataaccaaaatcgccaaaccgatcgccgattcaccgacgaccacgatcaacacgaacataacgaaaacctaacccaccaaatcgtaaaacgcgaccgaaaaaacgacgaaattcaaattcacgacgaacaaaataaattcgatcgccataaaaataacgatcaaattcttccgattaaaaaaaatacccaacacccccataataaacaaaatcgccgcgacg

SEQ ID NO: 29053 - DNA, 911 bp, Artificial Sequence
  chemically treated genomic DNA (Homo sapiens) CpG-island No: 29053
taaagggaaattattaggtcggtatttagcggatcgtcgaatgggtgatcgtataggttaggaaggcgatgagggttagtaggaggaagaattggcgttgcggcggtatgttcggcgacgatttagttttcgtcggcgaacgaaaagaaggcgaggaagaaatagatgtagtttacgatcggaaatttttagtcggtatttagatcgattgtatagatgtttttggtcgaaagttattttattatttaattcgtcggtatcgtgacgacgtcgcgggtaacgttattgtcgatacggtggaaaggatagtcgtcgttgacgatcgatagtagcgattattatagggcgagtaattggtaggtgacgttgtttagttagtagttatgatcgatggaggtattcgtggcggtgtcgatcggttaatgtcggagtaatgatattgattatgaagtaattggttatagttatgcgagtatattagtattaggttagacgatcgatgcgtttcggtcggaacggggcgcgattcggaatgagtgtcgttggggtatattatttattttgtattcgggttatgatcgtattttagttttgtatcggggacgacgaagttgttttgttatagtttcgtttagtagtaatatgtttgtgcgtatgcgagatttaaaatcggtgtttttaggatatttttattgtggcgattgtttttatgcgatgttatagtggtatattagtttgtgtggcgttcggtggttacgatcgcgtcgcgttttttcgtagtagcgattggtacgcgagtttgttaattttcgtgattaatttatacgaaggagagttttgatgaaagcgttgcgtttttatgtcgttaaggatttgcggatcgaagatattttcgaaatcgatcgcgaaat

SEQ ID NO: 29054 - DNA, 911 bp, Artificial Sequence
  chemically treated genomic DNA (Homo sapiens) CpG-island No: 29054
atttcgcgatcgatttcgaaaatatcttcgatccgcaaatccttaacgacataaaaacgcaacgctttcatcaaaactctccttcgtataaattaatcacgaaaattaacaaactcgcgtaccaatcgctactacgaaaaaacgcgacgcgatcgtaaccaccgaacgccacacaaactaatataccactataacatcgcataaaaacaatcgccacaataaaaatatcctaaaaacaccgattttaaatctcgcatacgcacaaacatattactactaaacgaaactataacaaaacaacttcgtcgtccccgatacaaaactaaaatacgatcataacccgaatacaaaataaataatataccccaacgacactcattccgaatcgcgccccgttccgaccgaaacgcatcgatcgtctaacctaatactaatatactcgcataactataaccaattacttcataatcaatatcattactccgacattaaccgatcgacaccgccacgaatacctccatcgatcataactactaactaaacaacgtcacctaccaattactcgccctataataatcgctactatcgatcgtcaacgacgactatcctttccaccgtatcgacaataacgttacccgcgacgtcgtcacgataccgacgaattaaataataaaataactttcgaccaaaaacatctatacaatcgatctaaataccgactaaaaatttccgatcgtaaactacatctatttcttcctcgccttcttttcgttcgccgacgaaaactaaatcgtcgccgaacataccgccgcaacgccaattcttcctcctactaaccctcatcgccttcctaacctatacgatcacccattcgacgatccgctaaataccgacctaataatttcccttta

SEQ ID NO: 29055 - DNA, 911 bp, Artificial Sequence
  chemically treated genomic DNA (Homo sapiens) CpG-island No: 29055
gtttcgcgatcggtttcgggggtattttcgattcgtagatttttggcggtatgaaaacgtaacgtttttattagggttttttttcgtgtgagttgattacgagggttggtaagttcgcgtgttaatcgttgttacgaaggggcgcggcgcggtcgtggttatcgaacgttatataggttgatgtgttattgtggtatcgtatgggggtaatcgttatagtagaggtgttttaaaggtatcgattttggatttcgtatgcgtataagtatgttgttgttgagcgaggttatagtaagatagtttcgtcgttttcggtataagattgaagtgcggttataattcgaatataggatgagtagtatgttttaacggtatttatttcggatcgcgtttcgtttcggtcgggacgtatcgatcgtttgatttgatgttgatatattcgtataattatggttagttgttttatggttaatattattgtttcggtattggtcgatcggtatcgttacgggtgtttttatcgattataattattggttggataacgttatttgttaattgttcgttttatggtggtcgttgttgtcggtcgttaacggcggttattttttttatcgtatcgataatggcgttattcgcggcgtcgttacggtgtcgacgagttgggtgatgggatggttttcggttaagggtatttatgtagtcggtttggatatcgattgggaattttcgatcgtgggttgtatttatttttttttcgtttttttttcgttcgtcggcgagaattgggtcgtcgtcgggtatgtcgtcgtagcgttaatttttttttttgttgatttttatcgtttttttgatttatgcggttatttattcggcgattcgttggatatcggtttggtggtttttttttg

SEQ ID NO: 29056 - DNA, 911 bp, Artificial Sequence
  chemically treated genomic DNA (Homo sapiens) CpG-island No: 29056
caaaaaaaaaccaccaaaccgatatccaacgaatcgccgaataaataaccgcataaatcaaaaaaacgataaaaatcaacaaaaaaaaaaattaacgctacgacgacatacccgacgacgacccaattctcgccgacgaacgaaaaaaaaacgaaaaaaaaataaatacaacccacgatcgaaaattcccaatcgatatccaaaccgactacataaatacccttaaccgaaaaccatcccatcacccaactcgtcgacaccgtaacgacgccgcgaataacgccattatcgatacgataaaaaaaataaccgccgttaacgaccgacaacaacgaccaccataaaacgaacaattaacaaataacgttatccaaccaataattataatcgataaaaacacccgtaacgataccgatcgaccaataccgaaacaataatattaaccataaaacaactaaccataattatacgaatatatcaacatcaaatcaaacgatcgatacgtcccgaccgaaacgaaacgcgatccgaaataaataccgttaaaacatactactcatcctatattcgaattataaccgcacttcaatcttataccgaaaacgacgaaactatcttactataacctcgctcaacaacaacatacttatacgcatacgaaatccaaaatcgatacctttaaaacacctctactataacgattacccccatacgataccacaataacacatcaacctatataacgttcgataaccacgaccgcgccgcgccccttcgtaacaacgattaacacgcgaacttaccaaccctcgtaatcaactcacacgaaaaaaaaccctaataaaaacgttacgttttcataccgccaaaaatctacgaatcgaaaatacccccgaaaccgatcgcgaaac

SEQ ID NO: 29057 - DNA, 719 bp, Artificial Sequence
  chemically treated genomic DNA (Homo sapiens) CpG-island No: 29057
atatttcgtttcggtttcgggcgttttcgagtttcggtttcgcgtttttagtattgtttttgcggggtttcggggcgcgcgtcgtaggggagttgagatttcggcgttttacggttgtgggtgtaaagggggcgttcgttttcgtcgggttttttttcgtttcgcgtttcgttgttgttttcggattcgcggttttttgggagggcgggaaatattatcggtttcgttgcgtttttgggtgggtttttttttcgtcgttcgtgggaggggtcggtgggcgcgcggttttaaaagttcgagttcggtttattcggaggagttcggcggtttgcgcggcgttcgttgtaggttttgggggacggcggggtttgggggcgcgggtaggtgtgggatttgagttcggagttcggagcggagggttagaggcgtagtcgtaattttcggcgggaagtcgcggggcggggtttcgaggggcggggttgagaatagtcggtgtttgcggggtcgggggtcgtgagaggagcggttttgggggcgggggcggggaggagcgggtttttagagtgggtggtagaagcggtggggtggaattaggtagagtttgtagggtatagacgcgagatgggcggagttgggaagtggttttgtgggcggagttaagaggggcggggttttatggggcggggtttgtggggtttttttagatagaagtacgtggg

SEQ ID NO: 29058 - DNA, 719 bp, Artificial Sequence
  chemically treated genomic DNA (Homo sapiens) CpG-island No: 29058
cccacgtacttctatctaaaaaaaccccacaaaccccgccccataaaaccccgcccctcttaactccgcccacaaaaccacttcccaactccgcccatctcgcgtctataccctacaaactctacctaattccaccccaccgcttctaccacccactctaaaaacccgctcctccccgcccccgcccccaaaaccgctcctctcacgacccccgaccccgcaaacaccgactattctcaaccccgcccctcgaaaccccgccccgcgacttcccgccgaaaattacgactacgcctctaaccctccgctccgaactccgaactcaaatcccacacctacccgcgcccccaaaccccgccgtcccccaaaacctacaacgaacgccgcgcaaaccgccgaactcctccgaataaaccgaactcgaacttttaaaaccgcgcgcccaccgacccctcccacgaacgacgaaaaaaaaacccacccaaaaacgcaacgaaaccgataatatttcccgccctcccaaaaaaccgcgaatccgaaaacaacaacgaaacgcgaaacgaaaaaaaacccgacgaaaacgaacgccccctttacacccacaaccgtaaaacgccgaaatctcaactcccctacgacgcgcgccccgaaaccccgcaaaaacaatactaaaaacgcgaaaccgaaactcgaaaacgcccgaaaccgaaacgaaatat

SEQ ID NO: 29059 - DNA, 719 bp, Artificial Sequence
  chemically treated genomic DNA (Homo sapiens) CpG-island No: 29059
tttacgtgtttttgtttggaaaagttttataagtttcgttttataagatttcgttttttttagtttcgtttataaggttattttttagtttcgtttatttcgcgtttgtattttataggttttgtttggttttattttatcgtttttgttatttattttaaggattcgttttttttcgttttcgtttttaaagtcgttttttttacggttttcgatttcgtaggtatcgattgtttttagtttcgtttttcgaggtttcgtttcgcggtttttcgtcggggattgcggttgcgtttttgatttttcgtttcgggtttcgggtttaggttttatatttgttcgcgtttttaggtttcgtcgttttttagagtttgtagcgggcgtcgcgtaggtcgtcgggttttttcgggtgggtcgggttcgggtttttggagtcgcgcgtttatcgattttttttacgggcggcggggggagagtttatttagaggcgtagcggggtcggtggtgtttttcgtttttttagggggtcgcgggttcgggggtagtagcggggcgcggggcggagggaggttcggcgggaacgggcgttttttttgtatttatagtcgtggaacgtcgaggttttagtttttttacggcgcgcgtttcgagatttcgtaagggtagtgttggggacgcggggtcgagattcgaggacgttcgaggtcgggacggggtgt

SEQ ID NO: 29060 - DNA, 719 bp, Artificial Sequence
  chemically treated genomic DNA (Homo sapiens) CpG-island No: 29060
acaccccgtcccgacctcgaacgtcctcgaatctcgaccccgcgtccccaacactacccttacgaaatctcgaaacgcgcgccgtaaaaaaactaaaacctcgacgttccacgactataaatacaaaaaaaacgcccgttcccgccgaacctccctccgccccgcgccccgctactacccccgaacccgcgaccccctaaaaaaacgaaaaacaccaccgaccccgctacgcctctaaataaactctccccccgccgcccgtaaaaaaaatcgataaacgcgcgactccaaaaacccgaacccgacccacccgaaaaaacccgacgacctacgcgacgcccgctacaaactctaaaaaacgacgaaacctaaaaacgcgaacaaatataaaacctaaacccgaaacccgaaacgaaaaatcaaaaacgcaaccgcaatccccgacgaaaaaccgcgaaacgaaacctcgaaaaacgaaactaaaaacaatcgatacctacgaaatcgaaaaccgtaaaaaaaacgactttaaaaacgaaaacgaaaaaaaacgaatccttaaaataaataacaaaaacgataaaataaaaccaaacaaaacctataaaatacaaacgcgaaataaacgaaactaaaaaataaccttataaacgaaactaaaaaaaacgaaatcttataaaacgaaacttataaaacttttccaaacaaaaacacgtaaa

SEQ ID NO: 29061 - DNA, 515 bp, Artificial Sequence
  chemically treated genomic DNA (Homo sapiens) CpG-island No: 29061
gtttttcgggttttcgcgttttcgtgtgtaggtttttcgggttttcgcgttttcgtgtgtaggtttttcgggttttcgcgtttgtgtgtgtaggtttttcgggttttcgcgttttcgtgtgtaggtttttcgggttttcgcgttttcgtgtgtaggtttttcgggttttcgcgttttcgtgtgtaggtttttcgggttttcgcgttttcgtgtgtaggtttttcgggttttcgcgttttcgtgtgtaggtttttcgggttttcgcgttttcgtgtgtaggtttttcgggttttcgcgttttcgtgtgtaggtttttcgggttttcgcgtttgtgtgtgtaggtttttcgggttttcgcgttttcgtgtgtaggtttttcgggttttcgcgttttcgtgtgtaggtttttcgggttttcgcgttttcgtgtgtaggtttttcgggtttttgcgtttttgtgtgtaggtttaagtttgttaacgtttatgtacgttttagttttttagtttggattg

SEQ ID NO: 29062 - DNA, 515 bp, Artificial Sequence
  chemically treated genomic DNA (Homo sapiens) CpG-island No: 29062
caatccaaactaaaaaactaaaacgtacataaacgttaacaaacttaaacctacacacaaaaacgcaaaaacccgaaaaacctacacacgaaaacgcgaaaacccgaaaaacctacacacgaaaacgcgaaaacccgaaaaacctacacacgaaaacgcgaaaacccgaaaaacctacacacacaaacgcgaaaacccgaaaaacctacacacgaaaacgcgaaaacccgaaaaacctacacacgaaaacgcgaaaacccgaaaaacctacacacgaaaacgcgaaaacccgaaaaacctacacacgaaaacgcgaaaacccgaaaaacctacacacgaaaacgcgaaaacccgaaaaacctacacacgaaaacgcgaaaacccgaaaaacctacacacgaaaacgcgaaaacccgaaaaacctacacacacaaacgcgaaaacccgaaaaacctacacacgaaaacgcgaaaacccgaaaaacctacacacgaaaacgcgaaaacccgaaaaac

SEQ ID NO: 29063 - DNA, 515 bp, Artificial Sequence
  chemically treated genomic DNA (Homo sapiens) CpG-island No: 29063
tagtttaggttgagaggttgagacgtgtatggacgttggtaaatttgagtttgtatatagagacgtagaggttcgggggatttgtatacggagacgcggaggttcgggggatttgtatacggaggcgcggaggttcgggggatttgtatacggaggcgcggaggttcgggggatttgtatatatagacgcggaggttcgggggatttgtatacggaggcgcggaggttcgggggatttgtatacggaggcgcggaggttcgggggatttgtatacggaggcgcggaggttcgggggatttgtatacggaggcgcggaggttcgggggatttgtatacggaggcgcggaggttcgggggatttgtatacggaggcgcggaggttcgggggatttgtatacggaggcgcggaggttcgggggatttgtatatatagacgcggaggttcgggggatttgtatacggaggcgcggaggttcgggggatttgtatacggaggcgcggaggttcgggggat

SEQ ID NO: 29064 - DNA, 515 bp, Artificial Sequence
  chemically treated genomic DNA (Homo sapiens) CpG-island No: 29064
atcccccgaacctccgcgcctccgtatacaaatcccccgaacctccgcgcctccgtatacaaatcccccgaacctccgcgtctatatatacaaatcccccgaacctccgcgcctccgtatacaaatcccccgaacctccgcgcctccgtatacaaatcccccgaacctccgcgcctccgtatacaaatcccccgaacctccgcgcctccgtatacaaatcccccgaacctccgcgcctccgtatacaaatcccccgaacctccgcgcctccgtatacaaatcccccgaacctccgcgcctccgtatacaaatcccccgaacctccgcgtctatatatacaaatcccccgaacctccgcgcctccgtatacaaatcccccgaacctccgcgcctccgtatacaaatcccccgaacctccgcgtctccgtatacaaatcccccgaacctctacgtctctatatacaaactcaaatttaccaacgtccatacacgtctcaacctctcaacctaaacta

SEQ ID NO: 29065 - DNA, 694 bp, Artificial Sequence
  chemically treated genomic DNA (Homo sapiens) CpG-island No: 29065
tattgcggatcgggaatgttaggggaacgcgggtatcgtggatcgggaatgttaggggatcgtgggtatcgtcgatcgggaatgttaggggaatacgggtattgtcgatcgggaatgttaggggaacgggggtattgtagatcgggaatgttaggggaacgtgggtattgcggatcgggaatgttaggggaacgtgggtacggttgatcgggaatgttaggggaacgcgggtacggtcgatcgggaatgttaggggaacgtgggtattgtggatcgggaatgttaggggaacgcgggtacggttgatcgggaatgttaggggaacgcgggtattgcggatcgggaatgttaggggaatacgggtattgtcgatcgggaatgttaggggaacgtgggtacggtcgatcgggaatgttaggggaatacgggtattgtggatcgggaatgttaggggattatgggtattgtggattgggaatgttaggggaatacgggtacggcggatcgggaatgttaggggaacgtaggtacggttgatcgggaatgttaggggatcgcgggtattgtcgatcgggaatgtcgggaacgtaggtattgcggatcgggaatgttagtagaacgggggtattgcggatcgggaatgttagggtaagagggaagttgtttgttagtttgttatatgtttagttaatta

SEQ ID NO: 29066 - DNA, 694 bp, Artificial Sequence
  chemically treated genomic DNA (Homo sapiens) CpG-island No: 29066
taattaactaaacatataacaaactaacaaacaacttccctcttaccctaacattcccgatccgcaatacccccgttctactaacattcccgatccgcaatacctacgttcccgacattcccgatcgacaatacccgcgatcccctaacattcccgatcaaccgtacctacgttcccctaacattcccgatccgccgtacccgtattcccctaacattcccaatccacaatacccataatcccctaacattcccgatccacaatacccgtattcccctaacattcccgatcgaccgtacccacgttcccctaacattcccgatcgacaatacccgtattcccctaacattcccgatccgcaatacccgcgttcccctaacattcccgatcaaccgtacccgcgttcccctaacattcccgatccacaatacccacgttcccctaacattcccgatcgaccgtacccgcgttcccctaacattcccgatcaaccgtacccacgttcccctaacattcccgatccgcaatacccacgttcccctaacattcccgatctacaatacccccgttcccctaacattcccgatcgacaatacccgtattcccctaacattcccgatcgacgatacccacgatcccctaacattcccgatccacgatacccgcgttcccctaacattcccgatccgcaata

SEQ ID NO: 29067 - DNA, 694 bp, Artificial Sequence
  chemically treated genomic DNA (Homo sapiens) CpG-island No: 29067
taattagttaaatatatgataagttagtaaataattttttttttgttttgatattttcggttcgtagtgttttcgttttgttgatattttcggttcgtagtgtttgcgttttcgatattttcggtcggtagtgttcgcgattttttgatattttcggttagtcgtgtttgcgtttttttgatattttcggttcgtcgtgttcgtgtttttttggtatttttagtttatagtgtttatgattttttgatattttcggtttatagtgttcgtgtttttttggtattttcggtcggtcgtgtttacgtttttttgatattttcggtcggtagtgttcgtgtttttttggtattttcggttcgtagtgttcgcgtttttttggtattttcggttagtcgtgttcgcgtttttttgatattttcggtttatagtgtttacgtttttttgatattttcggtcggtcgtgttcgcgtttttttgatattttcggttagtcgtgtttacgtttttttgatattttcggttcgtagtgtttacgtttttttgatattttcggtttgtagtgttttcgtttttttgatattttcggtcggtagtgttcgtgtttttttgatattttcggtcggcggtgtttacgattttttggtattttcggtttacggtgttcgcgtttttttgatattttcggttcgtagtg

SEQ ID NO: 29068 - DNA, 694 bp, Artificial Sequence
  chemically treated genomic DNA (Homo sapiens) CpG-island No: 29068
cactacgaaccgaaaatatcaaaaaaacgcgaacaccgtaaaccgaaaataccaaaaaatcgtaaacaccgccgaccgaaaatatcaaaaaaacacgaacactaccgaccgaaaatatcaaaaaaacgaaaacactacaaaccgaaaatatcaaaaaaacgtaaacactacgaaccgaaaatatcaaaaaaacgtaaacacgactaaccgaaaatatcaaaaaaacgcgaacacgaccgaccgaaaatatcaaaaaaacgtaaacactataaaccgaaaatatcaaaaaaacgcgaacacgactaaccgaaaataccaaaaaaacgcgaacactacgaaccgaaaataccaaaaaaacacgaacactaccgaccgaaaatatcaaaaaaacgtaaacacgaccgaccgaaaataccaaaaaaacacgaacactataaaccgaaaatatcaaaaaatcataaacactataaactaaaaataccaaaaaaacacgaacacgacgaaccgaaaatatcaaaaaaacgcaaacacgactaaccgaaaatatcaaaaaatcgcgaacactaccgaccgaaaatatcgaaaacgcaaacactacgaaccgaaaatatcaacaaaacgaaaacactacgaaccgaaaatatcaaaacaaaaaaaaaattatttactaacttatcatatatttaactaatta

SEQ ID NO: 29069 - DNA, 1059 bp, Artificial Sequence
  chemically treated genomic DNA (Homo sapiens) CpG-island No: 29069
gttttcgcggtttaaaatcgaagcgggggcgagggggaggtagagttcgttttttgcgcgtcgcggttgggagggagaggaggtgggagagaaggaagaggcggaggaggtagcgggcgtcgaggttttgggattcgtaggtaagttagatcgacgcgtagagtcgggagttttatcgtagcggtagcggtagcggcgggttcgggtcggtttcgggggttgtttatttatatgagtattcgtttattcggcgagttttcgagtttaggcggcgcggttatggtcgagtttaagtcgttgtcgggggacgcgtatttggtattaagttacggttacgcggcggcggttgcgggtttcgtttacggggcggcgcgagaattcgaagcggttcgcggttacggtatttcgggttcgggcggcgattttttcgcggcgtttgtatttcgcgttttagtttaggcggcggagagtagcggcgaatagagcggggacgaggacgacgttttcgagtagcggcggcggcggcgcgggttagggagcgcggcggacgggcggcggcggtcgcgagagtagcggtttttgcggtttagtattaacgcgcgcgagcggcggcgtatgtacgatttaaacgacgcgttggacgggttgcgagtcgttattttttacgcgtatagttcgtcggtgcgtaagttttttaagatcgttacgttgttgttcgttaagaattatatttttatgtaggcgtaggttttggacgagatgcggcgtttggtggttttttttaattagggttagggtttggtcgcgttcgtaaacgtcgcgtttttgacgtttttcggttaggttattgtgtgtttttttttcgtaggcgtcgttttggggttttgttttgataagtgcgtcgtttttttcgggacgtttttcgcgttttgtaaatattgttacgagaagtcgtgatcgcgcgggttttcggttttttcgtacgcgtttttcgatcgtttttgtgattgtttttttgttcggataggaaaggtttggagggattttgtagattaggag

SEQ ID NO: 29070 - DNA, 1059 bp, Artificial Sequence
  chemically treated genomic DNA (Homo sapiens) CpG-island No: 29070
ctcctaatctacaaaatccctccaaacctttcctatccgaacaaaaaaacaatcacaaaaacgatcgaaaaacgcgtacgaaaaaaccgaaaacccgcgcgatcacgacttctcgtaacaatatttacaaaacgcgaaaaacgtcccgaaaaaaacgacgcacttatcaaaacaaaaccccaaaacgacgcctacgaaaaaaaaacacacaataacctaaccgaaaaacgtcaaaaacgcgacgtttacgaacgcgaccaaaccctaaccctaattaaaaaaaaccaccaaacgccgcatctcgtccaaaacctacgcctacataaaaatataattcttaacgaacaacaacgtaacgatcttaaaaaacttacgcaccgacgaactatacgcgtaaaaaataacgactcgcaacccgtccaacgcgtcgtttaaatcgtacatacgccgccgctcgcgcgcgttaatactaaaccgcaaaaaccgctactctcgcgaccgccgccgcccgtccgccgcgctccctaacccgcgccgccgccgccgctactcgaaaacgtcgtcctcgtccccgctctattcgccgctactctccgccgcctaaactaaaacgcgaaatacaaacgccgcgaaaaaatcgccgcccgaacccgaaataccgtaaccgcgaaccgcttcgaattctcgcgccgccccgtaaacgaaacccgcaaccgccgccgcgtaaccgtaacttaataccaaatacgcgtcccccgacaacgacttaaactcgaccataaccgcgccgcctaaactcgaaaactcgccgaataaacgaatactcatataaataaacaacccccgaaaccgacccgaacccgccgctaccgctaccgctacgataaaactcccgactctacgcgtcgatctaacttacctacgaatcccaaaacctcgacgcccgctacctcctccgcctcttccttctctcccacctcctctccctcccaaccgcgacgcgcaaaaaacgaactctacctccccctcgcccccgcttcgattttaaaccgcgaaaac

SEQ ID NO: 29071 - DNA, 1059 bp, Artificial Sequence
  chemically treated genomic DNA (Homo sapiens) CpG-island No: 29071
tttttggtttgtagggtttttttaggttttttttgttcgggtagagagatagttataggggcgatcggaggacgcgtgcgggagggtcgggggttcgcgcggttacggtttttcgtgatagtgtttgtaaagcgcggagggcgtttcggagaaggcggcgtatttgttagggtagggttttagggcggcgtttgcggagaaggggtatatagtggtttggtcgaagggcgttaagggcgcggcgtttacgggcgcggttaggttttggttttggttgaggaaggttattaggcgtcgtatttcgtttagggtttgcgtttgtatgaggatatagtttttggcgagtagtagcgtggcgattttggagagtttgcgtatcgacgggttgtgcgcgtaggggatgacggttcgtagttcgtttagcgcgtcgtttaggtcgtgtatgcgtcgtcgttcgcgcgcgttgatgttgagtcgtagagatcgttgttttcgcggtcgtcgtcgttcgttcgtcgcgttttttggttcgcgtcgtcgtcgtcgttgttcgaaggcgtcgttttcgttttcgttttgttcgtcgttgtttttcgtcgtttgagttggggcgcgaggtgtaggcgtcgcggggaggtcgtcgttcgggttcggagtgtcgtagtcgcgggtcgtttcgggttttcgcgtcgtttcgtaggcgagattcgtagtcgtcgtcgcgtagtcgtggtttagtgttaggtacgcgtttttcgatagcgatttgagttcggttatggtcgcgtcgtttgggttcgggggttcgtcgggtgggcggatgtttatgtgggtgagtagttttcgaggtcggttcgagttcgtcgttgtcgttgtcgttgcgatgaggttttcggttttgcgcgtcggtttggtttgtttgcgggttttagagtttcggcgttcgttgtttttttcgtttttttttttttttttatttttttttttttttagtcgcgacgcgtagggggcgggttttatttttttttcgttttcgtttcggttttaagtcgcggaggt

SEQ ID NO: 29072 - DNA, 1059 bp, Artificial Sequence
  chemically treated genomic DNA (Homo sapiens) CpG-island No: 29072
acctccgcgacttaaaaccgaaacgaaaacgaaaaaaaaataaaacccgccccctacgcgtcgcgactaaaaaaaaaaaaaaataaaaaaaaaaaaaaaaacgaaaaaaacaacgaacgccgaaactctaaaacccgcaaacaaaccaaaccgacgcgcaaaaccgaaaacctcatcgcaacgacaacgacaacgacgaactcgaaccgacctcgaaaactactcacccacataaacatccgcccacccgacgaacccccgaacccaaacgacgcgaccataaccgaactcaaatcgctatcgaaaaacgcgtacctaacactaaaccacgactacgcgacgacgactacgaatctcgcctacgaaacgacgcgaaaacccgaaacgacccgcgactacgacactccgaacccgaacgacgacctccccgcgacgcctacacctcgcgccccaactcaaacgacgaaaaacaacgacgaacaaaacgaaaacgaaaacgacgccttcgaacaacgacgacgacgacgcgaaccaaaaaacgcgacgaacgaacgacgacgaccgcgaaaacaacgatctctacgactcaacatcaacgcgcgcgaacgacgacgcatacacgacctaaacgacgcgctaaacgaactacgaaccgtcatcccctacgcgcacaacccgtcgatacgcaaactctccaaaatcgccacgctactactcgccaaaaactatatcctcatacaaacgcaaaccctaaacgaaatacgacgcctaataaccttcctcaaccaaaaccaaaacctaaccgcgcccgtaaacgccgcgcccttaacgcccttcgaccaaaccactatataccccttctccgcaaacgccgccctaaaaccctaccctaacaaatacgccgccttctccgaaacgccctccgcgctttacaaacactatcacgaaaaaccgtaaccgcgcgaacccccgaccctcccgcacgcgtcctccgatcgcccctataactatctctctacccgaacaaaaaaaacctaaaaaaaccctacaaaccaaaaa

SEQ ID NO: 29073 - DNA, 729 bp, Artificial Sequence
  chemically treated genomic DNA (Homo sapiens) CpG-island No: 29073
gcgggaagcgttaaggtcgtcggggcgcgggattgagttcgagagtcggacgttggattttgcgttcgggaattcgcggtatttattgggtattgtcgggatttagtaagtttaggaacgggggtgggtagagtatttttcgggtattgtcgttcgtttttaaaagaagattatcgcggggttttagggttacggcgaggacgggtattggttagatttcggataggcggttttggtttcgggcgtacgaaaggtggagacgaagaaaagtcggatttattggtttttgatttttttgtagtgggtttcgcgttttcgttttagtcggtttttcgtgttaaattgtagggtagtgttttgtttttgaggacgcgcgtggtcggtattttttatttcggtgatttcgagatttcgtagttttgcggagagtttacgatggtcgtttgtagaggagttggatcgcgggcgtaggaagatttcggggaaggttttttttaagtaggagtttgttttatttatttgggaattggacgtcgtcgtcggttgtttcgaagtttgaggaatttgttttttaaatgttttttggtttttttttttcgtcgttattcgttgtttgggacgttcgcggggtggagttggatggagatcgttttgcgggttttttgtttcggggggttgcgtggaggagggtttttatagttcgcgttttatttaattttgacggttagg

SEQ ID NO: 29074 - DNA, 729 bp, Artificial Sequence
  chemically treated genomic DNA (Homo sapiens) CpG-island No: 29074
cctaaccgtcaaaattaaataaaacgcgaactataaaaaccctcctccacgcaaccccccgaaacaaaaaacccgcaaaacgatctccatccaactccaccccgcgaacgtcccaaacaacgaataacgacgaaaaaaaaaaaccaaaaaacatttaaaaaacaaattcctcaaacttcgaaacaaccgacgacgacgtccaattcccaaataaataaaacaaactcctacttaaaaaaaaccttccccgaaatcttcctacgcccgcgatccaactcctctacaaacgaccatcgtaaactctccgcaaaactacgaaatctcgaaatcaccgaaataaaaaataccgaccacgcgcgtcctcaaaaacaaaacactaccctacaatttaacacgaaaaaccgactaaaacgaaaacgcgaaacccactacaaaaaaatcaaaaaccaataaatccgacttttcttcgtctccacctttcgtacgcccgaaaccaaaaccgcctatccgaaatctaaccaatacccgtcctcgccgtaaccctaaaaccccgcgataatcttcttttaaaaacgaacgacaatacccgaaaaatactctacccacccccgttcctaaacttactaaatcccgacaatacccaataaataccgcgaattcccgaacgcaaaatccaacgtccgactctcgaactcaatcccgcgccccgacgaccttaacgcttcccgc

SEQ ID NO: 29075 - DNA, 729 bp, Artificial Sequence
  chemically treated genomic DNA (Homo sapiens) CpG-island No: 29075
tttgatcgttagggttaagtagggcgcgggttgtgaggatttttttttacgtagtttttcgaggtagagggttcgtaaagcggtttttatttaattttatttcgcggacgttttaggtagcggatggcggcgggggggggaggttaggggatatttaggggataaattttttagatttcgaggtagtcggcgacggcgtttaatttttaaataaatagaataaatttttatttggaaaaggtttttttcggggtttttttgcgttcgcggtttagtttttttgtagacggttatcgtgggtttttcgtagggttgcggagtttcggagttatcgaggtgggaggtgtcggttacgcgcgtttttaggaatagagtattgttttgtagtttagtacgaagggtcggttggagcgggagcgcgaggtttattgtaagaggattaggagttagtaagttcggttttttttcgtttttatttttcgtgcgttcggggttaggatcgtttgttcggaatttgattagtgttcgttttcgtcgtggttttgggatttcgcggtggtttttttttggggacgaacggtagtgttcgaaggatgttttatttattttcgtttttagatttgttgggtttcgataatatttagtgggtgtcgcgagttttcgggcgtagagtttagcgttcggttttcgagtttaatttcgcgtttcgacggttttggcgtttttcgt

SEQ ID NO: 29076 - DNA, 729 bp, Artificial Sequence
  chemically treated genomic DNA (Homo sapiens) CpG-island No: 29076
acgaaaaacgccaaaaccgtcgaaacgcgaaattaaactcgaaaaccgaacgctaaactctacgcccgaaaactcgcgacacccactaaatattatcgaaacccaacaaatctaaaaacgaaaataaataaaacatccttcgaacactaccgttcgtccccaaaaaaaaaccaccgcgaaatcccaaaaccacgacgaaaacgaacactaatcaaattccgaacaaacgatcctaaccccgaacgcacgaaaaataaaaacgaaaaaaaaccgaacttactaactcctaatcctcttacaataaacctcgcgctcccgctccaaccgacccttcgtactaaactacaaaacaatactctattcctaaaaacgcgcgtaaccgacacctcccacctcgataactccgaaactccgcaaccctacgaaaaacccacgataaccgtctacaaaaaaactaaaccgcgaacgcaaaaaaaccccgaaaaaaaccttttccaaataaaaatttattctatttatttaaaaattaaacgccgtcgccgactacctcgaaatctaaaaaatttatcccctaaatatcccctaacctcccccccccgccgccatccgctacctaaaacgtccgcgaaataaaattaaataaaaaccgctttacgaaccctctacctcgaaaaactacgtaaaaaaaaatcctcacaacccgcgccctacttaaccctaacgatcaaa

SEQ ID NO: 29077 - DNA, 1174 bp, Artificial Sequence
  chemically treated genomic DNA (Homo sapiens) CpG-island No: 29077
ggggttatcgcggcggcgaacgtttcggatttcgtatttcggtgattttttgggatgaatcgaagtcggattcgtattttggtcgtaataagcgcgttttacgtcgttacgtattagcggtgattttcgagttttttgtcgttttggttttttcgtaggcgggtttcgaggttttcgtagggagtttagggttacggttacgtgtagtcgttttcgagttcgagtttgtaggttcggggttcggttcgcgttttggtggcgttcggcgaggttgtagcgcgtaaagtttttattttaagttttcgtcgcggcgttttcgtttcggagttggttcggtcgcggttttcgtttttttcggttgtttacgggttcggggcgaggacgcgagaggggtttggaagtcgttcggggagttcgttttgtttttcggagtcgtcgttaaatttcggtttcggggttcggtttagttttcgttttcggagttacggtcgtttcgtttttgtttttcggttttcgtcgggtttcgagtgcgtcgggagcgcggcgtagtagtcgtcgagggagggagcgaggtaggaggcgggacggagggaggggattgagcgcggggcggggagaaggggcgggtagtcgaaagcgtagcgtttggtttcgtttcgtttcgggatagtggtagcggcgttatcgttacggggcgtttaggcgtttaatcgggatttcgtattttggattcgggggttttggcgcgtttgttggattgcgtttttcgcggttagtttttgagttcgcgttcgggattgttcgcgttacgttttttttttcgttgttttttttttcgtttgtttttttaggagcgattattttgcggttttttcgtttgtacgcgatagtttttaaggttttcgcgtttcgttgttttggagttttacgtattaggcggcgcggtagttttttagggtcgcgcgttttgttagtttttttcgcggtgtaagtgtttcggtggtttcgggttcgcgtttttagtagtatcgttttagggtttatatgtgttagatattaaaattttatttttcgttgtttcggggtcgcgttttacgcgtttatatattttgggaattatatgcgttatgttttttgtttttttttggaagttttggaagtttaagtgtattgt

SEQ ID NO: 29078 - DNA, 1174 bp, Artificial Sequence
  chemically treated genomic DNA (Homo sapiens) CpG-island No: 29078
acaatacacttaaacttccaaaacttccaaaaaaaaacaaaaaacataacgcatataattcccaaaatatataaacgcgtaaaacgcgaccccgaaacaacgaaaaataaaattttaatatctaacacatataaaccctaaaacgatactactaaaaacgcgaacccgaaaccaccgaaacacttacaccgcgaaaaaaactaacaaaacgcgcgaccctaaaaaactaccgcgccgcctaatacgtaaaactccaaaacaacgaaacgcgaaaaccttaaaaactatcgcgtacaaacgaaaaaaccgcaaaataatcgctcctaaaaaaacaaacgaaaaaaaaaacaacgaaaaaaaaaacgtaacgcgaacaatcccgaacgcgaactcaaaaactaaccgcgaaaaacgcaatccaacaaacgcgccaaaacccccgaatccaaaatacgaaatcccgattaaacgcctaaacgccccgtaacgataacgccgctaccactatcccgaaacgaaacgaaaccaaacgctacgctttcgactacccgccccttctccccgccccgcgctcaatcccctccctccgtcccgcctcctacctcgctccctccctcgacgactactacgccgcgctcccgacgcactcgaaacccgacgaaaaccgaaaaacaaaaacgaaacgaccgtaactccgaaaacgaaaactaaaccgaaccccgaaaccgaaatttaacgacgactccgaaaaacaaaacgaactccccgaacgacttccaaacccctctcgcgtcctcgccccgaacccgtaaacaaccgaaaaaaacgaaaaccgcgaccgaaccaactccgaaacgaaaacgccgcgacgaaaacttaaaataaaaactttacgcgctacaacctcgccgaacgccaccaaaacgcgaaccgaaccccgaacctacaaactcgaactcgaaaacgactacacgtaaccgtaaccctaaactccctacgaaaacctcgaaacccgcctacgaaaaaaccaaaacgacaaaaaactcgaaaatcaccgctaatacgtaacgacgtaaaacgcgcttattacgaccaaaatacgaatccgacttcgattcatcccaaaaaatcaccgaaatacgaaatccgaaacgttcgccgccgcgataacccc

SEQ ID NO: 29079 - DNA, 1174 bp, Artificial Sequence
  chemically treated genomic DNA (Homo sapiens) CpG-island No: 29079
gtagtgtatttggatttttaggatttttagggaaaggtaggagatatggcgtatgtggtttttaggatgtgtaagcgcgtggagcgcggtttcggggtagcggagagtggggttttaatatttagtatatgtagattttggggcggtgttgttaggggcgcggattcgggattatcggagtatttgtatcgcggggaaagttgatagggcgcgcgattttaggaggttgtcgcgtcgtttggtgcgtgaagttttagggtagcggagcgcggggattttgaaggttgtcgcgtgtaggcgaaggggtcgtagggtggtcgtttttgggagagtagacggggaagaaggtaacgggagggagggcgtagcgcgagtagtttcggacgcgggtttaggaattggtcgcgaggagcgtaatttagtaggcgcgttagggttttcggatttaaggtgcggggtttcgattgggcgtttggacgtttcgtgacggtggcgtcgttgttattgtttcgaagcgaggcgaggttaggcgttgcgttttcggttgttcgtttttttttttcgtttcgcgtttagtttttttttttcgtttcgttttttgtttcgttttttttttcggcggttgttgcgtcgcgttttcggcgtattcggagttcggcggggatcgggaggtaaagacggggcggtcgtggtttcgagggcgggagttgagtcgggtttcgggatcgaagtttggcggcggtttcgggaggtagagcgggtttttcgggcgatttttaggtttttttcgcgttttcgtttcggattcgtgggtagtcggggggaacggaagtcgcggtcgggttaatttcgaggcggggacgtcgcgacgggaatttgaggtgggaattttgcgcgttgtagtttcgtcgggcgttattaaagcgcgaatcggatttcgagtttgtaaattcgggttcgggggcggttgtacgtggtcgtggttttgaattttttgcgggggtttcgaaattcgtttgcggggaggttagggcgatagaggattcgggagttatcgttggtgcgtggcggcgtggagcgcgtttgttacggttaaggtgcgggttcggtttcggtttattttaaggggttatcgggatgcgaagttcgggacgttcgtcgtcgcggtgatttt

SEQ ID NO: 29080 - DNA, 1174 bp, Artificial Sequence
  chemically treated genomic DNA (Homo sapiens) CpG-island No: 29080
aaaatcaccgcgacgacgaacgtcccgaacttcgcatcccgataaccccttaaaataaaccgaaaccgaacccgcaccttaaccgtaacaaacgcgctccacgccgccacgcaccaacgataactcccgaatcctctatcgccctaacctccccgcaaacgaatttcgaaacccccgcaaaaaattcaaaaccacgaccacgtacaaccgcccccgaacccgaatttacaaactcgaaatccgattcgcgctttaataacgcccgacgaaactacaacgcgcaaaattcccacctcaaattcccgtcgcgacgtccccgcctcgaaattaacccgaccgcgacttccgttccccccgactacccacgaatccgaaacgaaaacgcgaaaaaaacctaaaaatcgcccgaaaaacccgctctacctcccgaaaccgccgccaaacttcgatcccgaaacccgactcaactcccgccctcgaaaccacgaccgccccgtctttacctcccgatccccgccgaactccgaatacgccgaaaacgcgacgcaacaaccgccgaaaaaaaaaacgaaacaaaaaacgaaacgaaaaaaaaaaactaaacgcgaaacgaaaaaaaaaaacgaacaaccgaaaacgcaacgcctaacctcgcctcgcttcgaaacaataacaacgacgccaccgtcacgaaacgtccaaacgcccaatcgaaaccccgcaccttaaatccgaaaaccctaacgcgcctactaaattacgctcctcgcgaccaattcctaaacccgcgtccgaaactactcgcgctacgccctccctcccgttaccttcttccccgtctactctcccaaaaacgaccaccctacgaccccttcgcctacacgcgacaaccttcaaaatccccgcgctccgctaccctaaaacttcacgcaccaaacgacgcgacaacctcctaaaatcgcgcgccctatcaactttccccgcgatacaaatactccgataatcccgaatccgcgcccctaacaacaccgccccaaaatctacatatactaaatattaaaaccccactctccgctaccccgaaaccgcgctccacgcgcttacacatcctaaaaaccacatacgccatatctcctacctttccctaaaaatcctaaaaatccaaatacactac

SEQ ID NO: 29081 - DNA, 561 bp, Artificial Sequence
  chemically treated genomic DNA (Homo sapiens) CpG-island No: 29081
ataagtcgtgttttatcgggttggatttaagacgatagttatcggataaggcgtagcggtcgggttgaacggggggggattttttagagtcgatttgtaggtatgtaagtttggtattggtcgtcgttttataacgtcgtgattgggaaaaattttggcgttatttaatttaatcgttttgtagtatatttttttttcgttagttggcgtaatagcgaagaaggttcgtatcgatcgttttttttaatagttgcgtagtttgaatggggaatggcgttttgatgcgggattttttttttacgtatttgtgcgggattttatatcgtatatggggtatttttagtataatttgttttgatgtcgtatagataagttagtttcgatattcgttaatattcgttgacgcgttttgacgggtttgtttgttttcggtattcgtttatagataagttgtgatcgttttcgggagttgtatgtgttagaggatgttatcgttattatcgaaacgcgcgagacgaaagggtttcgtgatacgttttattattataggttaatgtcgtg

SEQ ID NO: 29082 - DNA, 561 bp, Artificial Sequence
  chemically treated genomic DNA (Homo sapiens) CpG-island No: 29082
cacgacattaacctataataataaaacgtatcacgaaaccctttcgtctcgcgcgtttcgataataacgataacatcctctaacacatacaactcccgaaaacgatcacaacttatctataaacgaataccgaaaacaaacaaacccgtcaaaacgcgtcaacgaatattaacgaatatcgaaactaacttatctatacgacatcaaaacaaattatactaaaaataccccatatacgatataaaatcccgcacaaatacgtaaaaaaaaaatcccgcatcaaaacgccattccccattcaaactacgcaactattaaaaaaaacgatcgatacgaaccttcttcgctattacgccaactaacgaaaaaaaaatatactacaaaacgattaaattaaataacgccaaaatttttcccaatcacgacgttataaaacgacgaccaataccaaacttacatacctacaaatcgactctaaaaaatccccccccgttcaacccgaccgctacgccttatccgataactatcgtcttaaatccaacccgataaaacacgacttat

SEQ ID NO: 29083 - DNA, 561 bp, Artificial Sequence
  chemically treated genomic DNA (Homo sapiens) CpG-island No: 29083
tacgatattaatttataataatagggcgtattacgaggttttttcgtttcgcgcgtttcggtgatgacggtgatattttttgatatatgtagttttcgaagacggttatagtttgtttgtaagcggatgtcgggagtagataagttcgttagggcgcgttagcgggtgttggcgggtgtcggggttggtttatttatgcggtattagagtagattgtattgagagtgttttatatgcggtgtaaaatttcgtatagatgcgtaagaagaaaatttcgtattagggcgttattttttatttaggttgcgtaattgttggaaagggcgatcggtgcgggtttttttcgttattacgttagttggcgaaagggggatgtgttgtaaggcgattaagttgggtaacgttagggttttttttagttacgacgttgtaaaacgacggttagtgttaagtttgtatgtttgtaggtcgattttagaggattttttttcgtttagttcgatcgttgcgttttattcggtaattatcgttttgagtttaattcggtaagatacgatttat

SEQ ID NO: 29084 - DNA, 561 bp, Artificial Sequence
  chemically treated genomic DNA (Homo sapiens) CpG-island No: 29084
ataaatcgtatcttaccgaattaaactcaaaacgataattaccgaataaaacgcaacgatcgaactaaacgaaaaaaaatcctctaaaatcgacctacaaacatacaaacttaacactaaccgtcgttttacaacgtcgtaactaaaaaaaaccctaacgttacccaacttaatcgccttacaacacatccccctttcgccaactaacgtaataacgaaaaaaacccgcaccgatcgccctttccaacaattacgcaacctaaataaaaaataacgccctaatacgaaattttcttcttacgcatctatacgaaattttacaccgcatataaaacactctcaatacaatctactctaataccgcataaataaaccaaccccgacacccgccaacacccgctaacgcgccctaacgaacttatctactcccgacatccgcttacaaacaaactataaccgtcttcgaaaactacatatatcaaaaaatatcaccgtcatcaccgaaacgcgcgaaacgaaaaaacctcgtaatacgccctattattataaattaatatcgta

SEQ ID NO: 29085 - DNA, 1026 bp, Artificial Sequence
  chemically treated genomic DNA (Homo sapiens) CpG-island No: 29085
tttttttcgttttcgcgtagttttacgtcgggcggaatggggggcggcgggggcgggcgggttcggtttgttcgcgggtgggtaggacgtttttatttttcgttttttatattcgtaaattcgtaggtatagttttcgttatcgttttattcgaattttagaatcggaatttggtcgtttattcggcgttcggggtcggttgcgggaaacgttcgtatagatagagataggcgcgtattcgggggcgtattcggggttatatacgtttttttaggcgatggggtttaggcggtttcgttcgaaggttttcgttcggttagtttatttagtcgttgtttcgtatttgttttcgtcgtttcgattcgcggtcgtttttcgcgtacgtatatcggggacgggattcggcgtcgcgattttttacgtttcgtaggcgacgttattttcggtcgtagtagttcggggttcgaggtattttttttcggagttggcgcgggatttagcgaacgggtttcggggcggagggacgtttcgggattttatagtcgtcgtgggtcgggtatcgggggttttaggaggttcgcggaggggtcgttatttattagttgaaaagcgtaaaggacgacgagcgcgtagcggtcggagtaggagtttattggtgttcgtttatataggaggttttcgggtgtttcgcgtttggttttcgttttcgtttcgttcgttttatacgcgtagtagtttcgatttcgtttttttcgtatttcgtttttttttttttttcgtaattttcggtttagttttagtttcgggtaatagttgcgttgcgtttttttttttattttcgtttgcggtttttgggggtttcgcgtcggtcggagagggggatcgtttttaaaggggcgatggcgcggtttttcgggtagcgaggggcggcgtcgcggttttaggatagatttgtagttgaggggagttcgttttggacgcggtagggatgatcggcgttcgtttttttttgtaggatgatttgtt

SEQ ID NO: 29086 - DNA, 1026 bp, Artificial Sequence
  chemically treated genomic DNA (Homo sapiens) CpG-island No: 29086
aacaaatcatcctacaaaaaaaaacgaacgccgatcatccctaccgcgtccaaaacgaactcccctcaactacaaatctatcctaaaaccgcgacgccgcccctcgctacccgaaaaaccgcgccatcgcccctttaaaaacgatccccctctccgaccgacgcgaaacccccaaaaaccgcaaacgaaaataaaaaaaaaaacgcaacgcaactattacccgaaactaaaactaaaccgaaaattacgaaaaaaaaaaaaaaacgaaatacgaaaaaaacgaaatcgaaactactacgcgtataaaacgaacgaaacgaaaacgaaaaccaaacgcgaaacacccgaaaacctcctatataaacgaacaccaataaactcctactccgaccgctacgcgctcgtcgtcctttacgcttttcaactaataaataacgacccctccgcgaacctcctaaaacccccgatacccgacccacgacgactataaaatcccgaaacgtccctccgccccgaaacccgttcgctaaatcccgcgccaactccgaaaaaaaatacctcgaaccccgaactactacgaccgaaaataacgtcgcctacgaaacgtaaaaaatcgcgacgccgaatcccgtccccgatatacgtacgcgaaaaacgaccgcgaatcgaaacgacgaaaacaaatacgaaacaacgactaaataaactaaccgaacgaaaaccttcgaacgaaaccgcctaaaccccatcgcctaaaaaaacgtatataaccccgaatacgcccccgaatacgcgcctatctctatctatacgaacgtttcccgcaaccgaccccgaacgccgaataaacgaccaaattccgattctaaaattcgaataaaacgataacgaaaactatacctacgaatttacgaatataaaaaacgaaaaataaaaacgtcctacccacccgcgaacaaaccgaacccgcccgcccccgccgccccccattccgcccgacgtaaaactacgcgaaaacgaaaaaaa

SEQ ID NO: 29087 - DNA, 1026 bp, Artificial Sequence
  chemically treated genomic DNA (Homo sapiens) CpG-island No: 29087
ggtaggttattttgtaggagggggcggacgtcggttatttttgtcgcgtttagggcgggttttttttagttgtaggtttgttttggggtcgcggcgtcgtttttcgttattcgagaggtcgcgttatcgtttttttaagaacggttttttttttcggtcggcgcgaagtttttaggggtcgtaggcgggggtgggaggggagacgtagcgtagttgttattcggggttggggttgggtcgggggttgcggggaggaggggggaacgggatgcggagggggcggggtcgaggttgttgcgcgtgtggagcgggcggagcgggggcgggggttaagcgcggggtattcgggggttttttgtataggcgggtattaatgggtttttgtttcggtcgttgcgcgttcgtcgttttttgcgttttttagttggtgagtggcgattttttcgcgagttttttggagttttcggtgttcgatttacggcggttgtggggtttcgaagcgttttttcgtttcggggttcgttcgttgggtttcgcgttagtttcgaggggggatgtttcggatttcgggttgttacggtcgaaggtggcgtcgtttgcggggcgtggggagtcgcggcgtcgggtttcgttttcggtgtgcgtgcgcggggggcggtcgcgggtcggagcggcggggataggtgcggggtagcggttggatgggttggtcggacggaagttttcgggcggggtcgtttggattttatcgtttggggaggcgtgtgtggtttcgggtgcgttttcgggtgcgcgtttgtttttgtttgtgcgagcgtttttcgtagtcggtttcgggcgtcgagtgagcggttaagtttcgattttgagattcgggtggggcgatgacggaggttgtgtttgcgagtttgcgagtgtagggggcggggggtgagaacgttttgtttattcgcgagtaaatcggattcgttcgttttcgtcgttttttatttcgttcggcgtggagttacgcggaggcgagaaggg

SEQ ID NO: 29088 - DNA, 1026 bp, Artificial Sequence
  chemically treated genomic DNA (Homo sapiens) CpG-island No: 29088
cccttctcgcctccgcgtaactccacgccgaacgaaataaaaaacgacgaaaacgaacgaatccgatttactcgcgaataaacaaaacgttctcaccccccgccccctacactcgcaaactcgcaaacacaacctccgtcatcgccccacccgaatctcaaaatcgaaacttaaccgctcactcgacgcccgaaaccgactacgaaaaacgctcgcacaaacaaaaacaaacgcgcacccgaaaacgcacccgaaaccacacacgcctccccaaacgataaaatccaaacgaccccgcccgaaaacttccgtccgaccaacccatccaaccgctaccccgcacctatccccgccgctccgacccgcgaccgccccccgcgcacgcacaccgaaaacgaaacccgacgccgcgactccccacgccccgcaaacgacgccaccttcgaccgtaacaacccgaaatccgaaacatcccccctcgaaactaacgcgaaacccaacgaacgaaccccgaaacgaaaaaacgcttcgaaaccccacaaccgccgtaaatcgaacaccgaaaactccaaaaaactcgcgaaaaaatcgccactcaccaactaaaaaacgcaaaaaacgacgaacgcgcaacgaccgaaacaaaaacccattaatacccgcctatacaaaaaacccccgaataccccgcgcttaacccccgcccccgctccgcccgctccacacgcgcaacaacctcgaccccgccccctccgcatcccgttcccccctcctccccgcaacccccgacccaaccccaaccccgaataacaactacgctacgtctcccctcccacccccgcctacgacccctaaaaacttcgcgccgaccgaaaaaaaaaaccgttcttaaaaaaacgataacgcgacctctcgaataacgaaaaacgacgccgcgaccccaaaacaaacctacaactaaaaaaaacccgccctaaacgcgacaaaaataaccgacgtccgccccctcctacaaaataacctacc

SEQ ID NO: 29089 - DNA, 656 bp, Artificial Sequence
  chemically treated genomic DNA (Homo sapiens) CpG-island No: 29089
tcgtttcgtagatttcgtttttttgtcggttttttatggttttcggtttttttatttgcgtttttttgttcggttgttttagtttcgtagttttcgttttaggtttttattcgtttcgttttcgttgttaggttttcggtgaacgcgtcgttttaaaagtattttagtttggtttcgtaggatgaacggacgtttttttcgttcggtttttaaaagttgtcgtttttcgcggttattacgattagttgcggttcggggttcggggtgggagttggattgcgtggttgcgcgtttttatggcgatcgggcgggtgcgcgcgttaggggttggggtattgaggcggaagtttcgtttttgtcgttttcgtgagattttgtaaagcgtaacgtagtcggaagttggtggcggttggtgggcgatcgggcgtatttttattgtagtgcggcggttttatttcggttttggtttgatataggcggttttgttcgtttttttttttaggtaagcgcgcggttcggcggcgcgggttcggtttgaggtttcggttgtcgcggcgtcgttttcggttttcgcgggcggatttttttgtcgtagttttttttattcggatttcgttttattttgaggttgttgttttagagtttgggggcgttta

SEQ ID NO: 29090 - DNA, 656 bp, Artificial Sequence
  chemically treated genomic DNA (Homo sapiens) CpG-island No: 29090
taaacgcccccaaactctaaaacaacaacctcaaaataaaacgaaatccgaataaaaaaaactacgacaaaaaaatccgcccgcgaaaaccgaaaacgacgccgcgacaaccgaaacctcaaaccgaacccgcgccgccgaaccgcgcgcttacctaaaaaaaaaaacgaacaaaaccgcctatatcaaaccaaaaccgaaataaaaccgccgcactacaataaaaatacgcccgatcgcccaccaaccgccaccaacttccgactacgttacgctttacaaaatctcacgaaaacgacaaaaacgaaacttccgcctcaataccccaacccctaacgcgcgcacccgcccgatcgccataaaaacgcgcaaccacgcaatccaactcccaccccgaaccccgaaccgcaactaatcgtaataaccgcgaaaaacgacaacttttaaaaaccgaacgaaaaaaacgtccgttcatcctacgaaaccaaactaaaatacttttaaaacgacgcgttcaccgaaaacctaacaacgaaaacgaaacgaataaaaacctaaaacgaaaactacgaaactaaaacaaccgaacaaaaaaacgcaaataaaaaaaccgaaaaccataaaaaaccgacaaaaaaacgaaatctacgaaacga

SEQ ID NO: 29091 - DNA, 656 bp, Artificial Sequence
  chemically treated genomic DNA (Homo sapiens) CpG-island No: 29091
tgggcgtttttaagttttggggtagtagttttagggtggagcggggttcgggtggaggaggttgcggtagggaggttcgttcgcgaaggtcggggacgacgtcgcggtagtcggggttttaggtcgagttcgcgtcgtcgagtcgcgcgtttatttggagggaggggcgggtagggtcgtttgtgttaggttagggtcgaggtagggtcgtcgtattgtaatgaggatgcgttcggtcgtttattagtcgttattagttttcggttacgttgcgttttgtaaggttttacgggagcggtaagggcgggattttcgttttagtgttttagtttttgacgcgcgtattcgttcggtcgttatggggacgcgtagttacgtagtttaatttttatttcgggtttcggatcgtagttggtcgtagtggtcgcggaggacggtagtttttgggggtcgggcgggagaagcgttcgtttattttgcggaattaagttgaggtgtttttgggacggcgcgtttatcgggggtttgataacgggggcggggcgggtgggggtttggggcgggagttgcggggttgggatagtcgggtaggaggacgtaggtaggaggatcgggggttatggaggatcggtaggggagcgaggtttacggggcgg

SEQ ID NO: 29092 - DNA, 656 bp, Artificial Sequence
  chemically treated genomic DNA (Homo sapiens) CpG-island No: 29092
ccgccccgtaaacctcgctcccctaccgatcctccataacccccgatcctcctacctacgtcctcctacccgactatcccaaccccgcaactcccgccccaaacccccacccgccccgcccccgttatcaaacccccgataaacgcgccgtcccaaaaacacctcaacttaattccgcaaaataaacgaacgcttctcccgcccgacccccaaaaactaccgtcctccgcgaccactacgaccaactacgatccgaaacccgaaataaaaattaaactacgtaactacgcgtccccataacgaccgaacgaatacgcgcgtcaaaaactaaaacactaaaacgaaaatcccgcccttaccgctcccgtaaaaccttacaaaacgcaacgtaaccgaaaactaataacgactaataaacgaccgaacgcatcctcattacaatacgacgaccctacctcgaccctaacctaacacaaacgaccctacccgcccctccctccaaataaacgcgcgactcgacgacgcgaactcgacctaaaaccccgactaccgcgacgtcgtccccgaccttcgcgaacgaacctccctaccgcaacctcctccacccgaaccccgctccaccctaaaactactaccccaaaacttaaaaacgccca

SEQ ID NO: 29093 - DNA, 1204 bp, Artificial Sequence
  chemically treated genomic DNA (Homo sapiens) CpG-island No: 29093
gtttatttggatggatgcgtggtttttggtatcgatgatgcgattgttagcggagttgtggagaaagggcgtagtgagtagaggggatttgggcggtaagaatgaaagaggggacgagggaggttgggggtatatgaatggaaaagagtaacgtcgggggtaggataagttagggacgtgacgaggtaaggacgggaggggtgtgggggaataagggtaggcgaggggacgtggtggttaggtaaggacggaagagaggtatgtggggggcgtttattattttcgcggtacgtataggtttacgaattcgtcggcgtcgttttgtatttcgaggttgggttgcgtttggggagttatcgcgcggcgtcgtgagtacggtcggaatcgtgtttcggttttcggcgtaaatcggtttttagggttacggttttagtcgtatttagtatttcgtatttcgtttttcgcgtttaagtttttattttcgttttagttttagttttgagttcgaagttcgcgtcgcgcgttatatttgttgttattatatcgcgcgcgagagagaaaggaagtagttagttattcggtagagatatcggcgggtaaggaggggtttcggcgagcgttttcgggttacgttattatagcgagtttgcgcggtgcgtgtttgtcggtcgtcgtcgtgacgtattttcgttttcggtaaggaggttttcggattttagtttgttggttttggggcgcggggcgtcgtgggggtcgttgtcgttgagggtcgttgtcgtgtgtggcgttttagtttggtttttgggttgtgttttacggacgtagtcgatttttttgagcgtttcgggagtttcgaatagtagttgggagaaggggcgaggattgagtttcgttgttcgttgtcggtcgggttagagatacgggcgtgttttttattgtgcgtttttcgtttttcggtttttttattttgcggttatttggggcgtggggcggtgtttttgttcgtgtacgtagtcgttgcgagcggaggtttgtttatttggtgtttgttatttattttttcgggtcggtgggcgaaggatattcgtaggaattcggtagaggagaaatttagacggttttcgagggtaggaaaagatttcggtttatcgtggaatttgaaatattcgattattttgttattttatgttttattagttagatt

SEQ ID NO: 29094 - DNA, 1204 bp, Artificial Sequence
  chemically treated genomic DNA (Homo sapiens) CpG-island No: 29094
aatctaactaataaaacataaaataacaaaataatcgaatatttcaaattccacgataaaccgaaatcttttcctaccctcgaaaaccgtctaaatttctcctctaccgaattcctacgaatatccttcgcccaccgacccgaaaaaataaataacaaacaccaaataaacaaacctccgctcgcaacgactacgtacacgaacaaaaacaccgccccacgccccaaataaccgcaaaataaaaaaaccgaaaaacgaaaaacgcacaataaaaaacacgcccgtatctctaacccgaccgacaacgaacaacgaaactcaatcctcgccccttctcccaactactattcgaaactcccgaaacgctcaaaaaaatcgactacgtccgtaaaacacaacccaaaaaccaaactaaaacgccacacacgacaacgaccctcaacgacaacgacccccacgacgccccgcgccccaaaaccaacaaactaaaatccgaaaacctccttaccgaaaacgaaaatacgtcacgacgacgaccgacaaacacgcaccgcgcaaactcgctataataacgtaacccgaaaacgctcgccgaaacccctccttacccgccgatatctctaccgaataactaactacttcctttctctctcgcgcgcgatataataacaacaaatataacgcgcgacgcgaacttcgaactcaaaactaaaactaaaacgaaaataaaaacttaaacgcgaaaaacgaaatacgaaatactaaatacgactaaaaccgtaaccctaaaaaccgatttacgccgaaaaccgaaacacgattccgaccgtactcacgacgccgcgcgataactccccaaacgcaacccaacctcgaaatacaaaacgacgccgacgaattcgtaaacctatacgtaccgcgaaaataataaacgccccccacatacctctcttccgtccttacctaaccaccacgtcccctcgcctacccttattcccccacacccctcccgtccttacctcgtcacgtccctaacttatcctacccccgacgttactcttttccattcatatacccccaacctccctcgtcccctctttcattcttaccgcccaaatcccctctactcactacgccctttctccacaactccgctaacaatcgcatcatcgataccaaaaaccacgcatccatccaaataaac

SEQ ID NO: 29095 - DNA, 1204 bp, Artificial Sequence
  chemically treated genomic DNA (Homo sapiens) CpG-island No: 29095
ggtttgattggtgaaatatgggatggtagagtggtcgggtgttttagattttacggtgggtcggggtttttttttattttcgggagtcgtttgaattttttttttgtcgagtttttgcgggtgtttttcgtttatcggttcgggggagtgagtagtaggtattaggtgagtaggttttcgttcgtagcggttacgtgtacgggtaggagtatcgttttacgttttaggtggtcgtagggtgaggggatcggagggcgggaggcgtataatggggggtacgttcgtatttttagttcggtcggtagcgggtagcgaggtttagttttcgtttttttttttagttgttattcggggttttcgaggcgtttagaggggtcgattgcgttcgtggggtataatttaggggttaggttaagacgttatatacggtaacgatttttaacgataacgatttttacgacgtttcgcgttttagggttagtaggttggggttcgagaatttttttgtcggaagcggaagtgcgttacggcgacggtcggtaagtacgtatcgcgtagattcgttgtggtggcgtgattcggaagcgttcgtcgaggtttttttttgttcgtcgatatttttgtcgggtgattagttgttttttttttttttcgcgcgcggtgtggtggtagtaggtgtggcgcgcggcgcgggtttcgggtttagggttggggttggggcgggagtgggggtttggacgcgggggacggggtgcggggtgttgggtgcggttggggtcgtgattttaggggtcggtttgcgtcgggagtcggggtacggtttcggtcgtatttacggcgtcgcgcggtgattttttaggcgtagtttagtttcgaaatgtagaacgacgtcggcgagttcgtggatttgtacgtgtcgcggaaatggtaagcgttttttatatgtttttttttcgtttttatttaattattacgttttttcgtttgtttttgtttttttatatttttttcgtttttatttcgttacgtttttaatttgttttgttttcgacgttatttttttttatttatatatttttaatttttttcgtttttttttttatttttatcgtttaagttttttttgtttattgcgttttttttttatagtttcgttagtaatcgtattatcggtgttaaggattacgtatttatttagatgaat

SEQ ID NO: 29096 - DNA, 1204 bp, Artificial Sequence
  chemically treated genomic DNA (Homo sapiens) CpG-island No: 29096
attcatctaaataaatacgtaatccttaacaccgataatacgattactaacgaaactataaaaaaaaaacgcaataaacaaaaaaaacttaaacgataaaaataaaaaaaaaaacgaaaaaaattaaaaatatataaataaaaaaaaataacgtcgaaaacaaaacaaattaaaaacgtaacgaaataaaaacgaaaaaaatataaaaaaacaaaaacaaacgaaaaaacgtaataattaaataaaaacgaaaaaaaaacatataaaaaacgcttaccatttccgcgacacgtacaaatccacgaactcgccgacgtcgttctacatttcgaaactaaactacgcctaaaaaatcaccgcgcgacgccgtaaatacgaccgaaaccgtaccccgactcccgacgcaaaccgacccctaaaatcacgaccccaaccgcacccaacaccccgcaccccgtcccccgcgtccaaacccccactcccgccccaaccccaaccctaaacccgaaacccgcgccgcgcgccacacctactaccaccacaccgcgcgcgaaaaaaaaaaaaaacaactaatcacccgacaaaaatatcgacgaacaaaaaaaaacctcgacgaacgcttccgaatcacgccaccacaacgaatctacgcgatacgtacttaccgaccgtcgccgtaacgcacttccgcttccgacaaaaaaattctcgaaccccaacctactaaccctaaaacgcgaaacgtcgtaaaaatcgttatcgttaaaaatcgttaccgtatataacgtcttaacctaacccctaaattataccccacgaacgcaatcgacccctctaaacgcctcgaaaaccccgaataacaactaaaaaaaaaaacgaaaactaaacctcgctacccgctaccgaccgaactaaaaatacgaacgtaccccccattatacgcctcccgccctccgatcccctcaccctacgaccacctaaaacgtaaaacgatactcctacccgtacacgtaaccgctacgaacgaaaacctactcacctaatacctactactcactcccccgaaccgataaacgaaaaacacccgcaaaaactcgacaaaaaaaaaattcaaacgactcccgaaaataaaaaaaaaccccgacccaccgtaaaatctaaaacacccgaccactctaccatcccatatttcaccaatcaaacc

SEQ ID NO: 29097 - DNA, 697 bp, Artificial Sequence
  chemically treated genomic DNA (Homo sapiens) CpG-island No: 29097
taacgtttcgcgtttaggttttttataggagggttcgagttttttagtatcggaggtttgggggcgtacgagtcgttttttttttggagaagtttcggatcgagaggatatcggatattgcgtagcgtcgagtttcgcgcgtagttcgggacgttttagttagggtcgatcgcgtagaggaagtttttagagttcgttttaagatcgtagttaatagttttaggcgtatacggcggtttcggagcgagtacgcgtagtaacgtttttcgtttcggttcgttttcggtttcgttttcggtttcgttttcggtttcgtttcgtaagggttataggttacggggcggggtcgaggcggaagcgttcgtagttcggtatcggttttttttgggttttttttagcgtttttttttcggttcgatttcgttggttagcgttaagtgatttacgttttcgattttgagttcggatcgttaggcgaggaggattagattttcgttcgagaatttgaaggtgttttggttttggaggagtttcgttttagttcgcggtttttcggtattgtcgggtttcggttttttggagttttaggaggcggtcgttagggtcggggagtatttgggttcggggttttagggaagggcggcgtttgggtttgcggtatcggaaagagtttgttggagttaagtagttttttttt

SEQ ID NO: 29098 - DNA, 697 bp, Artificial Sequence
  chemically treated genomic DNA (Homo sapiens) CpG-island No: 29098
aaaaaaaaactacttaactccaacaaactctttccgataccgcaaacccaaacgccgcccttccctaaaaccccgaacccaaatactccccgaccctaacgaccgcctcctaaaactccaaaaaaccgaaacccgacaataccgaaaaaccgcgaactaaaacgaaactcctccaaaaccaaaacaccttcaaattctcgaacgaaaatctaatcctcctcgcctaacgatccgaactcaaaatcgaaaacgtaaatcacttaacgctaaccaacgaaatcgaaccgaaaaaaaaacgctaaaaaaaacccaaaaaaaaccgataccgaactacgaacgcttccgcctcgaccccgccccgtaacctataacccttacgaaacgaaaccgaaaacgaaaccgaaaacgaaaccgaaaacgaaccgaaacgaaaaacgttactacgcgtactcgctccgaaaccgccgtatacgcctaaaactattaactacgatcttaaaacgaactctaaaaacttcctctacgcgatcgaccctaactaaaacgtcccgaactacgcgcgaaactcgacgctacgcaatatccgatatcctctcgatccgaaacttctccaaaaaaaaaacgactcgtacgcccccaaacctccgatactaaaaaactcgaaccctcctataaaaaacctaaacgcgaaacgtta

SEQ ID NO: 29099 - DNA, 697 bp, Artificial Sequence
  chemically treated genomic DNA (Homo sapiens) CpG-island No: 29099
gagggagggttatttggttttagtaggtttttttcgatatcgtagatttaggcgtcgtttttttttgagatttcggatttaaatatttttcgattttgacggtcgttttttgaagttttagagggtcggggttcgatagtatcgggagatcgcgggttgggacggaatttttttaggattagggtatttttagattttcgagcggagatttgatttttttcgtttagcggttcgggtttagggtcgggggcgtaagttatttggcgttgattagcggagtcgggtcggggggaaggcgttagagggagtttaggaggagtcggtatcgggttgcgggcgttttcgtttcggtttcgtttcgtgatttgtgatttttgcggggcggggtcgggggcggggtcgggggcggggtcgggggcgggtcggggcgaggggcgttgttgcgcgtgttcgtttcgaggtcgtcgtgtgcgtttgaggttgttggttgcggttttgaaacgggttttgggagttttttttgcgcggtcggttttggttgaggcgtttcgggttgcgcgcggggttcggcgttgcgtagtgttcggtgttttttcggttcggagtttttttagaggaggagcggttcgtgcgtttttagattttcggtattgggagattcgggtttttttgtaagagatttgagcgcggagcgtta

SEQ ID NO: 29100 - DNA, 697 bp, Artificial Sequence
  chemically treated genomic DNA (Homo sapiens) CpG-island No: 29100
taacgctccgcgctcaaatctcttacaaaaaaacccgaatctcccaataccgaaaatctaaaaacgcacgaaccgctcctcctctaaaaaaactccgaaccgaaaaaacaccgaacactacgcaacgccgaaccccgcgcgcaacccgaaacgcctcaaccaaaaccgaccgcgcaaaaaaaactcccaaaacccgtttcaaaaccgcaaccaacaacctcaaacgcacacgacgacctcgaaacgaacacgcgcaacaacgcccctcgccccgacccgcccccgaccccgcccccgaccccgcccccgaccccgccccgcaaaaatcacaaatcacgaaacgaaaccgaaacgaaaacgcccgcaacccgataccgactcctcctaaactccctctaacgccttccccccgacccgactccgctaatcaacgccaaataacttacgcccccgaccctaaacccgaaccgctaaacgaaaaaaatcaaatctccgctcgaaaatctaaaaataccctaatcctaaaaaaattccgtcccaacccgcgatctcccgatactatcgaaccccgaccctctaaaacttcaaaaaacgaccgtcaaaatcgaaaaatatttaaatccgaaatctcaaaaaaaaacgacgcctaaatctacgatatcgaaaaaaacctactaaaaccaaataaccctccctc

SEQ ID NO: 29101 - DNA, 1167 bp, Artificial Sequence
  chemically treated genomic DNA (Homo sapiens) CpG-island No: 29101
tcgagatttgatcgtcgtttagtagcgtcgcgttcgtttttttttcgttggttttttcgtcgttgtttttttcgttgtcgtggtttagtttagtatagcgtcgtaggtttattagttttagttgcgtgtgtttatttattattagcgtgtatttgatcgcgtcgtatattagcgacgcgtttcgcggcgtcgaggggttcgtgtttttgttttcgggggatttcgtattgttttcggtatttttttttttttcgtcgtttttttcgttttttttttcggagtaggcggcggagtaggttcgtttcgggcgggcggcgcggtcgggcgcggtttatagcggcgtgatggtgttacgcgtggggttgttgaggaataggtagggttcgggttgcgcggggtcgggtcgaggcgcggcgggcgcgggcggcggcggcgcgtatagcgtttttatgtttattagttttacgtcgtcgggtttcgcggtcgtttcggggttttgggagttttgggcggtttcgtcggtcggcgatacgggtttttcgggcgggcgcggcgtaggagataggtattggtcggggtagcggatgggcgaggagttttcggagattatgcggtttattaggttgttgagtagttagggcgagttcgcgttttcgttgaggttcggtttcgatttcgatttcgattcgtattcgttgttggtgtcgtcggggtttacgggtaggaaggcggggcggcgcgggggttcgcgcgggggtttcggtttcgaggcgggcgacgaggttttttcgatggagttggtgaggtgcgaggagcggtcgttgttgttgttttcgttatcgttgtttagttttagtttcgttttcgagatggacgagattatgcgttttaggcggcgtcgttcgcgtttttcgagtcggagtcgggcgaggatagtttttggttgttgcgacgtttttcgcggtcgtcgttcgagcggttttttaggttagtttcgatgtcgggatttgaggagggcgaagttttttttggcgtagggggtttcgtaggtcggtttttttcgtagtcgtaattcgggcgtattggcgattgcgtttcgtcgggttcggtgttcgtggtagggagggggttcgggagttttgttgggtagggaggtggggttatttt

SEQ ID NO: 29102 - DNA, 1167 bp, Artificial Sequence
  chemically treated genomic DNA (Homo sapiens) CpG-island No: 29102
aaaataaccccacctccctacccaacaaaactcccgaaccccctccctaccacgaacaccgaacccgacgaaacgcaatcgccaatacgcccgaattacgactacgaaaaaaaccgacctacgaaaccccctacgccaaaaaaaacttcgccctcctcaaatcccgacatcgaaactaacctaaaaaaccgctcgaacgacgaccgcgaaaaacgtcgcaacaaccaaaaactatcctcgcccgactccgactcgaaaaacgcgaacgacgccgcctaaaacgcataatctcgtccatctcgaaaacgaaactaaaactaaacaacgataacgaaaacaacaacaacgaccgctcctcgcacctcaccaactccatcgaaaaaacctcgtcgcccgcctcgaaaccgaaacccccgcgcgaacccccgcgccgccccgccttcctacccgtaaaccccgacgacaccaacaacgaatacgaatcgaaatcgaaatcgaaaccgaacctcaacgaaaacgcgaactcgccctaactactcaacaacctaataaaccgcataatctccgaaaactcctcgcccatccgctaccccgaccaatacctatctcctacgccgcgcccgcccgaaaaacccgtatcgccgaccgacgaaaccgcccaaaactcccaaaaccccgaaacgaccgcgaaacccgacgacgtaaaactaataaacataaaaacgctatacgcgccgccgccgcccgcgcccgccgcgcctcgacccgaccccgcgcaacccgaaccctacctattcctcaacaaccccacgcgtaacaccatcacgccgctataaaccgcgcccgaccgcgccgcccgcccgaaacgaacctactccgccgcctactccgaaaaaaaaaacgaaaaaaacgacgaaaaaaaaaaaaataccgaaaacaatacgaaatcccccgaaaacaaaaacacgaacccctcgacgccgcgaaacgcgtcgctaatatacgacgcgatcaaatacacgctaataataaataaacacacgcaactaaaactaataaacctacgacgctatactaaactaaaccacgacaacgaaaaaaacaacgacgaaaaaaccaacgaaaaaaaaacgaacgcgacgctactaaacgacgatcaaatctcga

SEQ ID NO: 29103 - DNA, 1167 bp, Artificial Sequence
  chemically treated genomic DNA (Homo sapiens) CpG-island No: 29103
agggtgattttatttttttgtttagtagagttttcgggttttttttttgttacggatatcgggttcggcggggcgtagtcgttagtgcgttcgggttgcgattgcgaagggaatcggtttgcggaattttttgcgttaggggggatttcgttttttttagatttcggtatcgaggttgatttgagaagtcgttcgagcggcggtcgcgggggacgtcgtagtagttaggagttgttttcgttcggtttcgattcggaggacgcgggcggcgtcgtttggggcgtatgatttcgtttatttcggagacggagttggagttgagtagcgatggcggaagtagtagtagcggtcgtttttcgtattttattaattttatcgaggaggtttcgtcgttcgtttcggagtcggagttttcgcgcgaattttcgcgtcgtttcgtttttttgttcgtgggtttcgacgatattaatagcgagtacgagtcggggtcggagtcggagtcggattttagcgaggacgcggattcgttttggttgtttagtaatttggtgagtcgtatgattttcgagggtttttcgtttattcgttgtttcggttagtgtttgttttttgcgtcgcgttcgttcggggagttcgtgtcgtcggtcggcggggtcgtttaggatttttaggatttcgaggcggtcgcggggttcggcggcgtggagttggtggatatggagacgttgtgcgcgtcgtcgtcgttcgcgttcgtcgcgtttcgattcggtttcgcgtagttcgggttttgtttattttttagtaattttacgcgtgatattattacgtcgttgtgggtcgcgttcggtcgcgtcgttcgttcgggacgagtttgtttcgtcgtttgtttcgaggaggaggacgaagaggacgacgaggaagaggaggatgtcgaggatagtgcggggtttttcgggggtaggggtacgggtttttcggcgtcgcgggacgcgtcgttggtgtacgacgcggttaagtatacgttggtggtggatgagtatacgtagttggagttggtgagtttgcggcgttgtgttgggttgggttacgatagcgaagaggatagcggcggggaggttagcgaggaggaggcgggcgcggcgttgttaggcggcggttaggtttcgg

SEQ ID NO: 29104 - DNA, 1167 bp, Artificial Sequence
  chemically treated genomic DNA (Homo sapiens) CpG-island No: 29104
ccgaaacctaaccgccgcctaacaacgccgcgcccgcctcctcctcgctaacctccccgccgctatcctcttcgctatcgtaacccaacccaacacaacgccgcaaactcaccaactccaactacgtatactcatccaccaccaacgtatacttaaccgcgtcgtacaccaacgacgcgtcccgcgacgccgaaaaacccgtacccctacccccgaaaaaccccgcactatcctcgacatcctcctcttcctcgtcgtcctcttcgtcctcctcctcgaaacaaacgacgaaacaaactcgtcccgaacgaacgacgcgaccgaacgcgacccacaacgacgtaataatatcacgcgtaaaattactaaaaaataaacaaaacccgaactacgcgaaaccgaatcgaaacgcgacgaacgcgaacgacgacgacgcgcacaacgtctccatatccaccaactccacgccgccgaaccccgcgaccgcctcgaaatcctaaaaatcctaaacgaccccgccgaccgacgacacgaactccccgaacgaacgcgacgcaaaaaacaaacactaaccgaaacaacgaataaacgaaaaaccctcgaaaatcatacgactcaccaaattactaaacaaccaaaacgaatccgcgtcctcgctaaaatccgactccgactccgaccccgactcgtactcgctattaatatcgtcgaaacccacgaacaaaaaaacgaaacgacgcgaaaattcgcgcgaaaactccgactccgaaacgaacgacgaaacctcctcgataaaattaataaaatacgaaaaacgaccgctactactacttccgccatcgctactcaactccaactccgtctccgaaataaacgaaatcatacgccccaaacgacgccgcccgcgtcctccgaatcgaaaccgaacgaaaacaactcctaactactacgacgtcccccgcgaccgccgctcgaacgacttctcaaatcaacctcgataccgaaatctaaaaaaaacgaaatcccccctaacgcaaaaaattccgcaaaccgattcccttcgcaatcgcaacccgaacgcactaacgactacgccccgccgaacccgatatccgtaacaaaaaaaaaacccgaaaactctactaaacaaaaaaataaaatcaccct

SEQ ID NO: 29105 - DNA, 1098 bp, Artificial Sequence
  chemically treated genomic DNA (Homo sapiens) CpG-island No: 29105
tcgggatacgtcgcgtcgggagggtgtgttcgtatttcgttcgtattttttttcgtagagggtcggtttagggtttttatttttgataggttagtcgtttaggtcgggcgcggtttagaatttcggcggggttcgggggttattgaggttggggacgcgcggtgaagatggagggagtgggagcggggtgggggtggggcgttcgagtcgaggtttagggatcgtagggggtcggggtcgggttcgcgtcggcggcggggttggggcggcggggacgggggttcgggtcgggtcggggtcgggggggtgcgtagggagcggagggttcgttcggttcgggcgtcgaggggggtatttgtagttcggcggcgatagcgagtggaaggtggagagagaaaatattttcgcgcgattcgttatttttttcgggagaggttcgcgattgcggcggggggtgcgggagtttcgtcgcgtttcgcgtcggcgttcggttcgtttcgtttatttcgtgatacgttttgcggcgttcgtttcgcgtatttcgttcggatttcgcggcggcgcggggagggcggcgggggaggcgggggagggacgcggtcggggacgttggttggaggagaggcggcggttttattgtcgggcgttggttggggaagggtcgggcgtgcgatgaggatttttttcggggaggggcgggagggaaggggcgggcgggtgggcgtcgggtttcgttttggaggattcgcgcggggcgggaggtcgaggaggtagcgtcggggttcgcgggtttcgggttcgtcgtgggttgttttttttgggcgagaggtcggggcggtttcgggagttgcgtcgtcgcgtttaggatttttttaggaattttaattcgggtgcggttcggagcggggtggcgggcgaggcgggaggcgcgggaggagttgttcgtcgtcgggtgttgatcggagttgtttttacggggtgttgatcggggttgtacggggacgtttgtacgagggtcgtcgagtagggttggatttagaatcgagtataaggtatttagaggatgttggttggggttaaaagtggattttgagtatt

SEQ ID NO: 29106 - DNA, 1098 bp, Artificial Sequence
  chemically treated genomic DNA (Homo sapiens) CpG-island No: 29106
aatactcaaaatccacttttaaccccaaccaacatcctctaaataccttatactcgattctaaatccaaccctactcgacgaccctcgtacaaacgtccccgtacaaccccgatcaacaccccgtaaaaacaactccgatcaacacccgacgacgaacaactcctcccgcgcctcccgcctcgcccgccaccccgctccgaaccgcacccgaattaaaattcctaaaaaaatcctaaacgcgacgacgcaactcccgaaaccgccccgacctctcgcccaaaaaaaacaacccacgacgaacccgaaacccgcgaaccccgacgctacctcctcgacctcccgccccgcgcgaatcctccaaaacgaaacccgacgcccacccgcccgccccttccctcccgcccctccccgaaaaaaatcctcatcgcacgcccgacccttccccaaccaacgcccgacaataaaaccgccgcctctcctccaaccaacgtccccgaccgcgtccctcccccgcctcccccgccgccctccccgcgccgccgcgaaatccgaacgaaatacgcgaaacgaacgccgcaaaacgtatcacgaaataaacgaaacgaaccgaacgccgacgcgaaacgcgacgaaactcccgcaccccccgccgcaatcgcgaacctctcccgaaaaaaataacgaatcgcgcgaaaatattttctctctccaccttccactcgctatcgccgccgaactacaaatacccccctcgacgcccgaaccgaacgaaccctccgctccctacgcacccccccgaccccgacccgacccgaacccccgtccccgccgccccaaccccgccgccgacgcgaacccgaccccgaccccctacgatccctaaacctcgactcgaacgccccacccccaccccgctcccactccctccatcttcaccgcgcgtccccaacctcaataacccccgaaccccgccgaaattctaaaccgcgcccgacctaaacgactaacctatcaaaaataaaaaccctaaaccgaccctctacgaaaaaaaatacgaacgaaatacgaacacaccctcccgacgcgacgtatcccga

SEQ ID NO: 29107 - DNA, 1098 bp, Artificial Sequence
  chemically treated genomic DNA (Homo sapiens) CpG-island No: 29107
agtgtttaaagtttatttttagttttagttagtattttttgagtattttgtgttcgattttgaatttagttttgttcggcgattttcgtgtagacgttttcgtgtagtttcggttagtatttcgtggggatagtttcgattagtattcgacggcggatagtttttttcgcgtttttcgtttcgttcgttatttcgtttcgggtcgtattcgggttagggtttttggggggattttgggcgcggcggcgtagttttcggggtcgtttcggtttttcgtttagaggaaatagtttacggcgaattcgaggttcgcggatttcggcgttgttttttcggtttttcgtttcgcgcgggttttttagggcggggttcgacgtttattcgttcgttttttttttttcgttttttttcgggaaaaatttttatcgtacgttcggtttttttttaattagcgttcggtagtgaagtcgtcgttttttttttaattagcgttttcggtcgcgtttttttttcgtttttttcgtcgtttttttcgcgtcgtcgcggagttcgggcgaggtgcgcggggcggacgtcgtagggcgtgttacgaggtgagcggggcgggtcgagcgtcggcgcggggcgcggcgaggttttcgtatttttcgtcgtagtcgcgggtttttttcggagaagatggcggatcgcgcggagatgttttttttttttattttttattcgttgtcgtcgtcgggttgtaggtatttttttcggcgttcgggtcgggcggatttttcgttttttgcgtattttttcgatttcgattcggttcggattttcgttttcgtcgttttagtttcgtcgtcggcgcggattcggtttcggttttttgcggtttttgagtttcggttcgggcgttttatttttatttcgtttttattttttttatttttatcgcgcgtttttagttttagtgattttcgggtttcgtcgggattttgagtcgcgttcggtttggacggttgatttgttaagggtggaggttttgggtcgattttttgcgggggaggatgcgggcgggatgcgggtatattttttcggcgcggcgtgtttcgg

SEQ ID NO: 29108 - DNA, 1098 bp, Artificial Sequence
  chemically treated genomic DNA (Homo sapiens) CpG-island No: 29108
ccgaaacacgccgcgccgaaaaaatatacccgcatcccgcccgcatcctcccccgcaaaaaatcgacccaaaacctccacccttaacaaatcaaccgtccaaaccgaacgcgactcaaaatcccgacgaaacccgaaaatcactaaaactaaaaacgcgcgataaaaataaaaaaaataaaaacgaaataaaaataaaacgcccgaaccgaaactcaaaaaccgcaaaaaaccgaaaccgaatccgcgccgacgacgaaactaaaacgacgaaaacgaaaatccgaaccgaatcgaaatcgaaaaaatacgcaaaaaacgaaaaatccgcccgacccgaacgccgaaaaaaatacctacaacccgacgacgacaacgaataaaaaataaaaaaaaaaaacatctccgcgcgatccgccatcttctccgaaaaaaacccgcgactacgacgaaaaatacgaaaacctcgccgcgccccgcgccgacgctcgacccgccccgctcacctcgtaacacgccctacgacgtccgccccgcgcacctcgcccgaactccgcgacgacgcgaaaaaaacgacgaaaaaaacgaaaaaaaaacgcgaccgaaaacgctaattaaaaaaaaaacgacgacttcactaccgaacgctaattaaaaaaaaaccgaacgtacgataaaaatttttcccgaaaaaaaacgaaaaaaaaaaaacgaacgaataaacgtcgaaccccgccctaaaaaacccgcgcgaaacgaaaaaccgaaaaaacaacgccgaaatccgcgaacctcgaattcgccgtaaactatttcctctaaacgaaaaaccgaaacgaccccgaaaactacgccgccgcgcccaaaatccccccaaaaaccctaacccgaatacgacccgaaacgaaataacgaacgaaacgaaaaacgcgaaaaaaactatccgccgtcgaatactaatcgaaactatccccacgaaatactaaccgaaactacacgaaaacgtctacacgaaaatcgccgaacaaaactaaattcaaaatcgaacacaaaatactcaaaaaatactaactaaaactaaaaataaactttaaacact

SEQ ID NO: 29109 - DNA, 1030 bp, Artificial Sequence
  chemically treated genomic DNA (Homo sapiens) CpG-island No: 29109
cggacgtcgtagatttgtgggagtagcgcggaatgtttcgttttttttttcgaggatatttaatgagggcgagaggttattttcggggagggttcgttaacggaaagggcggggtatttttttcgaggagcggttttgttttttaagcggtcgttgggggcgttagagtaggatcggagcgcgggttaagttggaggtgagcgaggtcgcgtttttttgggtttcggtttttttaacgcgttttgacggttgggtttcgtttgattttgttttagcgttcgcggtggtattaattttaagttagatttttgatttcgatttaattttatttattcgattttatttattttatattttatgtttttttttcgacgttttttatttcgttttattttttattttttatcgtttacgttatcgtttattcgtttttttatttagtttcgttttttattttttatttcgttttattttttatttcgttttattttttattttttatttcgttttattttttattttttatttcgttttattttttatttttttttatttcgttttattcgtttcgttttttattttttatttttttttatttcgttttattttttattttttatttcgttttattttttatttcgttttattttttatttcgttttattttttattttttatttcgttttattttttattttttatttcgttttattttttattttttatttcgttttattttttattttttatttcgttttattttttattttttatttcgttttatttttttttatttcgttttattcgtttcgttttttattttttatcgtttacgttatcgtttattcgtttttttatttagttttattttttatttcgttttattttttatttcgttttattttttatttttttttatttcgttttatttcgttttatttttttttcgttttttttattgtatattttatattttattttttttattttatattttttattttagttttttatttttttaatttaattt

SEQ ID NO: 29110 - DNA, 1030 bp, Artificial Sequence
  chemically treated genomic DNA (Homo sapiens) CpG-island No: 29110
aaattaaattaaaaaaataaaaaactaaaataaaaaatataaaataaaaaaaataaaatataaaatatacaataaaaaaaacgaaaaaaaaataaaacgaaataaaacgaaataaaaaaaaataaaaaataaaacgaaataaaaaataaaacgaaataaaaaataaaactaaataaaaaaacgaataaacgataacgtaaacgataaaaaataaaaaacgaaacgaataaaacgaaataaaaaaaaataaaacgaaataaaaaataaaaaataaaacgaaataaaaaataaaaaataaaacgaaataaaaaataaaaaataaaacgaaataaaaaataaaaaataaaacgaaataaaaaataaaaaataaaacgaaataaaaaataaaacgaaataaaaaataaaacgaaataaaaaataaaaaataaaacgaaataaaaaaaaataaaaaataaaaaacgaaacgaataaaacgaaataaaaaaaaataaaaaataaaacgaaataaaaaataaaaaataaaacgaaataaaaaataaaaaataaaacgaaataaaaaataaaacgaaataaaaaataaaaaacgaaactaaataaaaaaacgaataaacgataacgtaaacgataaaaaataaaaaataaaacgaaataaaaaacgtcgaaaaaaaaacataaaatataaaataaataaaatcgaataaataaaattaaatcgaaatcaaaaatctaacttaaaattaataccaccgcgaacgctaaaacaaaatcaaacgaaacccaaccgtcaaaacgcgttaaaaaaaccgaaacccaaaaaaacgcgacctcgctcacctccaacttaacccgcgctccgatcctactctaacgcccccaacgaccgcttaaaaaacaaaaccgctcctcgaaaaaaataccccgccctttccgttaacgaaccctccccgaaaataacctctcgccctcattaaatatcctcgaaaaaaaaaacgaaacattccgcgctactcccacaaatctacgacgtccg

SEQ ID NO: 29111 - DNA, 1030 bp, Artificial Sequence
  chemically treated genomic DNA (Homo sapiens) CpG-island No: 29111
agattaggttaagggggtgaaggattgaggtgagggatgtaaggtggggagagtggggtatggagtgtgtagtgaggggagcgggggaggggtgaggcggggtgaggcggggtgaggaggggtgaggggtgaggcggggtgaggggtgaggcggggtgaggggtgaggttgggtgaggaggcgggtgaacggtgacgtgagcgatgaggggtgaggggcgaggcgggtgaggcggggtaaggaggggtgaggcggggtgaggggtgaagggtgaggcggggtgaggggtgaagggtgaggcggggtgaggggtgaggggtgaggcggggtgaggggtgaagggtgaggcggggtgaggggtgaagggtgaggcggggtgaggggtgaggcggggtgaggggtgaggcggggtgaggggtgaggggtgaggcggggtgaggaggggtgaggggtgaggggcgaggcgggtgaggcggggtgaggaggggtgaggggtgaggcgggatgaggggtgaggggtgaggcgggatgaggggtgaggggtgaggcggggtgaggggtgaggcggggtgaggggtgaggggcgaggttgggtgaggaggcgggtgagcggtgacgtgagcgatgaggggtgaagggtgaggcggggtgaggggcgtcgggggaggggtatggggtgtggagtgagtggagtcgggtgagtggagttgggtcgaagttaagggtttggtttgaggttggtgttatcgcgaacgttaggatagggttaggcggagtttagtcgttagggcgcgttgggagggtcggggtttaggggggcgcggtttcgtttatttttagtttggttcgcgtttcggttttgttttggcgtttttagcggtcgtttgaggaataaggtcgtttttcgagagggatgtttcgtttttttcgttagcgaatttttttcggaagtgatttttcgtttttattgggtgttttcgggaaaaggggcggggtatttcgcgttgtttttataggtttgcggcgttcg

SEQ ID NO: 29112 - DNA, 1030 bp, Artificial Sequence
  chemically treated genomic DNA (Homo sapiens) CpG-island No: 29112
cgaacgccgcaaacctataaaaacaacgcgaaataccccgccccttttcccgaaaacacccaataaaaacgaaaaatcacttccgaaaaaaattcgctaacgaaaaaaacgaaacatccctctcgaaaaacgaccttattcctcaaacgaccgctaaaaacgccaaaacaaaaccgaaacgcgaaccaaactaaaaataaacgaaaccgcgcccccctaaaccccgaccctcccaacgcgccctaacgactaaactccgcctaaccctatcctaacgttcgcgataacaccaacctcaaaccaaacccttaacttcgacccaactccactcacccgactccactcactccacaccccatacccctcccccgacgcccctcaccccgcctcacccttcacccctcatcgctcacgtcaccgctcacccgcctcctcacccaacctcgcccctcacccctcaccccgcctcacccctcaccccgcctcacccctcacccctcatcccgcctcacccctcacccctcatcccgcctcacccctcacccctcctcaccccgcctcacccgcctcgcccctcacccctcacccctcctcaccccgcctcacccctcacccctcaccccgcctcacccctcaccccgcctcacccctcaccccgcctcacccttcacccctcaccccgcctcacccttcacccctcaccccgcctcacccctcacccctcaccccgcctcacccttcacccctcaccccgcctcacccttcacccctcaccccgcctcacccctccttaccccgcctcacccgcctcgcccctcacccctcatcgctcacgtcaccgttcacccgcctcctcacccaacctcacccctcaccccgcctcacccctcaccccgcctcacccctcacccctcctcaccccgcctcaccccgcctcacccctcccccgctcccctcactacacactccataccccactctccccaccttacatccctcacctcaatccttcacccccttaacctaatct

SEQ ID NO: 29113 - DNA, 983 bp, Artificial Sequence
  chemically treated genomic DNA (Homo sapiens) CpG-island No: 29113
cggtttcgcgaggttagcggtgttttcgggttcgtagtatcggaagtttcgcggttggagtttcgggattcggtattcggattatttggtttcgttggtgatcgacgcggataattgattcgttaggcgggagcggttttatacgtgtttgtttaaagtttgcgagttcgtatcgtgttcgtttttttttttttttttttgcgcgttttggcgtaaggtttggggtggagttacggttggggtcgtgttttaatttcgaatttagcggggcggggttcgagcgtcgggcgaggtcgggattttagcgttgcgtcgcgttcgaacgtcgagattttatcgagggcgggagggggattttcgggagttatagacgttcgagatttacgtcgggcgggatcggttagggattattttcgtcgacggtttcgggtttcgacggttcggaagtttcgcgtgttcgggggtatcgggggattggtcggggcgcggcgtgtaaggtttttcgggggcggcgattgtcgagtttcgttttttaggcggttttattcgtttgtcgttttggggcgtcgtcgtttcgtcgtcggtagtggatcgttgtgcgcgaattttgaattttacggtttcgattcgcgggcgaggtcgggtatttgggttgggattcggagtaagcgggcgagggtagcgttttaagtaggtacgggcggggtttaagtcgcgaggcggggaagcgggaggtagatacggacgagggcgatatagatacgggatcgaggggcggatatcggagagatacgggaaaggggtcgggataggagtacgtggtttagatatcgacgtcgggaggtcgtagatttcggacgtgttaggtattttcgtaggttcggagcgatggtagttttgatgatttcgggaatcggggttttattcgcgtttggtgattttttcggggaagggagttagggatttttcgatttttcgttaga

SEQ ID NO: 29114 - DNA, 983 bp, Artificial Sequence
  chemically treated genomic DNA (Homo sapiens) CpG-island No: 29114
tctaacgaaaaatcgaaaaatccctaactcccttccccgaaaaaatcaccaaacgcgaataaaaccccgattcccgaaatcatcaaaactaccatcgctccgaacctacgaaaatacctaacacgtccgaaatctacgacctcccgacgtcgatatctaaaccacgtactcctatcccgacccctttcccgtatctctccgatatccgcccctcgatcccgtatctatatcgccctcgtccgtatctacctcccgcttccccgcctcgcgacttaaaccccgcccgtacctacttaaaacgctaccctcgcccgcttactccgaatcccaacccaaatacccgacctcgcccgcgaatcgaaaccgtaaaattcaaaattcgcgcacaacgatccactaccgacgacgaaacgacgacgccccaaaacgacaaacgaataaaaccgcctaaaaaacgaaactcgacaatcgccgcccccgaaaaaccttacacgccgcgccccgaccaatcccccgatacccccgaacacgcgaaacttccgaaccgtcgaaacccgaaaccgtcgacgaaaataatccctaaccgatcccgcccgacgtaaatctcgaacgtctataactcccgaaaatccccctcccgccctcgataaaatctcgacgttcgaacgcgacgcaacgctaaaatcccgacctcgcccgacgctcgaaccccgccccgctaaattcgaaattaaaacacgaccccaaccgtaactccaccccaaaccttacgccaaaacgcgcaaaaaaaaaaaaaaaaaaacgaacacgatacgaactcgcaaactttaaacaaacacgtataaaaccgctcccgcctaacgaatcaattatccgcgtcgatcaccaacgaaaccaaataatccgaataccgaatcccgaaactccaaccgcgaaacttccgatactacgaacccgaaaacaccgctaacctcgcgaaaccg

SEQ ID NO: 29115 - DNA, 983 bp, Artificial Sequence
  chemically treated genomic DNA (Homo sapiens) CpG-island No: 29115
tttggcgaagggtcgggaagtttttggttttttttttcggagaagttattaggcgcgggtggggtttcggttttcggggttattaaggttgttatcgtttcgggtttgcggggatgtttgatacgttcggggtttgcggtttttcggcgtcggtgtttgagttacgtgtttttgtttcgatttttttttcgtgttttttcggtgttcgtttttcggtttcgtgtttgtgtcgttttcgttcgtgtttgtttttcgttttttcgtttcgcgatttgagtttcgttcgtatttgtttagggcgttgttttcgttcgtttgtttcggattttagtttaggtattcggtttcgttcgcgggtcgggatcgtagggtttagggttcgcgtatagcggtttattgtcggcggcggggcggcggcgttttaggacggtaggcgggtggggtcgtttggagggcggagttcggtagtcgtcgttttcgggaagttttgtacgtcgcgtttcggttaatttttcggtgttttcggatacgcggaattttcgggtcgtcggggttcggggtcgtcggcgggggtgatttttggtcggtttcgttcggcgtgggtttcgggcgtttgtggttttcgagagtttttttttcgttttcggtggggtttcgacgttcggacgcggcgtagcgttggggtttcggtttcgttcgacgttcgggtttcgtttcgttgggttcggagttgggatacggttttagtcgtggttttattttaggttttgcgttaggacgcgtagagagagagagagagaggcggatacgatgcggattcgtagattttaagtaaatacgtgtggggtcgttttcgtttggcgggttagttgttcgcgtcggttattagcggggttaggtagttcgagtgtcggatttcgaaattttagtcgcggggttttcggtgttgcgggttcggagatatcgttgatttcgcggggtcg

SEQ ID NO: 29116 - DNA, 983 bp, Artificial Sequence
  chemically treated genomic DNA (Homo sapiens) CpG-island No: 29116
cgaccccgcgaaatcaacgatatctccgaacccgcaacaccgaaaaccccgcgactaaaatttcgaaatccgacactcgaactacctaaccccgctaataaccgacgcgaacaactaacccgccaaacgaaaacgaccccacacgtatttacttaaaatctacgaatccgcatcgtatccgcctctctctctctctctctacgcgtcctaacgcaaaacctaaaataaaaccacgactaaaaccgtatcccaactccgaacccaacgaaacgaaacccgaacgtcgaacgaaaccgaaaccccaacgctacgccgcgtccgaacgtcgaaaccccaccgaaaacgaaaaaaaaactctcgaaaaccacaaacgcccgaaacccacgccgaacgaaaccgaccaaaaatcacccccgccgacgaccccgaaccccgacgacccgaaaattccgcgtatccgaaaacaccgaaaaattaaccgaaacgcgacgtacaaaacttcccgaaaacgacgactaccgaactccgccctccaaacgaccccacccgcctaccgtcctaaaacgccgccgccccgccgccgacaataaaccgctatacgcgaaccctaaaccctacgatcccgacccgcgaacgaaaccgaatacctaaactaaaatccgaaacaaacgaacgaaaacaacgccctaaacaaatacgaacgaaactcaaatcgcgaaacgaaaaaacgaaaaacaaacacgaacgaaaacgacacaaacacgaaaccgaaaaacgaacaccgaaaaaacacgaaaaaaaaatcgaaacaaaaacacgtaactcaaacaccgacgccgaaaaaccgcaaaccccgaacgtatcaaacatccccgcaaacccgaaacgataacaaccttaataaccccgaaaaccgaaaccccacccgcgcctaataacttctccgaaaaaaaaaaccaaaaacttcccgacccttcgccaaa

SEQ ID NO: 29117 - DNA, 1217 bp, Artificial Sequence
  chemically treated genomic DNA (Homo sapiens) CpG-island No: 29117
attacgttcggtgagggggacggggtgtaggggagcggaggcggcggggggtgtttttcgttggggtcgtttcgattcggtcgcgtttaagattcgttttcgttcgtagggggcgttttgttttggtttagcggatacgcggggatttaggtttagggcgttgttcgggtggtcgcggcgttggacgacggttcggtttttggtcgtttcgagcggatgttggcggcgtagggcgtggatttcggtttggttcgagttttgtgttcgggaagtttcgtagaacgtcggtagttgttgtttcgcgttcgggagtaggaggagttgttggcgttcgtagatggtgagcgtcgggggagttttcgttttttcgttttcgttattttttttttttttcgaggtttcgttttttttcgagttcgcgttttttagttttttttttcgtaggtatcgtggagttggttcgggcgttgtcgttggcgttggtgttgtacgagttcggggtcgggcgtagtcgcgttggggagtcgtttcgtttgggggtgggcgtagagttgttggtcgacgtgggttagaggttgcgtcgtggtgagcgtcgttttcgttttgttggtttcgtattttcgtttagtttcggtcgcgcggtttttaatagtttttcgttttgtagggattttttggtttcgcgtgtatcgggacggtttcgcgtttagcggttcgtagagtcgcgttttgtaggaggcgttcgtatttttcgatcgcgcgttattcgtcgttttttcgtttttcgtagagttcgttttgtcgtcgtagtaataaagtttttttgtcgcgaaattttgttagtgtttgggcgggagcggaaggatttagggttgcggaggcgggggtcgtttcgatgaatacgtgattttcggcgggtttcgtttttcgcgtacgcgttgagagtttgttagcggttgcgttcgtgtgcgtatgcgtagtttcggggacgtttgcgttttgtttgtgagcgtgtggcgttcgttttttttgagtcggcggggtagagcgtagggagttggaggtcggcgttttttttcgtgtttggtttattgacgcgcggtttcgtcgcgaggtgcggacgtcggggttgggaggggaggaggtagttttgaggattcgttggatttcggggtagttttttagtttcggttattgcgcggggttggcggggtata

SEQ ID NO: 29118 - DNA, 1217 bp, Artificial Sequence
  chemically treated genomic DNA (Homo sapiens) CpG-island No: 29118
tataccccgccaaccccgcgcaataaccgaaactaaaaaactaccccgaaatccaacgaatcctcaaaactacctcctcccctcccaaccccgacgtccgcacctcgcgacgaaaccgcgcgtcaataaaccaaacacgaaaaaaaacgccgacctccaactccctacgctctaccccgccgactcaaaaaaaacgaacgccacacgctcacaaacaaaacgcaaacgtccccgaaactacgcatacgcacacgaacgcaaccgctaacaaactctcaacgcgtacgcgaaaaacgaaacccgccgaaaatcacgtattcatcgaaacgacccccgcctccgcaaccctaaatccttccgctcccgcccaaacactaacaaaatttcgcgacaaaaaaactttattactacgacgacaaaacgaactctacgaaaaacgaaaaaacgacgaataacgcgcgatcgaaaaatacgaacgcctcctacaaaacgcgactctacgaaccgctaaacgcgaaaccgtcccgatacacgcgaaaccaaaaaatccctacaaaacgaaaaactattaaaaaccgcgcgaccgaaactaaacgaaaatacgaaaccaacaaaacgaaaacgacgctcaccacgacgcaacctctaacccacgtcgaccaacaactctacgcccacccccaaacgaaacgactccccaacgcgactacgcccgaccccgaactcgtacaacaccaacgccaacgacaacgcccgaaccaactccacgatacctacgaaaaaaaaaactaaaaaacgcgaactcgaaaaaaaacgaaacctcgaaaaaaaaaaaaaataacgaaaacgaaaaaacgaaaactcccccgacgctcaccatctacgaacgccaacaactcctcctactcccgaacgcgaaacaacaactaccgacgttctacgaaacttcccgaacacaaaactcgaaccaaaccgaaatccacgccctacgccgccaacatccgctcgaaacgaccaaaaaccgaaccgtcgtccaacgccgcgaccacccgaacaacgccctaaacctaaatccccgcgtatccgctaaaccaaaacaaaacgccccctacgaacgaaaacgaatcttaaacgcgaccgaatcgaaacgaccccaacgaaaaacaccccccgccgcctccgctcccctacaccccgtccccctcaccgaacgtaat

SEQ ID NO: 29119 - DNA, 1217 bp, Artificial Sequence
  chemically treated genomic DNA (Homo sapiens) CpG-island No: 29119
tgtgtttcgttagtttcgcgtagtagtcggagttgggaaattatttcggagtttagcgagtttttagggttattttttttttttttagtttcggcgttcgtatttcgcggcggggtcgcgcgttagtggattaagtacgagaggaagcgtcgatttttagttttttgcgttttgtttcgtcggtttagggaaagcgggcgttatacgtttataggtagggcgtaggcgttttcggagttgcgtatgcgtatacgggcgtagtcgttgataggtttttagcgcgtgcgcggaaggcggagttcgtcgggggttacgtgtttatcgagacggttttcgttttcgtagttttggattttttcgttttcgtttaagtattgataaggtttcgcggtaaaggagttttattgttgcggcggtagaacgagttttgcgaagggcgagggggcggcgaatggcgcgcggtcggagagtacgagcgttttttgtagggcgcggttttgcgggtcgttgagcgcggggtcgtttcggtgtacgcggagttagggggtttttgtagagcgaggggttgttagaggtcgcgcggtcggagttgggcgggggtgcggggttagtagggcgggggcggcgtttattacggcgtagtttttgatttacgtcgattagtagttttgcgtttatttttaggcggagcggttttttagcgcggttgcgttcggtttcgagttcgtgtagtattagcgttagcggtagcgttcggattagttttacggtgtttgcggggagaggggttgagaggcgcgggttcgggaaggggcggggtttcgggaagggaaggggatggcggaggcggaaggacggggattttttcgacgtttattatttgcgggcgttagtagttttttttgttttcgggcgcgaggtagtagttgtcggcgttttgcgggatttttcgagtatagggttcgggttagatcgggatttacgttttgcgtcgttagtattcgttcgaagcggttaagggtcgagtcgtcgtttagcgtcgcggttattcgggtagcgttttgggtttgagttttcgcgtgttcgttgagttagagtagggcgttttttgcgggcggggacgggttttaggcgcggtcgggtcggggcggttttagcgggaagtatttttcgtcgttttcgtttttttatatttcgttttttttatcgagcgtggt

SEQ ID NO: 29120 - DNA, 1217 bp, Artificial Sequence
  chemically treated genomic DNA (Homo sapiens) CpG-island No: 29120
accacgctcgataaaaaaaacgaaatataaaaaaacgaaaacgacgaaaaatacttcccgctaaaaccgccccgacccgaccgcgcctaaaacccgtccccgcccgcaaaaaacgccctactctaactcaacgaacacgcgaaaactcaaacccaaaacgctacccgaataaccgcgacgctaaacgacgactcgacccttaaccgcttcgaacgaatactaacgacgcaaaacgtaaatcccgatctaacccgaaccctatactcgaaaaatcccgcaaaacgccgacaactactacctcgcgcccgaaaacaaaaaaaactactaacgcccgcaaataataaacgtcgaaaaaatccccgtccttccgcctccgccatccccttcccttcccgaaaccccgccccttcccgaacccgcgcctctcaacccctctccccgcaaacaccgtaaaactaatccgaacgctaccgctaacgctaatactacacgaactcgaaaccgaacgcaaccgcgctaaaaaaccgctccgcctaaaaataaacgcaaaactactaatcgacgtaaatcaaaaactacgccgtaataaacgccgcccccgccctactaaccccgcacccccgcccaactccgaccgcgcgacctctaacaacccctcgctctacaaaaaccccctaactccgcgtacaccgaaacgaccccgcgctcaacgacccgcaaaaccgcgccctacaaaaaacgctcgtactctccgaccgcgcgccattcgccgccccctcgcccttcgcaaaactcgttctaccgccgcaacaataaaactcctttaccgcgaaaccttatcaatacttaaacgaaaacgaaaaaatccaaaactacgaaaacgaaaaccgtctcgataaacacgtaacccccgacgaactccgccttccgcgcacgcgctaaaaacctatcaacgactacgcccgtatacgcatacgcaactccgaaaacgcctacgccctacctataaacgtataacgcccgctttccctaaaccgacgaaacaaaacgcaaaaaactaaaaatcgacgcttcctctcgtacttaatccactaacgcgcgaccccgccgcgaaatacgaacgccgaaactaaaaaaaaaaaaaataaccctaaaaactcgctaaactccgaaataatttcccaactccgactactacgcgaaactaacgaaacaca

SEQ ID NO: 29121 - DNA, 1013 bp, Artificial Sequence
  chemically treated genomic DNA (Homo sapiens) CpG-island No: 29121
gcggttagagcgttagatagttataggcgtggagacggtggggcgtttatagtttcgggttcggagttttcgtttcgtagttttattcgtcggtttatttcgcgttattttttcgtcgtttttattttttttagatattcgtttagttgggtcgttacgtttattttttagtttttggtgaggtcgcggatgggttgtaagaggtgggcgaagcgcgtttttacgttttttatgttcgggagggaacgggcggtaaagggatcgtagggttgtttttcgaggggtacggcgtttttagttcgttattagttttggcgttattttgttgttttcgtttaggaaaatgcgtaggcgcggcgtcgcgcgtatgtttatgacgtaacgtgggtaaaagttagagaggcgaatttcggcgtcgcgtagcgggagtttatcggaagagtcgcggggcggggtcgaagttttcgggaggggggggtgggcggagttttgggttgttattagtttggacgggagggtttttggggtcgtcgtgggtcgggcggggcggggtggggcggggtttggagttgtcgcgggcgagcgggtcgaggaggcggggtttgggggttgttacgggttgggggggcggggcggtgaggaggcggggtttggggtagtcgcgggcgggcggacgggtcgaggaggcggggtttggggttgttacgggttgggcgggcggggcggtgaggaggcggggtttgggattgtcgcgggcgggcgggcgggtcgaggaggcggggtttggggttgttacggattgggcgggcggggcggtgaggaggcggggtttggggttgtcgcgggcgggcggacgcggagggcgggttttgttttagcgggtcgcgtagcggatatggcgggttttcggttttcgcggtagttttttttttagggcgtggcggtcgtttttatgtttgttttcgtttttttttatacgtaaattttaggtgaaggtatttagggtgggatat

SEQ ID NO: 29122 - DNA, 1013 bp, Artificial Sequence
  chemically treated genomic DNA (Homo sapiens) CpG-island No: 29122
atatcccaccctaaataccttcacctaaaatttacgtataaaaaaaaacgaaaacaaacataaaaacgaccgccacgccctaaaaaaaaaactaccgcgaaaaccgaaaacccgccatatccgctacgcgacccgctaaaacaaaacccgccctccgcgtccgcccgcccgcgacaaccccaaaccccgcctcctcaccgccccgcccgcccaatccgtaacaaccccaaaccccgcctcctcgacccgcccgcccgcccgcgacaatcccaaaccccgcctcctcaccgccccgcccgcccaacccgtaacaaccccaaaccccgcctcctcgacccgtccgcccgcccgcgactaccccaaaccccgcctcctcaccgccccgcccccccaacccgtaacaacccccaaaccccgcctcctcgacccgctcgcccgcgacaactccaaaccccgccccaccccgccccgcccgacccacgacgaccccaaaaaccctcccgtccaaactaataacaacccaaaactccgcccacccccccctcccgaaaacttcgaccccgccccgcgactcttccgataaactcccgctacgcgacgccgaaattcgcctctctaacttttacccacgttacgtcataaacatacgcgcgacgccgcgcctacgcattttcctaaacgaaaacaacaaaataacgccaaaactaataacgaactaaaaacgccgtacccctcgaaaaacaaccctacgatccctttaccgcccgttccctcccgaacataaaaaacgtaaaaacgcgcttcgcccacctcttacaacccatccgcgacctcaccaaaaactaaaaaataaacgtaacgacccaactaaacgaatatctaaaaaaaataaaaacgacgaaaaaataacgcgaaataaaccgacgaataaaactacgaaacgaaaactccgaacccgaaactataaacgccccaccgtctccacgcctataactatctaacgctctaaccgc

SEQ ID NO: 29123 - DNA, 1013 bp, Artificial Sequence
  chemically treated genomic DNA (Homo sapiens) CpG-island No: 29123
gtgttttattttgggtgtttttatttgggatttgcgtgtagagggaagcgaaagtaaatatgaagacggtcgttacgttttggaggaagagttgtcgcgggagtcgggagttcgttatgttcgttacgcggttcgttagagtagggttcgtttttcgcgttcgttcgttcgcggtagttttaggtttcgtttttttatcgtttcgttcgtttaattcgtggtagttttaagtttcgttttttcggttcgttcgttcgttcgcggtagttttaggtttcgtttttttatcgtttcgttcgtttaattcgtggtagttttaagtttcgttttttcggttcgttcgttcgttcgcggttgttttaggtttcgtttttttatcgtttcgtttttttaattcgtggtagtttttaagtttcgttttttcggttcgttcgttcgcggtagttttaggtttcgttttatttcgtttcgttcgatttacggcggttttaaaagttttttcgtttaaattggtggtagtttaaagtttcgtttatttttttttttcggaggtttcgatttcgtttcgcgattttttcggtgagttttcgttgcgcggcgtcggggttcgtttttttggtttttgtttacgttacgttatagatatgcgcgcgacgtcgcgtttacgtatttttttgggcgggaatagtaaaatggcgttagaattagtggcgggttgaggacgtcgtatttttcggaaggtagttttgcggtttttttgtcgttcgttttttttcggatatggaggacgtggaggcgcgtttcgtttattttttgtagtttattcgcgattttattaagaattgggaggtggacgtggcggtttagttgggcgagtatttggaggaggtaagggcggcgggggagtgacgcggggtgggtcggcgggtggggttgcggggcgggggtttcgggttcggggttgtgggcgttttatcgtttttacgtttatggttatttggcgttttggtcgt

SEQ ID NO: 29124 - DNA, 1013 bp, Artificial Sequence
  chemically treated genomic DNA (Homo sapiens) CpG-island No: 29124
acgaccaaaacgccaaataaccataaacgtaaaaacgataaaacgcccacaaccccgaacccgaaacccccgccccgcaaccccacccgccgacccaccccgcgtcactcccccgccgcccttacctcctccaaatactcgcccaactaaaccgccacgtccacctcccaattcttaataaaatcgcgaataaactacaaaaaataaacgaaacgcgcctccacgtcctccatatccgaaaaaaaacgaacgacaaaaaaaccgcaaaactaccttccgaaaaatacgacgtcctcaacccgccactaattctaacgccattttactattcccgcccaaaaaaatacgtaaacgcgacgtcgcgcgcatatctataacgtaacgtaaacaaaaaccaaaaaaacgaaccccgacgccgcgcaacgaaaactcaccgaaaaaatcgcgaaacgaaatcgaaacctccgaaaaaaaaaaataaacgaaactttaaactaccaccaatttaaacgaaaaaacttttaaaaccgccgtaaatcgaacgaaacgaaataaaacgaaacctaaaactaccgcgaacgaacgaaccgaaaaaacgaaacttaaaaactaccacgaattaaaaaaacgaaacgataaaaaaacgaaacctaaaacaaccgcgaacgaacgaacgaaccgaaaaaacgaaacttaaaactaccacgaattaaacgaacgaaacgataaaaaaacgaaacctaaaactaccgcgaacgaacgaacgaaccgaaaaaacgaaacttaaaactaccacgaattaaacgaacgaaacgataaaaaaacgaaacctaaaactaccgcgaacgaacgaacgcgaaaaacgaaccctactctaacgaaccgcgtaacgaacataacgaactcccgactcccgcgacaactcttcctccaaaacgtaacgaccgtcttcatatttactttcgcttccctctacacgcaaatcccaaataaaaacacccaaaataaaacac

SEQ ID NO: 29125 - DNA, 544 bp, Artificial Sequence
  chemically treated genomic DNA (Homo sapiens) CpG-island No: 29125
tttacgcgcgggcggggcgtagcgacgaaggggttaaggcgttttatttcgttttagttcgggtattggttgttttggggggcgtggtcggagggcgggttcgcgtttgtcgtagtcgttggtgggcggggttcgggcggggagtaggaggggcgcggagcggagtcgggttcgcgtagcgcgtttcgtcgggcgtgtttcgggttgcgttagtaagcggggtcggtggcgttcgtgtcggagatttcgcgtcggattttgaggtagcgagtaagtgaggtaggtttatcgtggtatttttttcggtttcgatttgtcgtcgtgtttgttgtattgcgcggtatgtttgatttgattcggattgggtagggggcgcgtttcgttgttagggttttaagggggaggggagcggagaggaggcggatgatgttatggatgtttcgttcggtttggggggaggtggcggttagagggggtgcggttcggattatgttattttttttttttgcgtttcgtttttcggggttatacgcgttggtgggga

SEQ ID NO: 29126 - DNA, 544 bp, Artificial Sequence
  chemically treated genomic DNA (Homo sapiens) CpG-island No: 29126
tccccaccaacgcgtataaccccgaaaaacgaaacgcaaaaaaaaaaaataacataatccgaaccgcaccccctctaaccgccacctccccccaaaccgaacgaaacatccataacatcatccgcctcctctccgctcccctcccccttaaaaccctaacaacgaaacgcgccccctacccaatccgaatcaaatcaaacataccgcgcaatacaacaaacacgacgacaaatcgaaaccgaaaaaaataccacgataaacctacctcacttactcgctacctcaaaatccgacgcgaaatctccgacacgaacgccaccgaccccgcttactaacgcaacccgaaacacgcccgacgaaacgcgctacgcgaacccgactccgctccgcgcccctcctactccccgcccgaaccccgcccaccaacgactacgacaaacgcgaacccgccctccgaccacgccccccaaaacaaccaatacccgaactaaaacgaaataaaacgccttaaccccttcgtcgctacgccccgcccgcgcgtaaa

SEQ ID NO: 29127 - DNA, 544 bp, Artificial Sequence
  chemically treated genomic DNA (Homo sapiens) CpG-island No: 29127
tttttattaacgcgtgtggtttcggggggcggggcgtagagggaagaggtgatataattcgagtcgtattttttttggtcgttatttttttttaggtcgggcgaagtatttatgatattattcgtttttttttcgttttttttttttttgggattttagtagcgggacgcgttttttatttagttcgggttaggttagatatgtcgcgtagtgtagtaggtacggcggtaggtcggagtcgggagggatgttacgatgggtttgttttatttattcgttgttttagggttcggcgcggggttttcgatacgggcgttatcggtttcgtttgttggcgtagttcgaagtacgttcggcggggcgcgttgcgcgggttcggtttcgtttcgcgttttttttgtttttcgttcgagtttcgtttattagcggttgcggtaaacgcgagttcgtttttcggttacgttttttagggtagttaatgttcgggttggggcggggtgaggcgttttaattttttcgtcgttgcgtttcgttcgcgcgtggg

SEQ ID NO: 29128 - DNA, 544 bp, Artificial Sequence
  chemically treated genomic DNA (Homo sapiens) CpG-island No: 29128
cccacgcgcgaacgaaacgcaacgacgaaaaaattaaaacgcctcaccccgccccaacccgaacattaactaccctaaaaaacgtaaccgaaaaacgaactcgcgtttaccgcaaccgctaataaacgaaactcgaacgaaaaacaaaaaaaacgcgaaacgaaaccgaacccgcgcaacgcgccccgccgaacgtacttcgaactacgccaacaaacgaaaccgataacgcccgtatcgaaaaccccgcgccgaaccctaaaacaacgaataaataaaacaaacccatcgtaacatccctcccgactccgacctaccgccgtacctactacactacgcgacatatctaacctaacccgaactaaataaaaaacgcgtcccgctactaaaatcccaaaaaaaaaaaaaacgaaaaaaaaacgaataatatcataaatacttcgcccgacctaaaaaaaaataacgaccaaaaaaaatacgactcgaattatatcacctcttccctctacgccccgccccccgaaaccacacgcgttaataaaaa

SEQ ID NO: 29129 - DNA, 530 bp, Artificial Sequence
  chemically treated genomic DNA (Homo sapiens) CpG-island No: 29129
agcgcgggtttcggggattcgagggcgcggaagttcgggggtcggggtcgagtatagattgggaggcgtagcgttgggcgtacgttttcgtcggttcggcggtttttaatgaggcgcgttgtgcgtagattgttaagagtagtatgagtacggtttcggcggtttttagggtttcgcgggtcggcgttatttcggagcgcggtgttcggaattatttagcgttattagtcgggcggttgggagggggaagcggtcgattcgggcggttgggagggggaagcggtcgatttaggcggtagcggagggggttgtagcggaggcggtttcggtttgtacgttcgttttttcgtttgttcggtagggtttcgtttgagttttaggttttaggtttagcggcgtcgttcgtcggtgaaggaaattagcgtagagaggtcgcgttgttaggcgcgtggtggttcgggggtttacgtgtgagtttcgttttaggttgttaattgagagttttattttcgtttagagagattttattt

SEQ ID NO: 29130 - DNA, 530 bp, Artificial Sequence
  chemically treated genomic DNA (Homo sapiens) CpG-island No: 29130
aaataaaatctctctaaacgaaaataaaactctcaattaacaacctaaaacgaaactcacacgtaaacccccgaaccaccacgcgcctaacaacgcgacctctctacgctaatttccttcaccgacgaacgacgccgctaaacctaaaacctaaaactcaaacgaaaccctaccgaacaaacgaaaaaacgaacgtacaaaccgaaaccgcctccgctacaaccccctccgctaccgcctaaatcgaccgcttccccctcccaaccgcccgaatcgaccgcttccccctcccaaccgcccgactaataacgctaaataattccgaacaccgcgctccgaaataacgccgacccgcgaaaccctaaaaaccgccgaaaccgtactcatactactcttaacaatctacgcacaacgcgcctcattaaaaaccgccgaaccgacgaaaacgtacgcccaacgctacgcctcccaatctatactcgaccccgacccccgaacttccgcgccctcgaatccccgaaacccgcgct

SEQ ID NO: 29131 - DNA, 530 bp, Artificial Sequence
  chemically treated genomic DNA (Homo sapiens) CpG-island No: 29131
aggtggggtttttttgggcggaggtggaatttttaattggtagtttagggcgaggtttatacgtggattttcggattattacgcgtttggtagcgcggtttttttgcgttggttttttttatcggcgagcggcgtcgttgggtttggggtttggggtttagacggggttttgtcgggtaggcggaagggcgagcgtgtaagtcggggtcgttttcgttgtagtttttttcgttgtcgtttggatcggtcgttttttttttttagtcgttcggatcggtcgttttttttttttagtcgttcggttgatggcgttaagtgatttcgggtatcgcgtttcggggtggcgtcgattcgcggggttttgggggtcgtcggagtcgtgtttatgttgtttttagtagtttgcgtatagcgcgttttattaggggtcgtcgggtcgacggggacgtgcgtttagcgttgcgttttttaatttgtgttcgatttcggttttcgagttttcgcgttttcgggttttcgaggttcgcgtt

SEQ ID NO: 29132 - DNA, 530 bp, Artificial Sequence
  chemically treated genomic DNA (Homo sapiens) CpG-island No: 29132
aacgcgaacctcgaaaacccgaaaacgcgaaaactcgaaaaccgaaatcgaacacaaattaaaaaacgcaacgctaaacgcacgtccccgtcgacccgacgacccctaataaaacgcgctatacgcaaactactaaaaacaacataaacacgactccgacgacccccaaaaccccgcgaatcgacgccaccccgaaacgcgatacccgaaatcacttaacgccatcaaccgaacgactaaaaaaaaaaaacgaccgatccgaacgactaaaaaaaaaaaacgaccgatccaaacgacaacgaaaaaaactacaacgaaaacgaccccgacttacacgctcgcccttccgcctacccgacaaaaccccgtctaaaccccaaaccccaaacccaacgacgccgctcgccgataaaaaaaaccaacgcaaaaaaaccgcgctaccaaacgcgtaataatccgaaaatccacgtataaacctcgccctaaactaccaattaaaaattccacctccgcccaaaaaaaccccacct

SEQ ID NO: 29133 - DNA, 805 bp, Artificial Sequence
  chemically treated genomic DNA (Homo sapiens) CpG-island No: 29133
gagggacgaggcgtttcggaaaagggagtgtaggtcgcggtggggtggggcggcgaaggtcggaagggataaaatcgtagtcgtcggtttcgcggggtttacggtttcgtttcggtatcgtagcgggttttttttatttagttttagtttttcgtttgcgttttatttttcgcgtttcgcgttttagtcgattatggtcgggtttttgcgcgtttcgttgtttttgttggttattttggtcgtggttttggtcgtgagtttcgcggtcggttttagtttcggtaagtcgtcgcgtttagtgggaggttttatggacgttagcgtggaggaggagggtgtgcggcgtgtattggattttgtcgtcggcgagtataataaagttagtaacgatatgtattatagtcgcgcgttgtaggtggtgcgcgttcgtaagtaggtgcgtgtcgtttttcgtagggttcgaagtttcggtttcgtcgttttagttttttttcgcgttgttttcggatttcgtgttgttttttttcggcgtttgggttttttattcggattttgttttcggttttcgttgttattttcgagtttttggcgggcgtgttcgggaatgttttgagtttggtttggtttggaatcgtacggatacgttaggttcgcgttcggcgtttaagattagtttttaggagttagttcgagttgcgtcgtagcgcgggggtaggtataggacgttttatatagttttgtttcgattttttgggacgttgggtttcgggtgcgttgttgaatacgtaggagaaggaaaaataga

SEQ ID NO: 29134 - DNA, 805 bp, Artificial Sequence
  chemically treated genomic DNA (Homo sapiens) CpG-island No: 29134
tctatttttccttctcctacgtattcaacaacgcacccgaaacccaacgtcccaaaaaatcgaaacaaaactatataaaacgtcctatacctacccccgcgctacgacgcaactcgaactaactcctaaaaactaatcttaaacgccgaacgcgaacctaacgtatccgtacgattccaaaccaaaccaaactcaaaacattcccgaacacgcccgccaaaaactcgaaaataacaacgaaaaccgaaaacaaaatccgaataaaaaacccaaacgccgaaaaaaaacaacacgaaatccgaaaacaacgcgaaaaaaaactaaaacgacgaaaccgaaacttcgaaccctacgaaaaacgacacgcacctacttacgaacgcgcaccacctacaacgcgcgactataatacatatcgttactaactttattatactcgccgacgacaaaatccaatacacgccgcacaccctcctcctccacgctaacgtccataaaacctcccactaaacgcgacgacttaccgaaactaaaaccgaccgcgaaactcacgaccaaaaccacgaccaaaataaccaacaaaaacaacgaaacgcgcaaaaacccgaccataatcgactaaaacgcgaaacgcgaaaaataaaacgcaaacgaaaaactaaaactaaataaaaaaaacccgctacgataccgaaacgaaaccgtaaaccccgcgaaaccgacgactacgattttatcccttccgaccttcgccgccccaccccaccgcgacctacactcccttttccgaaacgcctcgtccctc

SEQ ID NO: 29135 - DNA, 805 bp, Artificial Sequence
  chemically treated genomic DNA (Homo sapiens) CpG-island No: 29135
tttgttttttttttttttgcgtatttagtagcgtattcggagtttagcgttttaggaggtcgggatagagttgtgtgggacgttttgtgtttgttttcgcgttgcggcgtagttcgagttggtttttggaagttgattttaggcgtcgggcgcggatttgacgtgttcgtgcggttttaggttaggttagatttagggtattttcggatacgttcgttaagggttcgggggtgatagcgaagatcgggaatagggttcgggtgagaagtttaggcgtcggagaggagtagtacggggttcgggagtagcgcggggggaggttgggacggcggggtcggggtttcggattttgcggggggcggtacgtatttgtttgcgggcgcgtattatttgtagcgcgcggttgtggtatatgtcgttgttggttttgttgtattcgtcgacggtaaagtttagtgtacgtcgtatattttttttttttacgttggcgtttatggggttttttattaggcgcggcggtttgtcgggattggagtcggtcgcggggtttacggttagggttacggttaggatggttagtaggagtagcggggcgcgtaggggttcggttatggtcggttaggacgcgggacgcggggagtggggcgtaggcgagaggttggagttagatagagaggattcgttgcgatatcgaggcgaggtcgtgagtttcgcgaggtcggcgattgcggttttatttttttcggttttcgtcgttttattttatcgcggtttgtattttttttttcggaacgtttcgtttttt

SEQ ID NO: 29136 - DNA, 805 bp, Artificial Sequence
  chemically treated genomic DNA (Homo sapiens) CpG-island No: 29136
aaaaaacgaaacgttccgaaaaaaaaaatacaaaccgcgataaaataaaacgacgaaaaccgaaaaaaataaaaccgcaatcgccgacctcgcgaaactcacgacctcgcctcgatatcgcaacgaatcctctctatctaactccaacctctcgcctacgccccactccccgcgtcccgcgtcctaaccgaccataaccgaacccctacgcgccccgctactcctactaaccatcctaaccgtaaccctaaccgtaaaccccgcgaccgactccaatcccgacaaaccgccgcgcctaataaaaaaccccataaacgccaacgtaaaaaaaaaaaatatacgacgtacactaaactttaccgtcgacgaatacaacaaaaccaacaacgacatataccacaaccgcgcgctacaaataatacgcgcccgcaaacaaatacgtaccgccccccgcaaaatccgaaaccccgaccccgccgtcccaacctccccccgcgctactcccgaaccccgtactactcctctccgacgcctaaacttctcacccgaaccctattcccgatcttcgctatcacccccgaacccttaacgaacgtatccgaaaataccctaaatctaacctaacctaaaaccgcacgaacacgtcaaatccgcgcccgacgcctaaaatcaacttccaaaaaccaactcgaactacgccgcaacgcgaaaacaaacacaaaacgtcccacacaactctatcccgacctcctaaaacgctaaactccgaatacgctactaaatacgcaaaaaaaaaaaaaacaaa

SEQ ID NO: 29137 - DNA, 703 bp, Artificial Sequence
  chemically treated genomic DNA (Homo sapiens) CpG-island No: 29137
atgtttcgaggtttcgttatttcgtacgtaggataaaggtgttgagaatgaggcgcgttggttttgtattttttgtcgagagtcggaagttaggggcgcgtcggggtcggtcgggtacgtgtagggggtttttcggtcgtcgcgttgtttcgaagtcggttttggggattcgcggttgcgcggatcgagttcgcgaaggggattaggttcgcggaggggtcgtagcggttttaaggatggcgtatgaagattttttacgtaagatagtcggtcgcgggggttaggggcggtttttttcgggttcggtttcgttcgattgatttgtgacgttggttcgggtgacgcgttgtattacggtttttatggcggcggttggggcgagtggggcggcgtcgcgttgcgttcggtttcgcgattttgagggcggattcgtagtcgtcgttttttggaggtgatattcggaagcgcgtttaattggtcggttcgattcggtcggttgttatttattttacgtcggttacgtttattttcggtttggcgataggtttatttatttatagattgatttcgtttatgtttgttacgtttatttgttgtttaatcgtaatttcgttcgttattgaaaagtttagtttttacgttcggttttgttttatttatatttgggtttcgttagagttttttgatttttttatttcgggtt

SEQ ID NO: 29138 - DNA, 703 bp, Artificial Sequence
  chemically treated genomic DNA (Homo sapiens) CpG-island No: 29138
aacccgaaataaaaaaatcaaaaaactctaacgaaacccaaatataaataaaacaaaaccgaacgtaaaaactaaacttttcaataacgaacgaaattacgattaaacaacaaataaacgtaacaaacataaacgaaatcaatctataaataaataaacctatcgccaaaccgaaaataaacgtaaccgacgtaaaataaataacaaccgaccgaatcgaaccgaccaattaaacgcgcttccgaatatcacctccaaaaaacgacgactacgaatccgccctcaaaatcgcgaaaccgaacgcaacgcgacgccgccccactcgccccaaccgccgccataaaaaccgtaatacaacgcgtcacccgaaccaacgtcacaaatcaatcgaacgaaaccgaacccgaaaaaaaccgcccctaacccccgcgaccgactatcttacgtaaaaaatcttcatacgccatccttaaaaccgctacgacccctccgcgaacctaatccccttcgcgaactcgatccgcgcaaccgcgaatccccaaaaccgacttcgaaacaacgcgacgaccgaaaaaccccctacacgtacccgaccgaccccgacgcgcccctaacttccgactctcgacaaaaaatacaaaaccaacgcgcctcattctcaacacctttatcctacgtacgaaataacgaaacctcgaaacat

SEQ ID NO: 29139 - DNA, 703 bp, Artificial Sequence
  chemically treated genomic DNA (Homo sapiens) CpG-island No: 29139
ggttcgggatggggggattaaagggttttggcgggatttagatgtggatggggtagggtcgagcgtggggattgggttttttaatgacgggcggggttacggttgggtagtaggtgggcgtggtaggtataggcggagttaatttatgagtgggtgggtttatcgttaggtcgagagtgggcgtggtcgacgtggggtgggtagtagtcgatcgagtcggatcggttagttgggcgcgttttcgggtgttatttttagagggcgacggttgcggattcgtttttagagtcgcgaggtcggacgtagcgcggcgtcgttttattcgttttagtcgtcgttatgaaggtcgtggtgtagcgcgttattcgggttagcgttataggttagtcgggcggggtcgggttcgggaggagtcgtttttgattttcgcgatcggttgttttgcgtggggggtttttatgcgttatttttggggtcgttgcggttttttcgcgagtttggtttttttcgcgagttcggttcgcgtagtcgcgagtttttagggtcggtttcggggtagcgcggcggtcggagagttttttgtacgtgttcgatcggtttcggcgcgtttttggttttcggttttcggtagagggtgtaggattagcgcgttttatttttagtatttttgttttgcgtgcgggatggcggagtttcggagtat

SEQ ID NO: 29140 - DNA, 703 bp, Artificial Sequence
  chemically treated genomic DNA (Homo sapiens) CpG-island No: 29140
atactccgaaactccgccatcccgcacgcaaaacaaaaatactaaaaataaaacgcgctaatcctacaccctctaccgaaaaccgaaaaccaaaaacgcgccgaaaccgatcgaacacgtacaaaaaactctccgaccgccgcgctaccccgaaaccgaccctaaaaactcgcgactacgcgaaccgaactcgcgaaaaaaaccaaactcgcgaaaaaaccgcaacgaccccaaaaataacgcataaaaaccccccacgcaaaacaaccgatcgcgaaaatcaaaaacgactcctcccgaacccgaccccgcccgactaacctataacgctaacccgaataacgcgctacaccacgaccttcataacgacgactaaaacgaataaaacgacgccgcgctacgtccgacctcgcgactctaaaaacgaatccgcaaccgtcgccctctaaaaataacacccgaaaacgcgcccaactaaccgatccgactcgatcgactactacccaccccacgtcgaccacgcccactctcgacctaacgataaacccacccactcataaattaactccgcctatacctaccacgcccacctactacccaaccgtaaccccgcccgtcattaaaaaacccaatccccacgctcgaccctaccccatccacatctaaatcccgccaaaaccctttaatccccccatcccgaacc

SEQ ID NO: 29141 - DNA, 722 bp, Artificial Sequence
  chemically treated genomic DNA (Homo sapiens) CpG-island No: 29141
gggatcgtttttcgcggtttaagcgtgtttttgttttgagtcggttttcgtttcgtttttcgggttcgtcgcgtttttttcgcgtcgttttcgtttcggtttttttttttcgtcgtttttttgttttgtttttcgtttcgttttcgttcgcggcgcgtttttttttcgtttttcgcgttcgtttttgtagttcgcgtttttcgtatcgtttcgcgttttcgtggcgttcgttcgcgcgcgttcgcgtttcgttttttttcgcgcggtttcgtattggcgtgttgtagggcgcggtgtattgcgtcgttatcgttaataggtggattttttttcggagataaaatcgtcggcgtcggcgtcgttagtttttttggttgagatttcggtttcgggtaaggacgttcggttttcgggttttcgttttcgttttcgtttttcgaagagggattttcggggtcggttttggggggtagagggtggtcgggtttcgtattcgttttcgcgcgcgttcggagttcggttttcgggggttttcgcgtcggtcgggttgggttcggggtggggggcggcgcggggcggcggggtcgggttttgggcggcgatcgtttcgtagtcgtgattttggggtcgcggggattttgcgggtcgggggttgatgggggtcgggtttcggggcgttgggttagaggacgttgagggaggtggtgagatttgggggtttt

SEQ ID NO: 29142 - DNA, 722 bp, Artificial Sequence
  chemically treated genomic DNA (Homo sapiens) CpG-island No: 29142
aaaacccccaaatctcaccacctccctcaacgtcctctaacccaacgccccgaaacccgacccccatcaacccccgacccgcaaaatccccgcgaccccaaaatcacgactacgaaacgatcgccgcccaaaacccgaccccgccgccccgcgccgccccccaccccgaacccaacccgaccgacgcgaaaacccccgaaaaccgaactccgaacgcgcgcgaaaacgaatacgaaacccgaccaccctctaccccccaaaaccgaccccgaaaatccctcttcgaaaaacgaaaacgaaaacgaaaacccgaaaaccgaacgtccttacccgaaaccgaaatctcaaccaaaaaaactaacgacgccgacgccgacgattttatctccgaaaaaaaatccacctattaacgataacgacgcaatacaccgcgccctacaacacgccaatacgaaaccgcgcgaaaaaaaacgaaacgcgaacgcgcgcgaacgaacgccacgaaaacgcgaaacgatacgaaaaacgcgaactacaaaaacgaacgcgaaaaacgaaaaaaaaacgcgccgcgaacgaaaacgaaacgaaaaacaaaacaaaaaaacgacgaaaaaaaaaaaccgaaacgaaaacgacgcgaaaaaaacgcgacgaacccgaaaaacgaaacgaaaaccgactcaaaacaaaaacacgcttaaaccgcgaaaaacgatccc

SEQ ID NO: 29143 - DNA, 722 bp, Artificial Sequence
  chemically treated genomic DNA (Homo sapiens) CpG-island No: 29143
agggtttttagattttattattttttttagcgttttttggtttagcgtttcgaagttcgatttttattagttttcggttcgtagggttttcgcggttttaaggttacggttacggggcgatcgtcgtttaggattcggtttcgtcgtttcgcgtcgttttttatttcgggtttagttcggtcgacgcggggattttcggaagtcggatttcgggcgcgcgcgggggcgggtgcggggttcggttattttttgttttttaggatcggtttcgggggttttttttcggaagacgggggcgggggcggaggttcgggggtcgagcgtttttattcggagtcgaggttttagttagagggattggcggcgtcggcgtcggcggttttattttcgggagggggtttatttattgacggtggcggcgtagtgtatcgcgttttgtagtacgttaatgcggaatcgcgcgggagggggcggggcgcggacgcgcgcgggcgggcgttacggggacgcgaggcgatgcgggaggcgcgggttgtaaagacggacgcgggaggcgggggagaaacgcgtcgcgggcgggggcggggcggggggtagggtagggaggcggcgggagggagggatcgggacggagacggcgcggggagagcgcggcgggttcgggagacggggcgagagtcggtttagggtaggaatacgtttgagtcgcgaaaagcggtttt

SEQ ID NO: 29144 - DNA, 722 bp, Artificial Sequence
  chemically treated genomic DNA (Homo sapiens) CpG-island No: 29144
aaaaccgcttttcgcgactcaaacgtattcctaccctaaaccgactctcgccccgtctcccgaacccgccgcgctctccccgcgccgtctccgtcccgatccctccctcccgccgcctccctaccctaccccccgccccgcccccgcccgcgacgcgtttctcccccgcctcccgcgtccgtctttacaacccgcgcctcccgcatcgcctcgcgtccccgtaacgcccgcccgcgcgcgtccgcgccccgccccctcccgcgcgattccgcattaacgtactacaaaacgcgatacactacgccgccaccgtcaataaataaaccccctcccgaaaataaaaccgccgacgccgacgccgccaatccctctaactaaaacctcgactccgaataaaaacgctcgacccccgaacctccgcccccgcccccgtcttccgaaaaaaaacccccgaaaccgatcctaaaaaacaaaaaataaccgaaccccgcacccgcccccgcgcgcgcccgaaatccgacttccgaaaatccccgcgtcgaccgaactaaacccgaaataaaaaacgacgcgaaacgacgaaaccgaatcctaaacgacgatcgccccgtaaccgtaaccttaaaaccgcgaaaaccctacgaaccgaaaactaataaaaatcgaacttcgaaacgctaaaccaaaaaacgctaaaaaaaataataaaatctaaaaaccct

SEQ ID NO: 29145 - DNA, 939 bp, Artificial Sequence
  chemically treated genomic DNA (Homo sapiens) CpG-island No: 29145
agtcgtcgcgttgggttatttatcgaggcggggttttttagttttcggtatcgttttcgtcgcgcggggcgcgggcggttttaattagtttaaatcggtcgagcgggtggaataaaggcgttttgtgcgcggggtttcggtttagacgtcgggaatttggtgggcgtcgttttaattcgttcgattcgagaggagttcgtcggggatttcgagtttagcgttcgttaggcggagaggagaggagttttcggtttagtttcgtttttcgtttttcgtttttcgggtttgttcgttttattcgcgcgcggcgttttttatttgggcggcgatttttcgcgggtttcggcgtacgattacgggtggcggggacgggggcgttaggttacggagtttatttgtagagaagatcgcgggaagtcgcgttacgatagagaggcgcgcgcggggtgcgtacgcgcggacgcgtttatttatatgcgcgggggtcgcggcgcgttacggagggcggggcgtataggttttttttcgggttttattcggtttcgttttttttttggtttcggcgaggtcgcgtttttagtttttatttcggtgcgattttcgtcgtttggtttgggttgagtttagttttgcggcgttcgttttggggcggttcggtcggttttgggtttgtaggggttaaaaggtttcgcgttcgggttcgggagtttagttttcgtttttttttcgggtttaggttttcgtttcggacgcgtttcggagtttcgtttggtttagttcgttcgttttttttagtttttgtggaggcgacgggggcgtcgggcgggttaaaaagtgttacgtgcgcggagtttttcggttcggtttttagggatttcgtagttagaggaatttggatttttttcgagttttttttatagttttggtagtttcggaatt

SEQ ID NO: 29146 - DNA, 939 bp, Artificial Sequence
  chemically treated genomic DNA (Homo sapiens) CpG-island No: 29146
aattccgaaactaccaaaactataaaaaaaactcgaaaaaaatccaaattcctctaactacgaaatccctaaaaaccgaaccgaaaaactccgcgcacgtaacactttttaacccgcccgacgcccccgtcgcctccacaaaaactaaaaaaaacgaacgaactaaaccaaacgaaactccgaaacgcgtccgaaacgaaaacctaaacccgaaaaaaaaacgaaaactaaactcccgaacccgaacgcgaaaccttttaacccctacaaacccaaaaccgaccgaaccgccccaaaacgaacgccgcaaaactaaactcaacccaaaccaaacgacgaaaatcgcaccgaaataaaaactaaaaacgcgacctcgccgaaaccaaaaaaaaaacgaaaccgaataaaacccgaaaaaaaacctatacgccccgccctccgtaacgcgccgcgacccccgcgcatataaataaacgcgtccgcgcgtacgcaccccgcgcgcgcctctctatcgtaacgcgacttcccgcgatcttctctacaaataaactccgtaacctaacgcccccgtccccgccacccgtaatcgtacgccgaaacccgcgaaaaatcgccgcccaaataaaaaacgccgcgcgcgaataaaacgaacaaacccgaaaaacgaaaaacgaaaaacgaaactaaaccgaaaactcctctcctctccgcctaacgaacgctaaactcgaaatccccgacgaactcctctcgaatcgaacgaattaaaacgacgcccaccaaattcccgacgtctaaaccgaaaccccgcgcacaaaacgcctttattccacccgctcgaccgatttaaactaattaaaaccgcccgcgccccgcgcgacgaaaacgataccgaaaactaaaaaaccccgcctcgataaataacccaacgcgacgact

SEQ ID NO: 29147 - DNA, 939 bp, Artificial Sequence
  chemically treated genomic DNA (Homo sapiens) CpG-island No: 29147
ggtttcggagttgttagagttgtgagggggattcgggagagatttaggtttttttggttgcgaagtttttggaggtcgggtcggagggtttcgcgtacgtagtattttttggttcgttcggcgttttcgtcgtttttataagggttgaagaggacgggcgggttggattaggcggggtttcgagacgcgttcgagacgggggtttgggttcgggagaggggcgggggttgggttttcggattcgggcgcggggttttttaatttttgtagatttaggatcggtcgggtcgttttaagacgaacgtcgtagggttgggtttagtttaagttagacggcgagagtcgtatcgaggtggaagttgggggcgcggtttcgtcggggttaggaaaggggcggggtcgggtggggttcggggaggagtttgtgcgtttcgtttttcgtgacgcgtcgcggttttcgcgtatataagtgggcgcgttcgcgcgtgcgtatttcgcgcgcgtttttttgtcgtggcgcggtttttcgcggttttttttgtaaatgggtttcgtggtttagcgttttcgttttcgttattcgtgatcgtgcgtcgaggttcgcgaggggtcgtcgtttaggtgaggggcgtcgcgcgcgggtgggacgagtaggttcgaggggcggggggcgaggggcggggttgggtcgggggtttttttttttttcgtttggcgagcgttgggttcggggttttcggcgggtttttttcgggtcgggcgggttgggacggcgtttattaggttttcgacgtttgggtcggggtttcgcgtataaagcgtttttgttttattcgttcggtcggtttgggttggttggagtcgttcgcgtttcgcgcggcgaaggcggtgtcgggagttggggagtttcgtttcggtaaataatttagcgcggcggtt

SEQ ID NO: 29148 - DNA, 939 bp, Artificial Sequence
  chemically treated genomic DNA (Homo sapiens) CpG-island No: 29148
aaccgccgcgctaaattatttaccgaaacgaaactccccaactcccgacaccgccttcgccgcgcgaaacgcgaacgactccaaccaacccaaaccgaccgaacgaataaaacaaaaacgctttatacgcgaaaccccgacccaaacgtcgaaaacctaataaacgccgtcccaacccgcccgacccgaaaaaaacccgccgaaaaccccgaacccaacgctcgccaaacgaaaaaaaaaaaaacccccgacccaaccccgcccctcgccccccgcccctcgaacctactcgtcccacccgcgcgcgacgcccctcacctaaacgacgacccctcgcgaacctcgacgcacgatcacgaataacgaaaacgaaaacgctaaaccacgaaacccatttacaaaaaaaaccgcgaaaaaccgcgccacgacaaaaaaacgcgcgcgaaatacgcacgcgcgaacgcgcccacttatatacgcgaaaaccgcgacgcgtcacgaaaaacgaaacgcacaaactcctccccgaaccccacccgaccccgcccctttcctaaccccgacgaaaccgcgcccccaacttccacctcgatacgactctcgccgtctaacttaaactaaacccaaccctacgacgttcgtcttaaaacgacccgaccgatcctaaatctacaaaaattaaaaaaccccgcgcccgaatccgaaaacccaacccccgcccctctcccgaacccaaacccccgtctcgaacgcgtctcgaaaccccgcctaatccaacccgcccgtcctcttcaacccttataaaaacgacgaaaacgccgaacgaaccaaaaaatactacgtacgcgaaaccctccgacccgacctccaaaaacttcgcaaccaaaaaaacctaaatctctcccgaatccccctcacaactctaacaactccgaaacc

SEQ ID NO: 29149 - DNA, 574 bp, Artificial Sequence
  chemically treated genomic DNA (Homo sapiens) CpG-island No: 29149
ggggtttcgtaatttgagagcgtgtagacgttgggtgagggattggtcgaaggtggagtgtttgggtattatcgggtcgcgatcgtttttaggttcggtttcgggtttagtggtgggggcggttttaggttcggtttcgaagtcggtttcggattcgatttcggattcggtttcgttttcggtttcgtagtcgaattttttttcgtattttaggtattcggggagggatagtttaaggtttgttttttcgtgttcgtggttagatttcgattcgggggatttagggaatatttgggcgtcggagcggtggtgggcgttaaggaagtttcggcgttgttgggtagtcgcgcgttgttgggtacgggcgttggaggtggtaagggcgcggaggagcgcgatggagtaggagagttagaggagcgcggtggttgttcggcggtttatgggcgggtataggtcgttgtaattatggcgagttcggcgttattgttgagttcgggattttcgatttatttttttaggtatatatcgagaagtcggtttgttttttggttttgtagagagtggtttcgaa

SEQ ID NO: 29150 - DNA, 574 bp, Artificial Sequence
  chemically treated genomic DNA (Homo sapiens) CpG-island No: 29150
ttcgaaaccactctctacaaaaccaaaaaacaaaccgacttctcgatatatacctaaaaaaataaatcgaaaatcccgaactcaacaataacgccgaactcgccataattacaacgacctatacccgcccataaaccgccgaacaaccaccgcgctcctctaactctcctactccatcgcgctcctccgcgcccttaccacctccaacgcccgtacccaacaacgcgcgactacccaacaacgccgaaacttccttaacgcccaccaccgctccgacgcccaaatattccctaaatcccccgaatcgaaatctaaccacgaacacgaaaaaacaaaccttaaactatccctccccgaatacctaaaatacgaaaaaaaattcgactacgaaaccgaaaacgaaaccgaatccgaaatcgaatccgaaaccgacttcgaaaccgaacctaaaaccgcccccaccactaaacccgaaaccgaacctaaaaacgatcgcgacccgataatacccaaacactccaccttcgaccaatccctcacccaacgtctacacgctctcaaattacgaaacccc

SEQ ID NO: 29151 - DNA, 574 bp, Artificial Sequence
  chemically treated genomic DNA (Homo sapiens) CpG-island No: 29151
ttcggagttattttttgtagagttagagggtaggtcggtttttcggtgtgtgtttaagaggatggatcggaggtttcgggtttagtagtggcgtcgagttcgttataattataacgatttgtgttcgtttataggtcgtcgggtagttatcgcgtttttttggtttttttgttttatcgcgttttttcgcgtttttgttatttttaacgttcgtgtttagtagcgcgcggttgtttaatagcgtcggagtttttttaacgtttattatcgtttcggcgtttaggtattttttgagtttttcgaatcggaatttgattacgagtacgaggaggtagattttgagttgttttttttcgagtgtttagagtacgaggaagagttcgattacgagatcgagagcgagatcgagttcgaaatcgagttcgagatcgatttcgagatcgagtttgagatcgtttttattattgagttcgagatcgagtttgaagacgatcgcggttcggtggtgtttaagtattttattttcggttagttttttatttagcgtttgtacgtttttaagttgcgaagtttt

SEQ ID NO: 29152 - DNA, 574 bp, Artificial Sequence
  chemically treated genomic DNA (Homo sapiens) CpG-island No: 29152
aaaacttcgcaacttaaaaacgtacaaacgctaaataaaaaactaaccgaaaataaaatacttaaacaccaccgaaccgcgatcgtcttcaaactcgatctcgaactcaataataaaaacgatctcaaactcgatctcgaaatcgatctcgaactcgatttcgaactcgatctcgctctcgatctcgtaatcgaactcttcctcgtactctaaacactcgaaaaaaaacaactcaaaatctacctcctcgtactcgtaatcaaattccgattcgaaaaactcaaaaaatacctaaacgccgaaacgataataaacgttaaaaaaactccgacgctattaaacaaccgcgcgctactaaacacgaacgttaaaaataacaaaaacgcgaaaaaacgcgataaaacaaaaaaaccaaaaaaacgcgataactacccgacgacctataaacgaacacaaatcgttataattataacgaactcgacgccactactaaacccgaaacctccgatccatcctcttaaacacacaccgaaaaaccgacctaccctctaactctacaaaaaataactccgaa

SEQ ID NO: 29153 - DNA, 530 bp, Artificial Sequence
  chemically treated genomic DNA (Homo sapiens) CpG-island No: 29153
tgcgtatatatgtagtttattttttcgttttggagttgtttgtcgatgagtttattgcgttttttttttgcgcgtttttgggttcgtttttttagggtttttttgcgtatttgtttgcgttttttcgttaggggtatttttttgattttgagagagcgcgaggttttgggttggggatttttagatcgatcgaagtagttttcgaaggtttgtacgagaaagttgcggagtaagttgcgttggggttttcggcggcggcgatttcgtcgatgttgaaattagcggaggtattcggaggttttatcgtcggattcgttttcgttggagttatcgtcgttgttggttatttttttatcgtagtatacgcggcggtcgcggttgttttcggatttgtttcgttaggtagacgcgcgagtaggtcgcggagtaggcggatcggtagtttggatttcggggttggggggtttgagatggattttgcgtttggtttcggaggtaggggttgtagaggtcgttcggcggatttgggt

SEQ ID NO: 29154 - DNA, 530 bp, Artificial Sequence
  chemically treated genomic DNA (Homo sapiens) CpG-island No: 29154
acccaaatccgccgaacgacctctacaacccctacctccgaaaccaaacgcaaaatccatctcaaaccccccaaccccgaaatccaaactaccgatccgcctactccgcgacctactcgcgcgtctacctaacgaaacaaatccgaaaacaaccgcgaccgccgcgtatactacgataaaaaaataaccaacaacgacgataactccaacgaaaacgaatccgacgataaaacctccgaatacctccgctaatttcaacatcgacgaaatcgccgccgccgaaaaccccaacgcaacttactccgcaactttctcgtacaaaccttcgaaaactacttcgatcgatctaaaaatccccaacccaaaacctcgcgctctctcaaaatcaaaaaaatacccctaacgaaaaaacgcaaacaaatacgcaaaaaaaccctaaaaaaacgaacccaaaaacgcgcaaaaaaaaaacgcaataaactcatcgacaaacaactccaaaacgaaaaaataaactacatatatacgca

SEQ ID NO: 29155 - DNA, 530 bp, Artificial Sequence
  chemically treated genomic DNA (Homo sapiens) CpG-island No: 29155
gtttaagttcgtcgggcggtttttgtagtttttgttttcggggttagacgtaagatttattttagattttttagtttcgagatttaggttgtcgattcgtttatttcgcggtttattcgcgcgtttgtttggcggggtaagttcgagagtagtcgcggtcgtcgcgtgtattacgatgaaggggtggttagtagcgacgatgattttagcggagacgagttcgacgatgggattttcggatgttttcgttggttttagtatcggcgaaatcgtcgtcgtcgaaagttttagcgtaatttatttcgtaattttttcgtgtaagttttcgggggttgtttcggtcgatttgagagtttttagtttaaagtttcgcgtttttttaaggttaagaaggtatttttggcggagaagcgtagatagatgcgtaaagaagttttggagaagcgggtttagaagcgcgtagagaagaaacgtagtaagtttatcgataaataattttaggacgaaaagatgggttatatgtgtacgta

SEQ ID NO: 29156 - DNA, 530 bp, Artificial Sequence
  chemically treated genomic DNA (Homo sapiens) CpG-island No: 29156
tacgtacacatataacccatcttttcgtcctaaaattatttatcgataaacttactacgtttcttctctacgcgcttctaaacccgcttctccaaaacttctttacgcatctatctacgcttctccgccaaaaataccttcttaaccttaaaaaaacgcgaaactttaaactaaaaactctcaaatcgaccgaaacaacccccgaaaacttacacgaaaaaattacgaaataaattacgctaaaactttcgacgacgacgatttcgccgatactaaaaccaacgaaaacatccgaaaatcccatcgtcgaactcgtctccgctaaaatcatcgtcgctactaaccaccccttcatcgtaatacacgcgacgaccgcgactactctcgaacttaccccgccaaacaaacgcgcgaataaaccgcgaaataaacgaatcgacaacctaaatctcgaaactaaaaaatctaaaataaatcttacgtctaaccccgaaaacaaaaactacaaaaaccgcccgacgaacttaaac

SEQ ID NO: 29157 - DNA, 632 bp, Artificial Sequence
  chemically treated genomic DNA (Homo sapiens) CpG-island No: 29157
aggtcggtcggtcgtagcgtgtcggggtcgtacgtggtgacgtcgaacgatagcgcgtcgggtcgcgcgttattcgagcgcgtgattttgacgaagatggtttcggttacgcgtacgggtcggttggtgaagacgagcgcgcgttcgtcgcgttcgtgttttacgcgcgttatcgtttgttcgtcgaggatgcggacgtgcgcgtcggcgcgtagggcgtggaaacgtaggtcgtcgtcgagttgcgtcggtagcgcgcggttgtgttgcgagttgagtgagttttgcgggatggggtagtcggcggtcggcgcggtttcgtcgtcgttcgcgttcggtacgttgaggtcgtataggtttatcgagaggcgcgcgtcgttcgtttcgcgtcgtagcgacggtcgtcgtagggcggtgaaggagcgcggtcgtagatagttcgggagtattagttcgttatttgcgcgggagatacggggtagtgttacgtagggttttcgggaggcggtttcggcgcgtttcgttgttcggtttttacgcgcgtatcgttataatttcggatggttaatggcgtatacgatgtttgtgatataaattagcgaatatagttaagaaacgatttttgtaggata

SEQ ID NO: 29158 - DNA, 632 bp, Artificial Sequence
  chemically treated genomic DNA (Homo sapiens) CpG-island No: 29158
tatcctacaaaaatcgtttcttaactatattcgctaatttatatcacaaacatcgtatacgccattaaccatccgaaattataacgatacgcgcgtaaaaaccgaacaacgaaacgcgccgaaaccgcctcccgaaaaccctacgtaacactaccccgtatctcccgcgcaaataacgaactaatactcccgaactatctacgaccgcgctccttcaccgccctacgacgaccgtcgctacgacgcgaaacgaacgacgcgcgcctctcgataaacctatacgacctcaacgtaccgaacgcgaacgacgacgaaaccgcgccgaccgccgactaccccatcccgcaaaactcactcaactcgcaacacaaccgcgcgctaccgacgcaactcgacgacgacctacgtttccacgccctacgcgccgacgcgcacgtccgcatcctcgacgaacaaacgataacgcgcgtaaaacacgaacgcgacgaacgcgcgctcgtcttcaccaaccgacccgtacgcgtaaccgaaaccatcttcgtcaaaatcacgcgctcgaataacgcgcgacccgacgcgctatcgttcgacgtcaccacgtacgaccccgacacgctacgaccgaccgacct

SEQ ID NO: 29159 - DNA, 632 bp, Artificial Sequence
  chemically treated genomic DNA (Homo sapiens) CpG-island No: 29159
tgttttgtaagagtcgttttttgattgtgttcgttaatttatgttataagtatcgtgtgcgttattagttattcgggattgtaacggtgcgcgcgtagggatcggatagcggggcgcgtcggggtcgtttttcgagagttttgcgtgatattgtttcgtgtttttcgcgtagatagcgagttggtgttttcggattgtttgcggtcgcgtttttttatcgttttgcggcggtcgtcgttgcggcgcgaggcggacgacgcgcgtttttcggtgagtttatgcgattttaacgtgtcgggcgcggacggcgacgaggtcgcgtcggtcgtcggttgttttatttcgtagaatttatttaattcgtagtatagtcgcgcgttgtcggcgtagttcgacggcgatttgcgtttttacgttttgcgcgtcggcgcgtacgttcgtattttcgacgagtagacggtggcgcgcgtggagtacgggcgcgacgagcgcgcgttcgtttttattagtcggttcgtgcgcgtggtcgagattattttcgttaaggttacgcgttcgggtggcgcgcggttcggcgcgttgtcgttcggcgttattacgtgcgatttcggtacgttgcggtcggtcgattt

SEQ ID NO: 29160 - DNA, 632 bp, Artificial Sequence
  chemically treated genomic DNA (Homo sapiens) CpG-island No: 29160
aaatcgaccgaccgcaacgtaccgaaatcgcacgtaataacgccgaacgacaacgcgccgaaccgcgcgccacccgaacgcgtaaccttaacgaaaataatctcgaccacgcgcacgaaccgactaataaaaacgaacgcgcgctcgtcgcgcccgtactccacgcgcgccaccgtctactcgtcgaaaatacgaacgtacgcgccgacgcgcaaaacgtaaaaacgcaaatcgccgtcgaactacgccgacaacgcgcgactatactacgaattaaataaattctacgaaataaaacaaccgacgaccgacgcgacctcgtcgccgtccgcgcccgacacgttaaaatcgcataaactcaccgaaaaacgcgcgtcgtccgcctcgcgccgcaacgacgaccgccgcaaaacgataaaaaaacgcgaccgcaaacaatccgaaaacaccaactcgctatctacgcgaaaaacacgaaacaatatcacgcaaaactctcgaaaaacgaccccgacgcgccccgctatccgatccctacgcgcgcaccgttacaatcccgaataactaataacgcacacgatacttataacataaattaacgaacacaatcaaaaaacgactcttacaaaaca

SEQ ID NO: 29161 - DNA, 577 bp, Artificial Sequence
  chemically treated genomic DNA (Homo sapiens) CpG-island No: 29161
ttggcgtcgggattacgcggtcgaggcgatcgaaagagaaacgaggttaggtaaggaggaggaaatttattcgatgaaggcgagttgtcgtttaagagggaggagggttttttcggttgtcgttgttgttgtttcgggacgtcgtttggggagttagttcgttcgtaaggtgcgcgttaggtagtttcgtatttagggggcgttttttttggttttttttagagcggtcgggacggaaggagttgcgcggcgcggcgcggcgcggcgcggcgggtggcgagggcgggttgtatttcgagcgcggcgtttttgagttgtatcgcggcgtaggtttgcgagtcgatttgttagtcggttaagaaaaggaagtttcgttttttttcgtttattcggtttttttattttttgtattttaaattttgtagagggcgagcggcgcggttacggaggcgtcgaggaggagcgagtcgtcgtcgggtagcggcgtgttttcgggggagagggcgtcggagaggaggcggcggcgcggcggcgagggcgcggcgcgcgatggtagttgtttagttcggcgggcgcg

SEQ ID NO: 29162 - DNA, 577 bp, Artificial Sequence
  chemically treated genomic DNA (Homo sapiens) CpG-island No: 29162
cgcgcccgccgaactaaacaactaccatcgcgcgccgcgccctcgccgccgcgccgccgcctcctctccgacgccctctcccccgaaaacacgccgctacccgacgacgactcgctcctcctcgacgcctccgtaaccgcgccgctcgccctctacaaaatttaaaatacaaaaaataaaaaaaccgaataaacgaaaaaaaacgaaacttccttttcttaaccgactaacaaatcgactcgcaaacctacgccgcgatacaactcaaaaacgccgcgctcgaaatacaacccgccctcgccacccgccgcgccgcgccgcgccgcgccgcgcaactccttccgtcccgaccgctctaaaaaaaaccaaaaaaaacgccccctaaatacgaaactacctaacgcgcaccttacgaacgaactaactccccaaacgacgtcccgaaacaacaacaacgacaaccgaaaaaaccctcctccctcttaaacgacaactcgccttcatcgaataaatttcctcctccttacctaacctcgtttctctttcgatcgcctcgaccgcgtaatcccgacgccaa

SEQ ID NO: 29163 - DNA, 577 bp, Artificial Sequence
  chemically treated genomic DNA (Homo sapiens) CpG-island No: 29163
cgcgttcgtcgggttaagtagttgttatcgcgcgtcgcgttttcgtcgtcgcgtcgtcgtttttttttcggcgttttttttttcgagggtacgtcgttgttcggcggcggttcgttttttttcggcgttttcgtggtcgcgtcgttcgttttttgtagagtttagagtataaggggtggggaagtcgggtgagcgggaagggacggagttttttttttttggtcggttgataagtcggttcgtaaatttgcgtcgcggtgtagtttaagggcgtcgcgttcggggtgtagttcgttttcgttattcgtcgcgtcgcgtcgcgtcgcgtcgcgtagtttttttcgtttcggtcgttttgggaggggttaggaagggcgttttttgggtgcggagttatttggcgcgtattttacgagcgggttggttttttaggcggcgtttcggaatagtagtagcggtagtcgaaaggattttttttttttttaggcggtagttcgtttttatcgggtggatttttttttttttgtttggtttcgtttttttttcgatcgtttcggtcgcgtggtttcggcgttag

SEQ ID NO: 29164 - DNA, 577 bp, Artificial Sequence
  chemically treated genomic DNA (Homo sapiens) CpG-island No: 29164
ctaacgccgaaaccacgcgaccgaaacgatcgaaaaaaaaacgaaaccaaacaaaaaaaaaaaaatccacccgataaaaacgaactaccgcctaaaaaaaaaaaaaatcctttcgactaccgctactactattccgaaacgccgcctaaaaaaccaacccgctcgtaaaatacgcgccaaataactccgcacccaaaaaacgcccttcctaacccctcccaaaacgaccgaaacgaaaaaaactacgcgacgcgacgcgacgcgacgcgacgaataacgaaaacgaactacaccccgaacgcgacgcccttaaactacaccgcgacgcaaatttacgaaccgacttatcaaccgaccaaaaaaaaaaaactccgtcccttcccgctcacccgacttccccaccccttatactctaaactctacaaaaaacgaacgacgcgaccacgaaaacgccgaaaaaaaacgaaccgccgccgaacaacgacgtaccctcgaaaaaaaaaacgccgaaaaaaaaacgacgacgcgacgacgaaaacgcgacgcgcgataacaactacttaacccgacgaacgcg

SEQ ID NO: 29165 - DNA, 801 bp, Artificial Sequence
  chemically treated genomic DNA (Homo sapiens) CpG-island No: 29165
cgtaggtcgtagtttagtgttcgaatgtagattgggaattgtgggttaattcgcgagttttgggtcggttttggtttagatcgtttttttcgtattgttgtgtcgagcggatcgatttaagggatcgcgtaggttttttcggttttttttacggggacgtgtgtttgggcgtgtgatacgtggcggaggtagcgcggttttaaggaataaggatacgggttattaggttatacgtatatgtatttgtatataattggaagatcgatttttgttttagattaatttttcgtattcggtaaagaaaggagaagcgtcgattagcgttttttttgttttttggcgtggattcgcggaatcgtttacgtttagaggggttttttttcgagcgcgaggaattggagttcggttggttttcgttttcgttttcgtttttcggttttagttgcgcggcgtcgttttattcgcgatgtcgtagtgttgcgcggtggcgtaggttaggcggttcggtaggtacggggagaattcggcggcgtagtcgtggcgtttcggcgttcgtagtattcgcgtcgttttatcgtatatcgtatttatttcgttcgtcgttttcggttttcgttgtttcggtcgcggaagtcgtttcgagtcggaggtatattggcgcggttagagagattaggtagatcggacggaagtgtgggtttcgtgttttgtgtttgagattttgattggttcgtataggaaagggcgttgatttcgacggagattatttttgttttgggtgaatttaaattgaattgcgtt

SEQ ID NO: 29166 - DNA, 801 bp, Artificial Sequence
  chemically treated genomic DNA (Homo sapiens) CpG-island No: 29166
aacgcaattcaatttaaattcacccaaaacaaaaataatctccgtcgaaatcaacgccctttcctatacgaaccaatcaaaatctcaaacacaaaacacgaaacccacacttccgtccgatctacctaatctctctaaccgcgccaatatacctccgactcgaaacgacttccgcgaccgaaacaacgaaaaccgaaaacgacgaacgaaataaatacgatatacgataaaacgacgcgaatactacgaacgccgaaacgccacgactacgccgccgaattctccccgtacctaccgaaccgcctaacctacgccaccgcgcaacactacgacatcgcgaataaaacgacgccgcgcaactaaaaccgaaaaacgaaaacgaaaacgaaaaccaaccgaactccaattcctcgcgctcgaaaaaaaacccctctaaacgtaaacgattccgcgaatccacgccaaaaaacaaaaaaaacgctaatcgacgcttctcctttctttaccgaatacgaaaaattaatctaaaacaaaaatcgatcttccaattatatacaaatacatatacgtataacctaataacccgtatccttattccttaaaaccgcgctacctccgccacgtatcacacgcccaaacacacgtccccgtaaaaaaaaccgaaaaaacctacgcgatcccttaaatcgatccgctcgacacaacaatacgaaaaaaacgatctaaaccaaaaccgacccaaaactcgcgaattaacccacaattcccaatctacattcgaacactaaactacgacctacg

SEQ ID NO: 29167 - DNA, 801 bp, Artificial Sequence
  chemically treated genomic DNA (Homo sapiens) CpG-island No: 29167
ggcgtaatttagtttggatttatttaaaataaaaatggttttcgtcggagttaacgtttttttttgtgcggattaattagaattttaaatatagggtacggggtttatattttcgttcggtttgtttggtttttttaatcgcgttagtgtgttttcgattcggaacggttttcgcggtcggggtagcgagggtcgggggcggcgggcgggatgagtgcggtgtgcggtggagcggcgcggatgttgcggacgtcgggacgttacggttacgtcgtcgagtttttttcgtatttgtcgggtcgtttggtttgcgttatcgcgtagtattacggtatcgcgggtgaggcggcgtcgcgtagttggggtcggggggcggaggcggaggcgggggttagtcgggttttagtttttcgcgttcgagggaaagtttttttgagcgtagacggtttcgcgggtttacgttagggggtagaagaggcgttggtcggcgttttttttttttttgtcgagtgcgaggagttggtttgaagtaggagtcgattttttagttgtgtgtaagtgtatatacgtgtagtttagtagttcgtgtttttgttttttgagatcgcgttgttttcgttacgtgttatacgtttaggtatacgttttcgtagggagagtcgggggagtttgcgcggttttttggatcggttcgttcggtatagtagtacggggaagacggtttgagttagaatcgatttagggttcgcgagttggtttataatttttagtttgtattcgagtattgagttgcgatttgcg

SEQ ID NO: 29168 - DNA, 801 bp, Artificial Sequence
  chemically treated genomic DNA (Homo sapiens) CpG-island No: 29168
cgcaaatcgcaactcaatactcgaatacaaactaaaaattataaaccaactcgcgaaccctaaatcgattctaactcaaaccgtcttccccgtactactataccgaacgaaccgatccaaaaaaccgcgcaaactcccccgactctccctacgaaaacgtatacctaaacgtataacacgtaacgaaaacaacgcgatctcaaaaaacaaaaacacgaactactaaactacacgtatatacacttacacacaactaaaaaatcgactcctacttcaaaccaactcctcgcactcgacaaaaaaaaaaaaaacgccgaccaacgcctcttctaccccctaacgtaaacccgcgaaaccgtctacgctcaaaaaaactttccctcgaacgcgaaaaactaaaacccgactaacccccgcctccgcctccgccccccgaccccaactacgcgacgccgcctcacccgcgataccgtaatactacgcgataacgcaaaccaaacgacccgacaaatacgaaaaaaactcgacgacgtaaccgtaacgtcccgacgtccgcaacatccgcgccgctccaccgcacaccgcactcatcccgcccgccgcccccgaccctcgctaccccgaccgcgaaaaccgttccgaatcgaaaacacactaacgcgattaaaaaaaccaaacaaaccgaacgaaaatataaaccccgtaccctatatttaaaattctaattaatccgcacaaaaaaaaacgttaactccgacgaaaaccatttttattttaaataaatccaaactaaattacgcc

SEQ ID NO: 29169 - DNA, 653 bp, Artificial Sequence
  chemically treated genomic DNA (Homo sapiens) CpG-island No: 29169
  unsure (462, 642)
ataggaaagtaacgcggattaaaggatcggagaatttaagggcgcgatatatattacggcgttaaaaatcgtacggggaaaaacgggaagaggaggcgtagatatttaagtaaaataaagtcgggggcgcggtacgaaaaagaggaaaaataggggcgcgcgaaaaacgcgcggagaaaaaaataaacgggaagatagaaacggcgtaaggaagaaggaacgggggaaaaaggaagggggaaaagcgataaggggggggggaggtaaaacgtaaaggacggggggtaaaacgaaaaggcgggagaataaatcgggcgggagtaagacgtaaacggtcgataggaaagaaaaaaaaagtatcgtttttttttcgttttttttacgttcgtttcgttttttttacgttttcgttttcgtttcgttttttttatttcgattcgttttttttcgttcgtagttatnatcgtcgtagtttttttcgcgtagtttgggagtgattcggcgtttattcgggagacgtcgttttgtggttcggataatcggttttatgtagcgtcgttcgaggtagttcgcggagaggcggtttattttttaatttaggaatgtttatattttgagaaaaagaataataagggggtgggngggggtgggga

SEQ ID NO: 29170 - DNA, 653 bp, Artificial Sequence
  chemically treated genomic DNA (Homo sapiens) CpG-island No: 29170
  unsure (12, 192)
tccccacccccncccacccccttattattctttttctcaaaatataaacattcctaaattaaaaaataaaccgcctctccgcgaactacctcgaacgacgctacataaaaccgattatccgaaccacaaaacgacgtctcccgaataaacgccgaatcactcccaaactacgcgaaaaaaactacgacgatnataactacgaacgaaaaaaaacgaatcgaaataaaaaaaacgaaacgaaaacgaaaacgtaaaaaaaacgaaacgaacgtaaaaaaaacgaaaaaaaaacgatactttttttttctttcctatcgaccgtttacgtcttactcccgcccgatttattctcccgccttttcgttttaccccccgtcctttacgttttacctccccccccccttatcgcttttcccccttcctttttcccccgttccttcttccttacgccgtttctatcttcccgtttatttttttctccgcgcgtttttcgcgcgcccctatttttcctctttttcgtaccgcgcccccgactttattttacttaaatatctacgcctcctcttcccgtttttccccgtacgatttttaacgccgtaatatatatcgcgcccttaaattctccgatcctttaatccgcgttactttcctat

SEQ ID NO: 29171 - DNA, 653 bp, Artificial Sequence
  chemically treated genomic DNA (Homo sapiens) CpG-island No: 29171
  unsure (12, 192)
tttttatttttntttatttttttgttgtttttttttttaagatatgggtatttttgggttaaaaggtaagtcgttttttcgcgaattgtttcggacggcgttgtataggatcggttgttcgggttatagagcggcgtttttcgagtgaacgtcgagttatttttaggttgcgcggggagggttgcggcggtngtggttgcgggcgagggagggcgggtcggggtagggggagcgggacgggggcgggggcgtgggaggggcggggcgggcgtgggaggggcggggagggggcggtgtttttttttttttttttgtcggtcgtttgcgttttgttttcgttcggtttgttttttcgttttttcgttttgtttttcgttttttgcgttttgtttttttttttttttgtcgtttttttttttttttttttttttcgtttttttttttttgcgtcgtttttgttttttcgtttgttttttttttcgcgcgtttttcgcgcgtttttgttttttttttttttcgtgtcgcgttttcggttttgttttgtttgggtgtttgcgtttttttttttcgttttttttcgtgcggtttttggcgtcgtggtgtgtgtcgcgtttttgggtttttcggttttttggttcgcgttgtttttttgt

SEQ ID NO: 29172 - DNA, 653 bp, Artificial Sequence
  chemically treated genomic DNA (Homo sapiens) CpG-island No: 29172
  unsure (462, 642)
acaaaaaaacaacgcgaaccaaaaaaccgaaaaacccaaaaacgcgacacacaccacgacgccaaaaaccgcacgaaaaaaaacgaaaaaaaaaaacgcaaacacccaaacaaaacaaaaccgaaaacgcgacacgaaaaaaaaaaaaaacaaaaacgcgcgaaaaacgcgcgaaaaaaaaaacaaacgaaaaaacaaaaacgacgcaaaaaaaaaaaaacgaaaaaaaaaaaaaaaaaaaaaaacgacaaaaaaaaaaaaaaacaaaacgcaaaaaacgaaaaacaaaacgaaaaaacgaaaaaacaaaccgaacgaaaacaaaacgcaaacgaccgacaaaaaaaaaaaaaaaaacaccgccccctccccgcccctcccacgcccgccccgcccctcccacgcccccgcccccgtcccgctccccctaccccgacccgccctccctcgcccgcaaccacnaccgccgcaaccctccccgcgcaacctaaaaataactcgacgttcactcgaaaaacgccgctctataacccgaacaaccgatcctatacaacgccgtccgaaacaattcgcgaaaaaacgacttaccttttaacccaaaaatacccatatcttaaaaaaaaaaacaacaaaaaaataaanaaaaataaaaa

SEQ ID NO: 29173 - DNA, 795 bp, Artificial Sequence
  chemically treated genomic DNA (Homo sapiens) CpG-island No: 29173
aggagcgcggagcggagcgtttcgattcgtcgtgcgtattttttggagggaaggggcgggggaatcggtttttgagggaagcgttcggtggcgagggggttagttaagtttcggttgcggcgttattttttcggttttacgagaggaaagttttttttttttagacgttttcgtcggttcgcgtttttcgggtttagtttttcgagttttcggagcgggcgtcgttttagtttagtttcggggaaacgcgagtcgcgatgtttggggggtgttttcggggtttcgtcgtcggggacgggcgtttgcggttggcgcgattagcgttggtatttttgggttgggttttttcgtttttttttattttttcggtattttttttttttttttcggcgtcgtttttggttttcgtcgtgttcgtttagttttcgttgtcggattagtgtttcgcgttgtgcgagtgtttcgaggtagcgcgtatagttaagtgcgttaatcgtaatttgatcgaggtgtttacggatttgttcgtttacgtgcgtaattttttttttatcggtaattagttggtcgtgttttttgtcggcgttttcgttcgtcggtcgtcgttggcggagttggtcgcgtttaattttagcggtagtcgtttggacgaggtgcgcgcgggcgttttcgagtatttgtttagtttgcgttagttcgattttagttataatttattggtcgattttagttttttcgttttttcgggtagtaatgttagcgtttcggtttttagtttttttgtggaattgattt

SEQ ID NO: 29174 - DNA, 795 bp, Artificial Sequence
  chemically treated genomic DNA (Homo sapiens) CpG-island No: 29174
aaatcaattccacaaaaaaactaaaaaccgaaacgctaacattactacccgaaaaaacgaaaaaactaaaatcgaccaataaattataactaaaatcgaactaacgcaaactaaacaaatactcgaaaacgcccgcgcgcacctcgtccaaacgactaccgctaaaattaaacgcgaccaactccgccaacgacgaccgacgaacgaaaacgccgacaaaaaacacgaccaactaattaccgataaaaaaaaaattacgcacgtaaacgaacaaatccgtaaacacctcgatcaaattacgattaacgcacttaactatacgcgctacctcgaaacactcgcacaacgcgaaacactaatccgacaacgaaaactaaacgaacacgacgaaaaccaaaaacgacgccgaaaaaaaaaaaaaaaataccgaaaaaataaaaaaaaacgaaaaaacccaacccaaaaataccaacgctaatcgcgccaaccgcaaacgcccgtccccgacgacgaaaccccgaaaacaccccccaaacatcgcgactcgcgtttccccgaaactaaactaaaacgacgcccgctccgaaaactcgaaaaactaaacccgaaaaacgcgaaccgacgaaaacgtctaaaaaaaaaaaactttcctctcgtaaaaccgaaaaaataacgccgcaaccgaaacttaactaaccccctcgccaccgaacgcttccctcaaaaaccgattcccccgccccttccctccaaaaaatacgcacgacgaatcgaaacgctccgctccgcgctcct

SEQ ID NO: 29175 - DNA, 795 bp, Artificial Sequence
  chemically treated genomic DNA (Homo sapiens) CpG-island No: 29175
ggattagttttataaggggattgggggtcgagacgttggtattgttgttcgagaaagcgaagggattgaggtcggttagtgggttgtggttgaggtcgagttggcgtaggttgggtagatgttcgaaggcgttcgcgcgtatttcgtttaggcggttgtcgttgaggttgagcgcggttagtttcgttagcggcggtcggcgggcgaaggcgtcggtagggagtacggttagttggttgtcggtaaggaagaggttgcgtacgtaggcgggtaggttcgtgggtatttcggttagattgcggttaacgtatttgattgtgcgcgttgtttcggagtattcgtatagcgcggggtattggttcggtagcgggggttgggcggatacggcggaagttaggaacggcgtcgaggaggagaaggaggatgtcgaggaggtgggagaagacgaggagatttagtttaggagtattagcgttagtcgcgttagtcgtagacgttcgttttcggcggcggggtttcgggagtattttttaggtatcgcggttcgcgttttttcggagttgggttgggacggcgttcgtttcgaaggttcgggaggttgggttcggagggcgcgagtcggcggaagcgtttggaaaaaaaaaatttttttttcgtggaatcgagggagtggcgtcgtagtcggaatttggttaattttttcgttatcgggcgttttttttaggggtcgattttttcgttttttttttttagaaagtacgtacggcgggtcgggacgtttcgtttcgcgttttt

SEQ ID NO: 29176 - DNA, 795 bp, Artificial Sequence
  chemically treated genomic DNA (Homo sapiens) CpG-island No: 29176
aaaaacgcgaaacgaaacgtcccgacccgccgtacgtactttctaaaaaaaaaaaacgaaaaaatcgacccctaaaaaaaacgcccgataacgaaaaaattaaccaaattccgactacgacgccactccctcgattccacgaaaaaaaaattttttttttccaaacgcttccgccgactcgcgccctccgaacccaacctcccgaaccttcgaaacgaacgccgtcccaacccaactccgaaaaaacgcgaaccgcgatacctaaaaaatactcccgaaaccccgccgccgaaaacgaacgtctacgactaacgcgactaacgctaatactcctaaactaaatctcctcgtcttctcccacctcctcgacatcctccttctcctcctcgacgccgttcctaacttccgccgtatccgcccaacccccgctaccgaaccaataccccgcgctatacgaatactccgaaacaacgcgcacaatcaaatacgttaaccgcaatctaaccgaaatacccacgaacctacccgcctacgtacgcaacctcttccttaccgacaaccaactaaccgtactccctaccgacgccttcgcccgccgaccgccgctaacgaaactaaccgcgctcaacctcaacgacaaccgcctaaacgaaatacgcgcgaacgccttcgaacatctacccaacctacgccaactcgacctcaaccacaacccactaaccgacctcaatcccttcgctttctcgaacaacaataccaacgtctcgacccccaatccccttataaaactaatcc

SEQ ID NO: 29177 - DNA, 1116 bp, Artificial Sequence
  chemically treated genomic DNA (Homo sapiens) CpG-island No: 29177
ttcgggtcgcggattcgttttacgtcgtatttagtacgttgttttttcgttttatttttgtgtcggttatcgtgtggtcgcgtttgcgcgtttcgttcggtttgtcggcgtgagaaagagttcgtgtcgtttttaagtttagattagaggggacggcgaagcgcgaaaaagttttttgcgtttagtacgtaggcgtagtcgtgtttttgggtttttcgggtttcgttttagttggcgcgttcggcgttttttcgttagcgggtagttgggggcgttgtagggagggtattcgagcgggttgggggcgttcggaagggtggtttgtaaggttcgggtagttgtagttttcggagtggggcggagaggcgcggtatcgcgcggacgaggatggggcgggggcgggcgtagttcgagggtgtaggtacgataaggcgggtgatagttagcggggaggggcgggcgttatcgcgtttacgttttttgttcggggtcgggtcgggagggttttcgggttttgcgcgcgtttggtcggcgggttgaggcgtacgggtcgtacgtagcgttatgcgaggtttttttgtttggtcgttgcggttgttcgagttatcgagttttgtcgagttaggtcggtttttgtcggtagtttgcgtgtgggtcgcggttagtcgcgttttcgggtttttatcgtcgtttattggtttgaggtcggcgcggttatggggcgcggggttcgcgttgttttggggcgttggagtcgcgcgtcgttggaggagcggttgtcggggcgggggttcgggcgtttcgcggggcgttttgggtttcgcgcggtttttggggttgtgggttcgcggtttcggtagttgtaggtgcggggtttttgtcgggttaggcgtttttcggttttcgcgcgttcggttttcgggcggtttcgtagtcgttgtttggataggggacgaggtttgtcggcgcgggtcggcggcgtttttcggggataaggggcggttgcgtttcgtagcggtcggattttcggaggttcggaagtttttggggttggcgtattttgagcgtcggaggttggtaggtagggtttttttcggttattttttttcgtcgggt

SEQ ID NO: 29178 - DNA, 1116 bp, Artificial Sequence
  chemically treated genomic DNA (Homo sapiens) CpG-island No: 29178
acccgacgaaaaaaaataaccgaaaaaaaccctacctaccaacctccgacgctcaaaatacgccaaccccaaaaacttccgaacctccgaaaatccgaccgctacgaaacgcaaccgccccttatccccgaaaaacgccgccgacccgcgccgacaaacctcgtcccctatccaaacaacgactacgaaaccgcccgaaaaccgaacgcgcgaaaaccgaaaaacgcctaacccgacaaaaaccccgcacctacaactaccgaaaccgcgaacccacaaccccaaaaaccgcgcgaaacccaaaacgccccgcgaaacgcccgaacccccgccccgacaaccgctcctccaacgacgcgcgactccaacgccccaaaacaacgcgaaccccgcgccccataaccgcgccgacctcaaaccaataaacgacgataaaaacccgaaaacgcgactaaccgcgacccacacgcaaactaccgacaaaaaccgacctaactcgacaaaactcgataactcgaacaaccgcaacgaccaaacaaaaaaacctcgcataacgctacgtacgacccgtacgcctcaacccgccgaccaaacgcgcgcaaaacccgaaaaccctcccgacccgaccccgaacaaaaaacgtaaacgcgataacgcccgcccctccccgctaactatcacccgccttatcgtacctacaccctcgaactacgcccgcccccgccccatcctcgtccgcgcgataccgcgcctctccgccccactccgaaaactacaactacccgaaccttacaaaccacccttccgaacgcccccaacccgctcgaataccctccctacaacgcccccaactacccgctaacgaaaaaacgccgaacgcgccaactaaaacgaaacccgaaaaacccaaaaacacgactacgcctacgtactaaacgcaaaaaactttttcgcgcttcgccgtcccctctaatctaaacttaaaaacgacacgaactctttctcacgccgacaaaccgaacgaaacgcgcaaacgcgaccacacgataaccgacacaaaaataaaacgaaaaaacaacgtactaaatacgacgtaaaacgaatccgcgacccgaa

SEQ ID NO: 29179 - DNA, 1116 bp, Artificial Sequence
  chemically treated genomic DNA (Homo sapiens) CpG-island No: 29179
gttcggcggagggaagtggtcggggaggattttatttgttagttttcggcgtttagggtacgttagttttaggagttttcgggttttcgggagttcggtcgttgcggggcgtaatcgttttttgttttcgggaggcgtcgtcggttcgcgtcgataggtttcgttttttgtttaggtagcggttgcgggatcgttcgggaatcgggcgcgcgggagtcgaggagcgtttggttcggtaaaagtttcgtatttgtagttgtcggggtcgcgagtttatagttttaggagtcgcgcgaggtttaggacgtttcgcgaggcgttcggattttcgtttcggtagtcgtttttttagcggcgcgcggttttaacgttttagagtagcgcgggtttcgcgttttatagtcgcgtcggttttaggttagtgaacggcgatagggattcgggaacgcggttggtcgcggtttatacgtaggttatcggtaggagtcgatttggttcggtagggttcggtggttcgagtagtcgtagcggttaggtaggggggtttcgtatggcgttgcgtgcgattcgtacgttttagttcgtcggttaggcgcgcgtaaagttcgaggattttttcggttcggtttcgagtaaagggcgtggacgcggtggcgttcgttttttttcgttggttgttattcgttttatcgtgtttgtattttcgggttgcgttcgttttcgttttattttcgttcgcgcggtgtcgcgttttttcgttttatttcggggattgtagttattcggattttgtaagttattttttcgagcgtttttaattcgttcgggtgttttttttgtagcgtttttaattgttcgttggcggaggagcgtcgggcgcgttagttgggacgaggttcgggaagtttaggagtacggttgcgtttgcgtattgggcgtagggaattttttcgcgtttcgtcgttttttttggtttgaatttgggaacgatacgagtttttttttacgtcggtagatcgggcggagcgcgtagacgcgattatacgatggtcggtataaagatggggcgggaggatagcgtgttggatacggcgtggggcgggttcgcggttcggg

SEQ ID NO: 29180 - DNA, 1116 bp, Artificial Sequence
  chemically treated genomic DNA (Homo sapiens) CpG-island No: 29180
cccgaaccgcgaacccgccccacgccgtatccaacacgctatcctcccgccccatctttataccgaccatcgtataatcgcgtctacgcgctccgcccgatctaccgacgtaaaaaaaaactcgtatcgttcccaaattcaaaccaaaaaaaacgacgaaacgcgaaaaaattccctacgcccaatacgcaaacgcaaccgtactcctaaacttcccgaacctcgtcccaactaacgcgcccgacgctcctccgccaacgaacaattaaaaacgctacaaaaaaaacacccgaacgaattaaaaacgctcgaaaaaataacttacaaaatccgaataactacaatccccgaaataaaacgaaaaaacgcgacaccgcgcgaacgaaaataaaacgaaaacgaacgcaacccgaaaatacaaacacgataaaacgaataacaaccaacgaaaaaaaacgaacgccaccgcgtccacgccctttactcgaaaccgaaccgaaaaaatcctcgaactttacgcgcgcctaaccgacgaactaaaacgtacgaatcgcacgcaacgccatacgaaacccccctacctaaccgctacgactactcgaaccaccgaaccctaccgaaccaaatcgactcctaccgataacctacgtataaaccgcgaccaaccgcgttcccgaatccctatcgccgttcactaacctaaaaccgacgcgactataaaacgcgaaacccgcgctactctaaaacgttaaaaccgcgcgccgctaaaaaaacgactaccgaaacgaaaatccgaacgcctcgcgaaacgtcctaaacctcgcgcgactcctaaaactataaactcgcgaccccgacaactacaaatacgaaacttttaccgaaccaaacgctcctcgactcccgcgcgcccgattcccgaacgatcccgcaaccgctacctaaacaaaaaacgaaacctatcgacgcgaaccgacgacgcctcccgaaaacaaaaaacgattacgccccgcaacgaccgaactcccgaaaacccgaaaactcctaaaactaacgtaccctaaacgccgaaaactaacaaataaaatcctccccgaccacttccctccgccgaac

SEQ ID NO: 29181 - DNA, 569 bp, Artificial Sequence
  chemically treated genomic DNA (Homo sapiens) CpG-island No: 29181
cggcggttgaaagtgtcgttgcgagtatttttaggtcgcgtttattttattacgtttcggtagttatttggagtcggaagcgttgcgtcgttttgtttatgttttttaggttcgttcgttgtttttgtcgcgttcggattatcgcgtttcgcgtcgttcggcgttcggattagcgtagggttacggtcgtcgttacgaagtagtaggttagggcgatttcggaggcgttaggtagcgcggtttatagttcgtattgtattatgatttttttagtttgttgttgtttatcgcgatagttgaagtcgtcgtacgcgtagttcgttcgtttcgtcgtaaaattcggattggattagtcgggattttacgttcgtttgcgcgggaggggcggggaagcgcgttagagtttagaggttattagaggcggttcgtttggtatcgtttttagcgatatttcgtttttcgttaagtcgagtaggcgggtggggaagggcgattgtttttcgtgggcgattttttaagtttgagtttagtatcggttgggtattatagtttcggtcgttttttgtttt

SEQ ID NO: 29182 - DNA, 569 bp, Artificial Sequence
  chemically treated genomic DNA (Homo sapiens) CpG-island No: 29182
aaaacaaaaaacgaccgaaactataatacccaaccgatactaaactcaaacttaaaaaatcgcccacgaaaaacaatcgcccttccccacccgcctactcgacttaacgaaaaacgaaatatcgctaaaaacgataccaaacgaaccgcctctaataacctctaaactctaacgcgcttccccgcccctcccgcgcaaacgaacgtaaaatcccgactaatccaatccgaattttacgacgaaacgaacgaactacgcgtacgacgacttcaactatcgcgataaacaacaacaaactaaaaaaatcataatacaatacgaactataaaccgcgctacctaacgcctccgaaatcgccctaacctactacttcgtaacgacgaccgtaaccctacgctaatccgaacgccgaacgacgcgaaacgcgataatccgaacgcgacaaaaacaacgaacgaacctaaaaaacataaacaaaacgacgcaacgcttccgactccaaataactaccgaaacgtaataaaataaacgcgacctaaaaatactcgcaacgacactttcaaccgccg

SEQ ID NO: 29183 - DNA, 569 bp, Artificial Sequence
  chemically treated genomic DNA (Homo sapiens) CpG-island No: 29183
ggggtagaggacggtcggggttgtggtgtttaatcggtgttaaatttaagtttgggaggtcgtttacgagaaatagtcgtttttttttattcgtttgttcggtttggcggggagcgggatgtcgttgggggcgatgttagacgggtcgtttttgatagtttttaggttttggcgcgttttttcgtttttttcgcgtaggcgggcgtgggatttcggttgatttagttcgggttttgcggcggagcgggcgggttgcgcgtgcggcggttttaattgtcgcggtaggtagtagtaggttgaagggattatggtgtagtacgagttgtgggtcgcgttgtttggcgttttcggggtcgttttggtttgttgtttcgtggcggcggtcgtggttttgcgttggttcgggcgtcggacggcgcggggcgcggtggttcgggcgcgatagaggtagcgagcgggtttggagaatatggatagggcggcgtagcgttttcggttttaggtgattgtcggagcgtagtgggatgggcgcggtttgagggtattcgtagcggtatttttagtcgtcg

SEQ ID NO: 29184 - DNA, 569 bp, Artificial Sequence
  chemically treated genomic DNA (Homo sapiens) CpG-island No: 29184
cgacgactaaaaataccgctacgaataccctcaaaccgcgcccatcccactacgctccgacaatcacctaaaaccgaaaacgctacgccgccctatccatattctccaaacccgctcgctacctctatcgcgcccgaaccaccgcgccccgcgccgtccgacgcccgaaccaacgcaaaaccacgaccgccgccacgaaacaacaaaccaaaacgaccccgaaaacgccaaacaacgcgacccacaactcgtactacaccataatcccttcaacctactactacctaccgcgacaattaaaaccgccgcacgcgcaacccgcccgctccgccgcaaaacccgaactaaatcaaccgaaatcccacgcccgcctacgcgaaaaaaacgaaaaaacgcgccaaaacctaaaaactatcaaaaacgacccgtctaacatcgcccccaacgacatcccgctccccgccaaaccgaacaaacgaataaaaaaaaacgactatttctcgtaaacgacctcccaaacttaaatttaacaccgattaaacaccacaaccccgaccgtcctctacccc

SEQ ID NO: 29185 - DNA, 869 bp, Artificial Sequence
  chemically treated genomic DNA (Homo sapiens) CpG-island No: 29185
atgaatatgggtgtcgagttgtgtttgttttggaggtgcgggcgcgggcggtggggtaagtttaaaatggagaggatttcgcgttgtatttttcgtcgtttttggttgcggaggcgtcggtggatgaagttcgagtgtatttcgttgtttaggttgaagtcggttagggcggagcgtagtaggaataggggtgtttagagcgttacgaagttgtgcggcgtcgtagttcgtagtgagcgtacgtgtatcgcgtcggttttacgcgttattcgggtttcgggtttcgggttcgtatcgttttaggtggtagagggggtaggcggtcgttcgcgtcgttcggttatttgttgtagacgggtttcgttgcgttcgcgttagatatggttttttttcggtcggtcgcgttttgttcggattttcgttttttgttcggtgttggtttcgggtttttcgtttcgtattcgttcgggcgtatcgtagggtttggaaagtagtttcggcgaacgaaaaggcgagtgaggaggcgggcgcgggtgggaggagtagttagtaagtttaggagtttagagagttaacgtcggggaggtagcgaggaggtaggcgggcgggcgagcgtttttttttttcgtttttttggcgttttcgttttcgggcggcggtaatttatttttttttaattttcggcgcggatagtaggggtttcggggcgtttttttagttttgtgcgttttggatcgtataagaggtcgtttcgggagcgttagagtggtacgcgttggggtttgggcggaggaggaggaggaggaggacgggtttcgaggggtttttttcgcgtcggcggttttttatttgttttcggtttcgttttt

SEQ ID NO: 29186 - DNA, 869 bp, Artificial Sequence
  chemically treated genomic DNA (Homo sapiens) CpG-island No: 29186
aaaaacgaaaccgaaaacaaataaaaaaccgccgacgcgaaaaaaacccctcgaaacccgtcctcctcctcctcctcctccgcccaaaccccaacgcgtaccactctaacgctcccgaaacgacctcttatacgatccaaaacgcacaaaactaaaaaaacgccccgaaacccctactatccgcgccgaaaattaaaaaaaaataaattaccgccgcccgaaaacgaaaacgccaaaaaaacgaaaaaaaaaaacgctcgcccgcccgcctacctcctcgctacctccccgacgttaactctctaaactcctaaacttactaactactcctcccacccgcgcccgcctcctcactcgccttttcgttcgccgaaactactttccaaaccctacgatacgcccgaacgaatacgaaacgaaaaacccgaaaccaacaccgaacaaaaaacgaaaatccgaacaaaacgcgaccgaccgaaaaaaaaccatatctaacgcgaacgcaacgaaacccgtctacaacaaataaccgaacgacgcgaacgaccgcctaccccctctaccacctaaaacgatacgaacccgaaacccgaaacccgaataacgcgtaaaaccgacgcgatacacgtacgctcactacgaactacgacgccgcacaacttcgtaacgctctaaacacccctattcctactacgctccgccctaaccgacttcaacctaaacaacgaaatacactcgaacttcatccaccgacgcctccgcaaccaaaaacgacgaaaaatacaacgcgaaatcctctccattttaaacttaccccaccgcccgcgcccgcacctccaaaacaaacacaactcgacacccatattcat

SEQ ID NO: 29187 - DNA, 869 bp, Artificial Sequence
  chemically treated genomic DNA (Homo sapiens) CpG-island No: 29187
gagggcggggtcgagggtaggtgggaggtcgtcggcgcgggaggggtttttcgaagttcgttttttttttttttttttttcgtttaggttttagcgcgtattattttggcgttttcgaggcggttttttgtgcgatttagggcgtataaggttgggagagcgtttcggggtttttgttattcgcgtcggaggttggaagagggtgggttgtcgtcgttcgagggcgagagcgttagaggagcgggaagaaggagcgttcgttcgttcgtttgttttttcgttgttttttcggcgttggttttttggatttttaggtttgttggttgttttttttattcgcgttcgtttttttattcgttttttcgttcgtcggggttgttttttaagttttgcggtgcgttcgggcgagtgcggggcgaggggttcggggttagtatcgagtagggggcgggggttcgggtagagcgcggtcggtcggggaggggttatgtttggcgcgggcgtagcggggttcgtttgtagtaagtgatcgagcggcgcggacggtcgtttgttttttttgttatttggggcggtgcgggttcggagttcggagttcgggtagcgcgtagagtcggcgcgatgtacgtgcgtttattgcgagttgcggcgtcgtatagtttcgtggcgttttgggtatttttgtttttgttgcgtttcgttttggtcgattttagtttggataacgaggtgtattcgagttttatttatcggcgttttcgtagttaggagcggcgggagatgtagcgcgagattttttttattttgggtttgttttatcgttcgcgttcgtatttttagggtaagtataattcggtatttatgtttat

SEQ ID NO: 29188 - DNA, 869 bp, Artificial Sequence
  chemically treated genomic DNA (Homo sapiens) CpG-island No: 29188
ataaacataaataccgaattatacttaccctaaaaatacgaacgcgaacgataaaacaaacccaaaataaaaaaaatctcgcgctacatctcccgccgctcctaactacgaaaacgccgataaataaaactcgaatacacctcgttatccaaactaaaatcgaccaaaacgaaacgcaacaaaaacaaaaatacccaaaacgccacgaaactatacgacgccgcaactcgcaataaacgcacgtacatcgcgccgactctacgcgctacccgaactccgaactccgaacccgcaccgccccaaataacaaaaaaaacaaacgaccgtccgcgccgctcgatcacttactacaaacgaaccccgctacgcccgcgccaaacataacccctccccgaccgaccgcgctctacccgaacccccgccccctactcgatactaaccccgaacccctcgccccgcactcgcccgaacgcaccgcaaaacttaaaaaacaaccccgacgaacgaaaaaacgaataaaaaaacgaacgcgaataaaaaaaacaaccaacaaacctaaaaatccaaaaaaccaacgccgaaaaaacaacgaaaaaacaaacgaacgaacgaacgctccttcttcccgctcctctaacgctctcgccctcgaacgacgacaacccaccctcttccaacctccgacgcgaataacaaaaaccccgaaacgctctcccaaccttatacgccctaaatcgcacaaaaaaccgcctcgaaaacgccaaaataatacgcgctaaaacctaaacgaaaaaaaaaaaaaaaaaaaacgaacttcgaaaaacccctcccgcgccgacgacctcccacctaccctcgaccccgccctc

SEQ ID NO: 29189 - DNA, 501 bp, Artificial Sequence
  chemically treated genomic DNA (Homo sapiens) CpG-island No: 29189
tataagacgtcgttttgtttagttttttttaattttcgcgtattttcggacgttttttttattttaggttcggattttggaattatttgggtttcgcgttttacgtttcgtcgtcgggtttatttgcgcgtttagttggtttagatgttgtatgtcgtcgtttacggttttcggtatcgggtttttagtgtagtgtaggcgggtttatggcgcgcgttttagtttcgtaggttttatcgtcgtcgtcgttttgtttagttttttttttcgttgtcgttgttatcgttgtcggttttttcgcgtatttataatcgtattttcgttacggtcgtcgtagcgcgtttttttttcggtcgttttgggttgttcggagtcggggagttttcgtagggtcgcggatacgcgcggtcgtcgggtttcggggaggggtaggggcggcgtcggtatcggtagacgcgaggttttttgttagttttttcgttgagtgatttttgggtacgg

SEQ ID NO: 29190 - DNA, 501 bp, Artificial Sequence
  chemically treated genomic DNA (Homo sapiens) CpG-island No: 29190
ccgtacccaaaaatcactcaacgaaaaaactaacaaaaaacctcgcgtctaccgataccgacgccgcccctacccctccccgaaacccgacgaccgcgcgtatccgcgaccctacgaaaactccccgactccgaacaacccaaaacgaccgaaaaaaaaacgcgctacgacgaccgtaacgaaaatacgattataaatacgcgaaaaaaccgacaacgataacaacgacaacgaaaaaaaaaactaaacaaaacgacgacgacgataaaacctacgaaactaaaacgcgcgccataaacccgcctacactacactaaaaacccgataccgaaaaccgtaaacgacgacatacaacatctaaaccaactaaacgcgcaaataaacccgacgacgaaacgtaaaacgcgaaacccaaataattccaaaatccgaacctaaaataaaaaaaacgtccgaaaatacgcgaaaattaaaaaaaactaaacaaaacgacgtcttata

SEQ ID NO: 29191 - DNA, 501 bp, Artificial Sequence
  chemically treated genomic DNA (Homo sapiens) CpG-island No: 29191
tcgtatttaaaggttatttagcgggagagttggtaggaaatttcgcgtttgtcggtgtcggcgtcgtttttgttttttttcggagttcggcggtcgcgcgtgttcgcggttttgcgagggtttttcggtttcggatagtttagggcggtcgggggaggagcgcgttgcgacggtcgtggcgaaagtgcggttgtggatgcgcggagaggtcggtagcggtggtagcggtagcggaggaggaagttgagtagggcggcggcggcggtggaatttgcggggttggggcgcgcgttatgggttcgtttgtattgtattgaggattcggtgtcggaggtcgtgggcggcgatatgtagtatttgaattagttgggcgcgtaggtgggttcggcggcggggcgtggggcgcggggtttaggtgattttaggattcgggtttggggtgggggggacgttcgggggtgcgcgggagttgggagagattagatagagcggcgttttgtg

SEQ ID NO: 29192 - DNA, 501 bp, Artificial Sequence
  chemically treated genomic DNA (Homo sapiens) CpG-island No: 29192
cacaaaacgccgctctatctaatctctcccaactcccgcgcacccccgaacgtcccccccaccccaaacccgaatcctaaaatcacctaaaccccgcgccccacgccccgccgccgaacccacctacgcgcccaactaattcaaatactacatatcgccgcccacgacctccgacaccgaatcctcaatacaatacaaacgaacccataacgcgcgccccaaccccgcaaattccaccgccgccgccgccctactcaacttcctcctccgctaccgctaccaccgctaccgacctctccgcgcatccacaaccgcactttcgccacgaccgtcgcaacgcgctcctcccccgaccgccctaaactatccgaaaccgaaaaaccctcgcaaaaccgcgaacacgcgcgaccgccgaactccgaaaaaaaacaaaaacgacgccgacaccgacaaacgcgaaatttcctaccaactctcccgctaaataacctttaaatacga

SEQ ID NO: 29193 - DNA, 943 bp, Artificial Sequence
  chemically treated genomic DNA (Homo sapiens) CpG-island No: 29193
gcgggggagtttcgcgtgtttagcgcgcggatcgtttttttttttttttttttatttggttcgttcgttcggagtttgtatatagcgtagttggaaaatgttatttcgttggaaaggttttcgttggtattgttaggatattaagtcgtcgcgttaggttttttcggttttttttttttggttagtttcgtaatttttcggagcgtagggcgttcgtttgggtaggggttcggtttcgggcgtcgttttttttgtgtagcggtttcggggtgttcggggtttcgacgtttttcgcgggtgcgggtaggtgggaacggcgacgcgcgcgggtttattttttttttttttcgttcgtcgttcgttcgcgtttatttgtgcggtttcgggcgtagtcgcgggcgttatttcgtcgtgtagagattgtagcgggaggtatcgggcggcgtaggtcgcgttaggagcggggtgtttttggtttgcgttttcgagagtagcgtcgcgacggcgtatagttagacgagtaggcggcggcggtttatagcggttttcgcgtttttgttcggtttcgcgcggtgtttttcgtcgggtgttcgtttgtagcgtcgcgtcgttttcgtcgttggtcggttcgggtttcgtttcgagggtttcggggtttttttcggttttcgagttcgttggttcggtcgtttggcgtttcgcggcggttgcgtttcgcggagtggtcgtcgttgttagcggttggggtcgcggaggggaggcgtgaggttggttttttgcggattattataaatttggggtcgcgtcgttcgtcgtcgttagtttttcgttttagtttcgagcggacggtcgaggagtcgtttgcgaataggaggttttaaagggagtagttttaggtggtaggggcgtaggtcgtcgcgttttgggaggtttttcgagtata

SEQ ID NO: 29194 - DNA, 943 bp, Artificial Sequence
  chemically treated genomic DNA (Homo sapiens) CpG-island No: 29194
tatactcgaaaaacctcccaaaacgcgacgacctacgcccctaccacctaaaactactccctttaaaacctcctattcgcaaacgactcctcgaccgtccgctcgaaactaaaacgaaaaactaacgacgacgaacgacgcgaccccaaatttataataatccgcaaaaaaccaacctcacgcctcccctccgcgaccccaaccgctaacaacgacgaccactccgcgaaacgcaaccgccgcgaaacgccaaacgaccgaaccaacgaactcgaaaaccgaaaaaaaccccgaaaccctcgaaacgaaacccgaaccgaccaacgacgaaaacgacgcgacgctacaaacgaacacccgacgaaaaacaccgcgcgaaaccgaacaaaaacgcgaaaaccgctataaaccgccgccgcctactcgtctaactatacgccgtcgcgacgctactctcgaaaacgcaaaccaaaaacaccccgctcctaacgcgacctacgccgcccgatacctcccgctacaatctctacacgacgaaataacgcccgcgactacgcccgaaaccgcacaaataaacgcgaacgaacgacgaacgaaaaaaaaaaaaaataaacccgcgcgcgtcgccgttcccacctacccgcacccgcgaaaaacgtcgaaaccccgaacaccccgaaaccgctacacaaaaaaaacgacgcccgaaaccgaacccctacccaaacgaacgccctacgctccgaaaaattacgaaactaaccaaaaaaaaaaaaccgaaaaaacctaacgcgacgacttaatatcctaacaataccaacgaaaacctttccaacgaaataacattttccaactacgctatatacaaactccgaacgaacgaaccaaataaaaaaaaaaaaaaaaaaacgatccgcgcgctaaacacgcgaaactcccccgc

SEQ ID NO: 29195 - DNA, 943 bp, Artificial Sequence
  chemically treated genomic DNA (Homo sapiens) CpG-island No: 29195
tgtgttcggggggttttttagggcgcggcggtttgcgtttttgttatttggggttgttttttttggaattttttgttcgtagacggtttttcggtcgttcgttcggagttggggcgaggggttggcggcggcgagcggcgcggttttaagtttatgataattcgtaaagagttagttttacgtttttttttcgcggttttagtcgttagtagcgacgattatttcgcgggacgtagtcgtcgcgaagcgttagacggtcgggttagcgagttcgggggtcgaaggggatttcgggattttcggggcgggattcgggtcgattagcggcgggggcggcgcggcgttgtaggcgaatattcggcggggggtatcgcgcggggtcgggtagaggcgcgggggtcgttatgggtcgtcgtcgtttgttcgtttggttgtgcgtcgtcgcggcgttgttttcgggggcgtaggttaggggtatttcgtttttggcgcggtttgcgtcgttcggtgtttttcgttatagtttttatacgacgggatggcgttcgcggttgcgttcggggtcgtataagtaagcgcgggcgggcggcgggcgggaagagggagggatgggttcgcgcgcgtcgtcgtttttatttgttcgtattcgcggggggcgtcgaggtttcgggtatttcgaggtcgttgtatagagggggcggcgttcggggtcgagtttttgtttaggcgagcgttttacgtttcgggaggttgcggggttggttaagaaaaaagaatcgagggggtttggcgcggcggtttggtattttggtagtgttagcggaaatttttttagcgaagtaatattttttagttgcgttgtgtgtagatttcgggcgagcggattaggtggagggagaggaggaaaggcggttcgcgcgttgagtacgcggggttttttcgt

SEQ ID NO: 29196 - DNA, 943 bp, Artificial Sequence
  chemically treated genomic DNA (Homo sapiens) CpG-island No: 29196
acgaaaaaaccccgcgtactcaacgcgcgaaccgcctttcctcctctccctccacctaatccgctcgcccgaaatctacacacaacgcaactaaaaaatattacttcgctaaaaaaatttccgctaacactaccaaaataccaaaccgccgcgccaaaccccctcgattcttttttcttaaccaaccccgcaacctcccgaaacgtaaaacgctcgcctaaacaaaaactcgaccccgaacgccgccccctctatacaacgacctcgaaatacccgaaacctcgacgccccccgcgaatacgaacaaataaaaacgacgacgcgcgcgaacccatccctccctcttcccgcccgccgcccgcccgcgcttacttatacgaccccgaacgcaaccgcgaacgccatcccgtcgtataaaaactataacgaaaaacaccgaacgacgcaaaccgcgccaaaaacgaaatacccctaacctacgcccccgaaaacaacgccgcgacgacgcacaaccaaacgaacaaacgacgacgacccataacgacccccgcgcctctacccgaccccgcgcgataccccccgccgaatattcgcctacaacgccgcgccgcccccgccgctaatcgacccgaatcccgccccgaaaatcccgaaatccccttcgacccccgaactcgctaacccgaccgtctaacgcttcgcgacgactacgtcccgcgaaataatcgtcgctactaacgactaaaaccgcgaaaaaaaaacgtaaaactaactctttacgaattatcataaacttaaaaccgcgccgctcgccgccgccaacccctcgccccaactccgaacgaacgaccgaaaaaccgtctacgaacaaaaaattccaaaaaaaacaaccccaaataacaaaaacgcaaaccgccgcgccctaaaaaaccccccgaacaca

SEQ ID NO: 29197 - DNA, 792 bp, Artificial Sequence
  chemically treated genomic DNA (Homo sapiens) CpG-island No: 29197
tgaggtcgagttggcgtaggttgggtagatgttcgaaggcgttcgcgcgtatttcgtttaggcggttgtcgttgaggttgagcgcggttagtttcgttagcggcggtcggcgggcgaaggcgtcggtagggagtacggttagttggttgtcggtaaggaagaggttgcgtacgtaggcgggtaggttcgtgggtatttcggttagattgcggttaacgtatttgattgtgcgcgttgtttcggagtattcgtatagcgcggggtattggttcggtagcgggggttgggcggatacggcggaagttaggaacggcgtcgaggaggagaaggaggatgtcgaggaggtgggagaagacgaggagatttagtttaggagtattagcgttagtcgcgttagtcgtagacgttcgttttcggcggcggggtttcgggagtattttttaggtatcgcggttcgcgttttttcggagttgggttgggacggcgttcgtttcgaaggttcgggaggttgggttcggagggcgcgagtcggcggaagcgtttggaaaaaaaaaatttttttttcgtggaatcgagggagtggcgtcgtagtcggaatttggttaattttttcgttatcgggcgttttttttaggggtcgattttttcgttttttttttttagaaagtacgtacggcgggtcgggacgtttcgtttcgcgtttttgttttcgtttttttttttgtcgtcgttttggtgttattttttcgttttttgttggtatttttcgttggattttttgagggatttggg

SEQ ID NO: 29198 - DNA, 792 bp, Artificial Sequence
  chemically treated genomic DNA (Homo sapiens) CpG-island No: 29198
cccaaatccctcaaaaaatccaacgaaaaataccaacaaaaaacgaaaaaataacaccaaaacgacgacaaaaaaaaaaacgaaaacaaaaacgcgaaacgaaacgtcccgacccgccgtacgtactttctaaaaaaaaaaaacgaaaaaatcgacccctaaaaaaaacgcccgataacgaaaaaattaaccaaattccgactacgacgccactccctcgattccacgaaaaaaaaattttttttttccaaacgcttccgccgactcgcgccctccgaacccaacctcccgaaccttcgaaacgaacgccgtcccaacccaactccgaaaaaacgcgaaccgcgatacctaaaaaatactcccgaaaccccgccgccgaaaacgaacgtctacgactaacgcgactaacgctaatactcctaaactaaatctcctcgtcttctcccacctcctcgacatcctccttctcctcctcgacgccgttcctaacttccgccgtatccgcccaacccccgctaccgaaccaataccccgcgctatacgaatactccgaaacaacgcgcacaatcaaatacgttaaccgcaatctaaccgaaatacccacgaacctacccgcctacgtacgcaacctcttccttaccgacaaccaactaaccgtactccctaccgacgccttcgcccgccgaccgccgctaacgaaactaaccgcgctcaacctcaacgacaaccgcctaaacgaaatacgcgcgaacgccttcgaacatctacccaacctacgccaactcgacctca

SEQ ID NO: 29199 - DNA, 792 bp, Artificial Sequence
  chemically treated genomic DNA (Homo sapiens) CpG-island No: 29199
tttaggttttttagaggatttagcgaggggtgttaataagaggcgaagaggtggtattagggcggcggtaggaagaggagcgggagtaggagcgcggagcggagcgtttcgattcgtcgtgcgtattttttggagggaaggggcgggggaatcggtttttgagggaagcgttcggtggcgagggggttagttaagtttcggttgcggcgttattttttcggttttacgagaggaaagttttttttttttagacgttttcgtcggttcgcgtttttcgggtttagtttttcgagttttcggagcgggcgtcgttttagtttagtttcggggaaacgcgagtcgcgatgtttggggggtgttttcggggtttcgtcgtcggggacgggcgtttgcggttggcgcgattagcgttggtatttttgggttgggttttttcgtttttttttattttttcggtattttttttttttttttcggcgtcgtttttggttttcgtcgtgttcgtttagttttcgttgtcggattagtgtttcgcgttgtgcgagtgtttcgaggtagcgcgtatagttaagtgcgttaatcgtaatttgatcgaggtgtttacggatttgttcgtttacgtgcgtaattttttttttatcggtaattagttggtcgtgttttttgtcggcgttttcgttcgtcggtcgtcgttggcggagttggtcgcgtttaattttagcggtagtcgtttggacgaggtgcgcgcgggcgttttcgagtatttgtttagtttgcgttagttcgatttta

SEQ ID NO: 29200 - DNA, 792 bp, Artificial Sequence
  chemically treated genomic DNA (Homo sapiens) CpG-island No: 29200
taaaatcgaactaacgcaaactaaacaaatactcgaaaacgcccgcgcgcacctcgtccaaacgactaccgctaaaattaaacgcgaccaactccgccaacgacgaccgacgaacgaaaacgccgacaaaaaacacgaccaactaattaccgataaaaaaaaaattacgcacgtaaacgaacaaatccgtaaacacctcgatcaaattacgattaacgcacttaactatacgcgctacctcgaaacactcgcacaacgcgaaacactaatccgacaacgaaaactaaacgaacacgacgaaaaccaaaaacgacgccgaaaaaaaaaaaaaaaataccgaaaaaataaaaaaaaacgaaaaaacccaacccaaaaataccaacgctaatcgcgccaaccgcaaacgcccgtccccgacgacgaaaccccgaaaacaccccccaaacatcgcgactcgcgtttccccgaaactaaactaaaacgacgcccgctccgaaaactcgaaaaactaaacccgaaaaacgcgaaccgacgaaaacgtctaaaaaaaaaaaactttcctctcgtaaaaccgaaaaaataacgccgcaaccgaaacttaactaaccccctcgccaccgaacgcttccctcaaaaaccgattcccccgccccttccctccaaaaaatacgcacgacgaatcgaaacgctccgctccgcgctcctactcccgctcctcttcctaccgccgccctaataccacctcttcgcctcttattaacacccctcgctaaatcctctaaaaaacctaaa

SEQ ID NO: 29201 - DNA, 643 bp, Artificial Sequence
  chemically treated genomic DNA (Homo sapiens) CpG-island No: 29201
gcgcgttttcggtttttgtttagaagttgtttattttgattttgttcgtagtaggtgaatttggtgtggtgcgcgtattgcgggttttgattggttgtgtacgttacggtgaaaaatttgagcgtttatttcgagttttgtaagtttttagtgttttttttgggtggacgtttaggcgtacggtcgttattttttttttatttgtggattcgttagtttttcgttcgttttaggaggcgatttcgcgttttgggtgcggtgaggtcgttgggatagcggaggtgtttttcgacgcgaagtagcgagttgaggcggcggttagcggggaagatgagcggtagtagcgttaggtttagttatttgttttagttcgtcgtgaagagcgtgtttgtgtatcgtaacggggattttttttacgcggggcgtcgcgtcgttatttatgagaagaaggtgtttagtttcgaagtttttttgaaggaggtgatcggcggcgtttaggtattttttggggtcgttaggaatatttatatttcgcggattggttatcgaattcggaagttagattagatttagagcgggggtaattacgtggttggaggttaggaagtttttaagaaatttaagtgagtcggttttttttatt

SEQ ID NO: 29202 - DNA, 643 bp, Artificial Sequence
  chemically treated genomic DNA (Homo sapiens) CpG-island No: 29202
aataaaaaaaaccgactcacttaaatttcttaaaaacttcctaacctccaaccacgtaattacccccgctctaaatctaatctaacttccgaattcgataaccaatccgcgaaatataaatattcctaacgaccccaaaaaatacctaaacgccgccgatcacctccttcaaaaaaacttcgaaactaaacaccttcttctcataaataacgacgcgacgccccgcgtaaaaaaaatccccgttacgatacacaaacacgctcttcacgacgaactaaaacaaataactaaacctaacgctactaccgctcatcttccccgctaaccgccgcctcaactcgctacttcgcgtcgaaaaacacctccgctatcccaacgacctcaccgcacccaaaacgcgaaatcgcctcctaaaacgaacgaaaaactaacgaatccacaaataaaaaaaaaataacgaccgtacgcctaaacgtccacccaaaaaaaacactaaaaacttacaaaactcgaaataaacgctcaaatttttcaccgtaacgtacacaaccaatcaaaacccgcaatacgcgcaccacaccaaattcacctactacgaacaaaatcaaaataaacaacttctaaacaaaaaccgaaaacgcgc

SEQ ID NO: 29203 - DNA, 643 bp, Artificial Sequence
  chemically treated genomic DNA (Homo sapiens) CpG-island No: 29203
ggtgggggagatcgatttatttgagttttttgaaggttttttggtttttagttacgtaattgttttcgttttggatttggtttagttttcggattcggtggttagttcgcggggtgtagatgtttttgacggttttaaagggtgtttgaacgtcgtcggttattttttttaggaagatttcgaagttggatattttttttttatggatgacgacgcggcgtttcgcgtagaaggggttttcgttgcggtatataagtacgttttttacgacgggttgagataggtggttggatttggcgttgttgtcgtttatttttttcgttggtcgtcgttttagttcgttgtttcgcgtcgggaggtattttcgttgttttagcggttttatcgtatttagggcgcgggatcgttttttgaaacgaacgagaaattgacgaatttataggtgaaagagaagtaacggtcgtgcgtttaggcgtttatttagaggagatattaggagtttgtaggattcggagtagacgtttaagttttttatcgtggcgtgtatagttaattaggattcgtagtgcgcgtattatattaggtttatttgttacgggtagaattaaggtggatagtttttgagtaggagtcggaaacgcgt

SEQ ID NO: 29204 - DNA, 643 bp, Artificial Sequence
  chemically treated genomic DNA (Homo sapiens) CpG-island No: 29204
acgcgtttccgactcctactcaaaaactatccaccttaattctacccgtaacaaataaacctaatataatacgcgcactacgaatcctaattaactatacacgccacgataaaaaacttaaacgtctactccgaatcctacaaactcctaatatctcctctaaataaacgcctaaacgcacgaccgttacttctctttcacctataaattcgtcaatttctcgttcgtttcaaaaaacgatcccgcgccctaaatacgataaaaccgctaaaacaacgaaaatacctcccgacgcgaaacaacgaactaaaacgacgaccaacgaaaaaaataaacgacaacaacgccaaatccaaccacctatctcaacccgtcgtaaaaaacgtacttatataccgcaacgaaaaccccttctacgcgaaacgccgcgtcgtcatccataaaaaaaaaatatccaacttcgaaatcttcctaaaaaaaataaccgacgacgttcaaacaccctttaaaaccgtcaaaaacatctacaccccgcgaactaaccaccgaatccgaaaactaaaccaaatccaaaacgaaaacaattacgtaactaaaaaccaaaaaaccttcaaaaaactcaaataaatcgatctcccccacc

SEQ ID NO: 29205 - DNA, 701 bp, Artificial Sequence
  chemically treated genomic DNA (Homo sapiens) CpG-island No: 29205
gcggttgtcgtcgtcgtcgtcgttgtagtttttatggataaaagggtattgttagttagtttcggtttcgtcgtcgtcgtcgtcgttgtcgtcgtttcgggcgcgtatatttagatttttattacgaatatttttattattttttgttttttttttttttaaagcggcgtcgtagtcgtcggtttttttttttttagtgttttcggcgcggagtagatcgtcggtagttttttttatattacgtcgtacggattttttagtagagtcgggttgttgtagtagttattagcgttgggacgcggcggtagcggcggcggcggcggtttttcggtaatattttttttttttatcgtttttagtttcggcgggaggtgggttcgtatcgcgcggggtcgtgggcgcgttgcgggtcgttcggggagagtattgggtcgagtatcgtgggtttcgggggttgtttttttaacgagggtttattgttagatttgagtgtttttttcggcgttaggagggtcggggggttcggttaggcgcgcggggcggcggggattgttttggcgcgaattatattaaatattttaaaatttttcgcggtttttttttttttttttgtatttttttttatttttattttttttttttttttaattcgaagttttttttttttcgggcgtaggaaggggttacgtttcggatggaga

SEQ ID NO: 29206 - DNA, 701 bp, Artificial Sequence
  chemically treated genomic DNA (Homo sapiens) CpG-island No: 29206
tctccatccgaaacgtaaccccttcctacgcccgaaaaaaaaaaaacttcgaattaaaaaaaaaaaaaaaataaaaataaaaaaaaatacaaaaaaaaaaaaaaaaaccgcgaaaaattttaaaatatttaatataattcgcgccaaaacaatccccgccgccccgcgcgcctaaccgaaccccccgaccctcctaacgccgaaaaaaacactcaaatctaacaataaaccctcgttaaaaaaacaacccccgaaacccacgatactcgacccaatactctccccgaacgacccgcaacgcgcccacgaccccgcgcgatacgaacccacctcccgccgaaactaaaaacgataaaaaaaaaaaatattaccgaaaaaccgccgccgccgccgctaccgccgcgtcccaacgctaataactactacaacaacccgactctactaaaaaatccgtacgacgtaatataaaaaaaactaccgacgatctactccgcgccgaaaacactaaaaaaaaaaaaaccgacgactacgacgccgctttaaaaaaaaaaaaaacaaaaaataataaaaatattcgtaataaaaatctaaatatacgcgcccgaaacgacgacaacgacgacgacgacgacgaaaccgaaactaactaacaatacccttttatccataaaaactacaacgacgacgacgacgacaaccgc

SEQ ID NO: 29207 - DNA, 701 bp, Artificial Sequence
  chemically treated genomic DNA (Homo sapiens) CpG-island No: 29207
tttttattcggggcgtgatttttttttacgttcgagaaagaggaagtttcgagttggaggggaagggagagtgggggtagggaaaagtgtaggaaaagaagggggggtcgcgaaaagttttggagtgtttgatgtggttcgcgttaaggtaattttcgtcgtttcgcgcgtttggtcgagtttttcgatttttttggcgtcgggaagagtatttaggtttaataatgaattttcgttggaggggtagttttcgaggtttacgatgttcggtttagtgtttttttcgagcggttcgtagcgcgtttacgatttcgcgcggtgcgagtttatttttcgtcggggttggggacggtggggagggagggtattatcggagggtcgtcgtcgtcgtcgttgtcgtcgcgttttagcgttggtggttgttgtagtagttcggttttgttggagggttcgtgcggcgtggtgtagaggaggttgtcggcggtttgtttcgcgtcgggggtattggggaggagggggtcggcggttacggcgtcgttttggagggaggaggaataggaggtggtggaagtgttcgtggtgaggatttggatgtacgcgttcggggcggcggtagcggcggcggcggcggcgaagtcggggttggttagtagtgtttttttgtttatggaggttgtagcggcggcggcgacgatagtcgt

SEQ ID NO: 29208 - DNA, 701 bp, Artificial Sequence
  chemically treated genomic DNA (Homo sapiens) CpG-island No: 29208
acgactatcgtcgccgccgccgctacaacctccataaacaaaaaaacactactaaccaaccccgacttcgccgccgccgccgccgctaccgccgccccgaacgcgtacatccaaatcctcaccacgaacacttccaccacctcctattcctcctccctccaaaacgacgccgtaaccgccgaccccctcctccccaatacccccgacgcgaaacaaaccgccgacaacctcctctacaccacgccgcacgaaccctccaacaaaaccgaactactacaacaaccaccaacgctaaaacgcgacgacaacgacgacgacgacgaccctccgataataccctccctccccaccgtccccaaccccgacgaaaaataaactcgcaccgcgcgaaatcgtaaacgcgctacgaaccgctcgaaaaaaacactaaaccgaacatcgtaaacctcgaaaactacccctccaacgaaaattcattattaaacctaaatactcttcccgacgccaaaaaaatcgaaaaactcgaccaaacgcgcgaaacgacgaaaattaccttaacgcgaaccacatcaaacactccaaaacttttcgcgacccccccttcttttcctacacttttccctacccccactctcccttcccctccaactcgaaacttcctctttctcgaacgtaaaaaaaaatcacgccccgaataaaaa

SEQ ID NO: 29209 - DNA, 557 bp, Artificial Sequence
  chemically treated genomic DNA (Homo sapiens) CpG-island No: 29209
gttaggcgttcgtaggtgtcggggttgaagaggggcgcggggtttagtgttttcgtcggcgtcggttttttagcgttcgcggtttcgtcgtcgttttagtagtcgtggtcgtcgttgcggtttttcgagtatatggttcggcgtcggcgcgtttggcgggcggaggcgtttagtttgcggcggggttcgcggcgcgtttcgtattgggtggggttggggtttcgtcgtttgttttagttattgtgtattgaggggttcgcgttatcgcgcgtcgggttcgtttttttttcgtttttttcgttcggcgtatttttcgtggtttcgttttttttcgcggtttgttttcgtcgtttcgttgttttcggcgcgtttttttagtttcgttttttcgcgggcgcgttttcgcggttagttcgtttcgtttttattggttgggtatttttcgttggtcggcgtggacgcgcgtcgcgggatagtttgggggttagggtcgtagggtagtttcgatggttttttatatttttatttttttgtatttattttgaaagtttcgtgtt

SEQ ID NO: 29210 - DNA, 557 bp, Artificial Sequence
  chemically treated genomic DNA (Homo sapiens) CpG-island No: 29210
aacacgaaactttcaaaataaatacaaaaaaataaaaatataaaaaaccatcgaaactaccctacgaccctaacccccaaactatcccgcgacgcgcgtccacgccgaccaacgaaaaatacccaaccaataaaaacgaaacgaactaaccgcgaaaacgcgcccgcgaaaaaacgaaactaaaaaaacgcgccgaaaacaacgaaacgacgaaaacaaaccgcgaaaaaaaacgaaaccacgaaaaatacgccgaacgaaaaaaacgaaaaaaaaacgaacccgacgcgcgataacgcgaacccctcaatacacaataactaaaacaaacgacgaaaccccaaccccacccaatacgaaacgcgccgcgaaccccgccgcaaactaaacgcctccgcccgccaaacgcgccgacgccgaaccatatactcgaaaaaccgcaacgacgaccacgactactaaaacgacgacgaaaccgcgaacgctaaaaaaccgacgccgacgaaaacactaaaccccgcgcccctcttcaaccccgacacctacgaacgcctaac

SEQ ID NO: 29211 - DNA, 557 bp, Artificial Sequence
  chemically treated genomic DNA (Homo sapiens) CpG-island No: 29211
gatacgaagtttttaaggtgggtgtagggaggtgggggtgtgaagagttatcgaggttattttgcggttttggtttttaggttatttcgcgacgcgcgtttacgtcgattagcggaaggtgtttagttagtgggggcggggcgagttagtcgcgaggacgcgttcgcgggggggcggggttaagaggacgcgtcgggagtagcggagcgacgaggataggtcgcggggaggggcggggttacggggggtgcgtcgggcggaaggggcgggaagagggcgggttcggcgcgcggtagcgcgggttttttagtgtataatggttagagtaggcggcggagttttaattttatttagtgcggagcgcgtcgcgagtttcgtcgtaagttgagcgttttcgttcgttaggcgcgtcggcgtcgggttatgtattcggggaatcgtagcggcggttacggttattgggacggcggcggggtcgcgggcgttgaggggtcggcgtcggcggggatattgagtttcgcgtttttttttagtttcggtatttacgagcgtttggt

SEQ ID NO: 29212 - DNA, 557 bp, Artificial Sequence
  chemically treated genomic DNA (Homo sapiens) CpG-island No: 29212
accaaacgctcgtaaataccgaaactaaaaaaaaacgcgaaactcaatatccccgccgacgccgacccctcaacgcccgcgaccccgccgccgtcccaataaccgtaaccgccgctacgattccccgaatacataacccgacgccgacgcgcctaacgaacgaaaacgctcaacttacgacgaaactcgcgacgcgctccgcactaaataaaattaaaactccgccgcctactctaaccattatacactaaaaaacccgcgctaccgcgcgccgaacccgccctcttcccgccccttccgcccgacgcaccccccgtaaccccgcccctccccgcgacctatcctcgtcgctccgctactcccgacgcgtcctcttaaccccgcccccccgcgaacgcgtcctcgcgactaactcgccccgcccccactaactaaacaccttccgctaatcgacgtaaacgcgcgtcgcgaaataacctaaaaaccaaaaccgcaaaataacctcgataactcttcacacccccacctccctacacccaccttaaaaacttcgtatc

SEQ ID NO: 29213 - DNA, 967 bp, Artificial Sequence
  chemically treated genomic DNA (Homo sapiens) CpG-island No: 29213
cgttggtaagagtcggcggggatcgtagcggttttgagcgagcgggtgttcgtagttatatgagtgatgttttgtagttttaggattcgttttttttcggcggttcggggcgtcgttagacgtttttttttcgttagttggacgttttgatttttttttttcggttgttcgcgttcgttagcggttagaaattttcgtttcgttttatgtaatcgggatttcgcgttttcgtgtcgtttcgttttcggtttagaggacgggtttggggggagggggcgtgtggcgacgttgttatttattagggtttagtcgtcgttttttcgagttgggtcggtgtttcgcgcggttttgtagttttgtagcgttcggggcggtgtaggagtttcggggtgtcgcggcgttcgttcggttgtatcgttggtttttcggttcgggttttaggttcggcgttttttatttttaggtcgcgcggtttcgttttttcgacgatttttagtttcgggttttcgttatttacgagttttcgttttcggtgagttgttgtttttagggtttcgagtcgcgcggtattttttgcggttcgaggcggattttttgtagttttttgattatttgttcgtatttttcgttttttatggagtttaggtcgttgtcgtggcggtcgtttagtagtcgttttttttttagttcgtcgcgggggttttttatggtttatttttgggggcgttcggtcgtttggaatatggcgcggacgagttgcgggcgttgttgcgggtgcgttgggtcgcgggttgcgcgttgttttttcgttggggcgttggcgggcgggacggcggtacggattgttgtgggttttgtagcgtcgtcgcggcgttttataaacgttggttggggatttttttggggcggggttaggttcggggaatttttaagttagttagattagaaaaagagaattggtttcgtt

SEQ ID NO: 29214 - DNA, 967 bp, Artificial Sequence
  chemically treated genomic DNA (Homo sapiens) CpG-island No: 29214
aacgaaaccaattctctttttctaatctaactaacttaaaaattccccgaacctaaccccgccccaaaaaaatccccaaccaacgtttataaaacgccgcgacgacgctacaaaacccacaacaatccgtaccgccgtcccgcccgccaacgccccaacgaaaaaacaacgcgcaacccgcgacccaacgcacccgcaacaacgcccgcaactcgtccgcgccatattccaaacgaccgaacgcccccaaaaataaaccataaaaaacccccgcgacgaactaaaaaaaaaacgactactaaacgaccgccacgacaacgacctaaactccataaaaaacgaaaaatacgaacaaataatcaaaaaactacaaaaaatccgcctcgaaccgcaaaaaataccgcgcgactcgaaaccctaaaaacaacaactcaccgaaaacgaaaactcgtaaataacgaaaacccgaaactaaaaatcgtcgaaaaaacgaaaccgcgcgacctaaaaataaaaaacgccgaacctaaaacccgaaccgaaaaaccaacgatacaaccgaacgaacgccgcgacaccccgaaactcctacaccgccccgaacgctacaaaactacaaaaccgcgcgaaacaccgacccaactcgaaaaaacgacgactaaaccctaataaataacaacgtcgccacacgccccctccccccaaacccgtcctctaaaccgaaaacgaaacgacacgaaaacgcgaaatcccgattacataaaacgaaacgaaaatttctaaccgctaacgaacgcgaacaaccgaaaaaaaaaaatcaaaacgtccaactaacgaaaaaaaaacgtctaacgacgccccgaaccgccgaaaaaaaacgaatcctaaaactacaaaacatcactcatataactacgaacacccgctcgctcaaaaccgctacgatccccgccgactcttaccaacg

SEQ ID NO: 29215 - DNA, 967 bp, Artificial Sequence
  chemically treated genomic DNA (Homo sapiens) CpG-island No: 29215
gacgaagttagttttttttttttggtttgattggtttggaaatttttcgagtttgatttcgttttagagaaatttttagttagcgtttatagggcgtcgcggcggcgttgtagagtttatagtagttcgtgtcgtcgtttcgttcgttagcgttttagcgaggaagtagcgcgtagttcgcggtttagcgtattcgtagtagcgttcgtagttcgttcgcgttatgttttaggcggtcgagcgtttttaggagtgggttatggagggttttcgcgacgggttgaagaaggagcggttattggacgatcgttacgatagcggtttggattttatgaaagacgaggagtacgagtagatggttaaggagttgtaggagattcgtttcgagtcgtaggaggtgtcgcgcggttcggagttttggaagtagtagtttatcgaggacggggattcgtaagtggcggaggttcggggttgggggtcgtcgggagggcgggatcgcgcggtttgggggtgggaggcgtcgggtttggagttcgagtcgggggattagcgatgtagtcgggcgggcgtcgcggtatttcggggtttttgtatcgtttcgaacgttgtagggttgtagggtcgcgcggggtatcggtttaattcggaggggcggcggttgggttttggtggatggtagcgtcgttatacgttttttttttttagattcgttttttaggtcgggggcggggcggtacggggacgcgaagtttcggttgtataaggcggggcgggagtttttggtcgttggcgggcgcgagtagtcgggaggggaaggttagggcgtttagttggcggagggggggcgtttggcggcgtttcgggtcgtcgggagggggcgaattttggggttgtagaatattatttatatagttgcgaatattcgttcgtttaaaatcgttgcgattttcgtcggtttttgttagcg

SEQ ID NO: 29216 - DNA, 967 bp, Artificial Sequence
  chemically treated genomic DNA (Homo sapiens) CpG-island No: 29216
cgctaacaaaaaccgacgaaaatcgcaacgattttaaacgaacgaatattcgcaactatataaataatattctacaaccccaaaattcgccccctcccgacgacccgaaacgccgccaaacgccccccctccgccaactaaacgccctaaccttcccctcccgactactcgcgcccgccaacgaccaaaaactcccgccccgccttatacaaccgaaacttcgcgtccccgtaccgccccgcccccgacctaaaaaacgaatctaaaaaaaaaaaacgtataacgacgctaccatccaccaaaacccaaccgccgcccctccgaattaaaccgataccccgcgcgaccctacaaccctacaacgttcgaaacgatacaaaaaccccgaaataccgcgacgcccgcccgactacatcgctaatcccccgactcgaactccaaacccgacgcctcccacccccaaaccgcgcgatcccgccctcccgacgacccccaaccccgaacctccgccacttacgaatccccgtcctcgataaactactacttccaaaactccgaaccgcgcgacacctcctacgactcgaaacgaatctcctacaactccttaaccatctactcgtactcctcgtctttcataaaatccaaaccgctatcgtaacgatcgtccaataaccgctccttcttcaacccgtcgcgaaaaccctccataacccactcctaaaaacgctcgaccgcctaaaacataacgcgaacgaactacgaacgctactacgaatacgctaaaccgcgaactacgcgctacttcctcgctaaaacgctaacgaacgaaacgacgacacgaactactataaactctacaacgccgccgcgacgccctataaacgctaactaaaaatttctctaaaacgaaatcaaactcgaaaaatttccaaaccaatcaaaccaaaaaaaaaaaactaacttcgtc

SEQ ID NO: 29217 - DNA, 520 bp, Artificial Sequence
  chemically treated genomic DNA (Homo sapiens) CpG-island No: 29217
gggacgacgcgaggtagtcgtagttttacgcgttcgtagttttcgttcgggtaggtttcgtcgtcgtatatttagttcgcgcggttagtagttatcgtcgtagagaatggatatgcgagcgcgattaataaggagcggttttttcgagcggagaggcggcggcgtagttaattagcgtcgtgatggagaggaaagggcgggtaattcgtaggttcgcgttaggtcgcgttttagttgtttttagtttttataggttttggggtcgtcgtatttgggttagagatttaggatgtcgcgaggcgcggtaagcgttttttagggaagtcgaagattttgtttgagcgtattattcgaatttcgggtttatatttcgttttcgtttagaggcgcggtttttattttttagcgttcgttagtatcgggagcgttttattttttttttagttgggttttaagagttattttggtaggtcgtgtacgtttcgcgttttatttcgtggggatatagaaacggaggagg

SEQ ID NO: 29218 - DNA, 520 bp, Artificial Sequence
  chemically treated genomic DNA (Homo sapiens) CpG-island No: 29218
cctcctccgtttctatatccccacgaaataaaacgcgaaacgtacacgacctaccaaaataactcttaaaacccaactaaaaaaaaaataaaacgctcccgatactaacgaacgctaaaaaataaaaaccgcgcctctaaacgaaaacgaaatataaacccgaaattcgaataatacgctcaaacaaaatcttcgacttccctaaaaaacgcttaccgcgcctcgcgacatcctaaatctctaacccaaatacgacgaccccaaaacctataaaaactaaaaacaactaaaacgcgacctaacgcgaacctacgaattacccgccctttcctctccatcacgacgctaattaactacgccgccgcctctccgctcgaaaaaaccgctccttattaatcgcgctcgcatatccattctctacgacgataactactaaccgcgcgaactaaatatacgacgacgaaacctacccgaacgaaaactacgaacgcgtaaaactacgactacctcgcgtcgtccc

SEQ ID NO: 29219 - DNA, 520 bp, Artificial Sequence
  chemically treated genomic DNA (Homo sapiens) CpG-island No: 29219
tttttttcgtttttgtatttttacgaggtgaggcgcggggcgtgtacggtttattagagtggtttttggggtttagttgaggaagggatgaggcgttttcggtattaacgagcgttagggagtgagaatcgcgtttttgggcgagagcggaatgtgggttcggggttcgggtggtgcgtttaggtaaggttttcggtttttttagggagcgtttgtcgcgtttcgcggtattttaggtttttggtttaggtgcggcgattttagggtttgtgagggttgagggtaattgaggcgcggtttaacgcgagtttgcggattgttcgtttttttttttttattacggcgttgattggttgcgtcgtcgttttttcgttcgggaaggtcgttttttattggtcgcgttcgtatgtttattttttgcgacggtggttgttagtcgcgcgagttgggtgtgcggcggcgaggtttgttcgggcggggattgcgggcgcgtggagttgcggttgtttcgcgtcgtttt

SEQ ID NO: 29220 - DNA, 520 bp, Artificial Sequence
  chemically treated genomic DNA (Homo sapiens) CpG-island No: 29220
aaaacgacgcgaaacaaccgcaactccacgcgcccgcaatccccgcccgaacaaacctcgccgccgcacacccaactcgcgcgactaacaaccaccgtcgcaaaaaataaacatacgaacgcgaccaataaaaaacgaccttcccgaacgaaaaaacgacgacgcaaccaatcaacgccgtaataaaaaaaaaaaaacgaacaatccgcaaactcgcgttaaaccgcgcctcaattaccctcaaccctcacaaaccctaaaatcgccgcacctaaaccaaaaacctaaaataccgcgaaacgcgacaaacgctccctaaaaaaaccgaaaaccttacctaaacgcaccacccgaaccccgaacccacattccgctctcgcccaaaaacgcgattctcactccctaacgctcgttaataccgaaaacgcctcatcccttcctcaactaaaccccaaaaaccactctaataaaccgtacacgccccgcgcctcacctcgtaaaaatacaaaaacgaaaaaaa

SEQ ID NO: 29221 - DNA, 529 bp, Artificial Sequence
  chemically treated genomic DNA (Homo sapiens) CpG-island No: 29221
tttaataacggggttaatttatataggtatatgttcgatttatcgagttttattttatcgtatttcgtagatatcgtattatttataaatcgaagggtcgcggtaatatttcgttgagttagtttattagtattatttttttagtagtacgcgtttatgttgcgttttcgcgttatattttagtaatttttataacggtttatagttcgttattattattatattcgttacggcgattcgcgattatattttagataagcgatcgcgattagtaattttcgatgttattatcggaatcgtttcgggatattatatttcggggtataaatcgtatttatattaagatagttaatttaatcgataaacgtttcgcgcgtttcgatcgttttattaatcggttattttttaattttcgttttttttttcgggttttcgtattttttaagatataaaaacgtcgaaattaggtcgggtaataattttaaaacggtttttaagcgtttaagcgaaaggaagagttatatatttt

SEQ ID NO: 29222 - DNA, 529 bp, Artificial Sequence
  chemically treated genomic DNA (Homo sapiens) CpG-island No: 29222
aaaatatataactcttcctttcgcttaaacgcttaaaaaccgttttaaaattattacccgacctaatttcgacgtttttatatcttaaaaaatacgaaaacccgaaaaaaaaaacgaaaattaaaaaataaccgattaataaaacgatcgaaacgcgcgaaacgtttatcgattaaattaactatcttaatataaatacgatttataccccgaaatataatatcccgaaacgattccgataataacatcgaaaattactaatcgcgatcgcttatctaaaatataatcgcgaatcgccgtaacgaatataataataataacgaactataaaccgttataaaaattactaaaatataacgcgaaaacgcaacataaacgcgtactactaaaaaaataatactaataaactaactcaacgaaatattaccgcgacccttcgatttataaataatacgatatctacgaaatacgataaaataaaactcgataaatcgaacatatacctatataaattaaccccgttattaaa

SEQ ID NO: 29223 - DNA, 529 bp, Artificial Sequence
  chemically treated genomic DNA (Homo sapiens) CpG-island No: 29223
agagtgtatggttttttttttcgtttaggcgtttgagagtcgttttgaagttgttgttcgatttggtttcggcgtttttatattttggagggtgcgagaattcggaggagaaagcgagggttagaaggtaatcgattaatgggacgatcgaggcgcgcggggcgtttgtcggttggattgattattttggtgtgagtacgatttatatttcggggtgtaatatttcggggcggtttcggtgatggtatcgagagttgttagtcgcggtcgtttgtttagagtgtggtcgcgagtcgtcgtgacgagtgtggtggtggtagcggattgtaggtcgttatagaggttgttggggtatagcgcgagagcgtagtatagacgcgtattattaagggggtaatgttggtgagttaatttagcgagatattatcgcgatttttcggtttatgggtggtacggtgtttacgggatgcggtgggatgggattcggtgggtcggatatatatttatgtaggttggtttcgttgttagg

SEQ ID NO: 29224 - DNA, 529 bp, Artificial Sequence
  chemically treated genomic DNA (Homo sapiens) CpG-island No: 29224
cctaacaacgaaaccaacctacataaatatatatccgacccaccgaatcccatcccaccgcatcccgtaaacaccgtaccacccataaaccgaaaaatcgcgataatatctcgctaaattaactcaccaacattacccccttaataatacgcgtctatactacgctctcgcgctataccccaacaacctctataacgacctacaatccgctaccaccaccacactcgtcacgacgactcgcgaccacactctaaacaaacgaccgcgactaacaactctcgataccatcaccgaaaccgccccgaaatattacaccccgaaatataaatcgtactcacaccaaaataatcaatccaaccgacaaacgccccgcgcgcctcgatcgtcccattaatcgattaccttctaaccctcgctttctcctccgaattctcgcaccctccaaaatataaaaacgccgaaaccaaatcgaacaacaacttcaaaacgactctcaaacgcctaaacgaaaaaaaaaaccatacactct

SEQ ID NO: 29225 - DNA, 565 bp, Artificial Sequence
  chemically treated genomic DNA (Homo sapiens) CpG-island No: 29225
ttttttttattcgtttatgttggtgggacggaggttttttcgggtttcgggatcgttcgcgaagtcgtttttcgtttttacgcgtttgtttgcggtcgtgaagtttcgcgttagagtataggttagttggtcggtttcgatgaagtttacgtttatggttcgcggtttacgttttttgggagtcgtacgaatttttttagcgagggatcggaagtaacgttaggggaagggcggatagcgtaggggcgaacgggcggcgtgtcgaggatcggcgagttaatagtagtttttgggatggtgtaattttattttttttcggcggatatttttcgggcggttgatggcgttttaggttacgtggtttcgtttcgttcgggcgattaattagtggttaggatttcggggtaggttaattcgcggtcgagttaggtcgcgtgttcgtttttttcgttcgcgattggagggcggaatttcgggttggagtttcggaagtttttgtggtagtttggcgtgagttttaggcgttcgtcggtttaggacgttcggtcgtttttatttttttttt

SEQ ID NO: 29226 - DNA, 565 bp, Artificial Sequence
  chemically treated genomic DNA (Homo sapiens) CpG-island No: 29226
aaaaaaaaaataaaaacgaccgaacgtcctaaaccgacgaacgcctaaaactcacgccaaactaccacaaaaacttccgaaactccaacccgaaattccgccctccaatcgcgaacgaaaaaaacgaacacgcgacctaactcgaccgcgaattaacctaccccgaaatcctaaccactaattaatcgcccgaacgaaacgaaaccacgtaacctaaaacgccatcaaccgcccgaaaaatatccgccgaaaaaaaataaaattacaccatcccaaaaactactattaactcgccgatcctcgacacgccgcccgttcgcccctacgctatccgcccttcccctaacgttacttccgatccctcgctaaaaaaattcgtacgactcccaaaaaacgtaaaccgcgaaccataaacgtaaacttcatcgaaaccgaccaactaacctatactctaacgcgaaacttcacgaccgcaaacaaacgcgtaaaaacgaaaaacgacttcgcgaacgatcccgaaacccgaaaaaacctccgtcccaccaacataaacgaataaaaaaaa

SEQ ID NO: 29227 - DNA, 565 bp, Artificial Sequence
  chemically treated genomic DNA (Homo sapiens) CpG-island No: 29227
ggggggggggtgggggcggtcgggcgttttgggtcggcgggcgtttggagtttacgttaagttgttataggggttttcgggattttagttcggagtttcgttttttagtcgcgagcggaggaggcgggtacgcggtttggttcggtcgcggattggtttgtttcgagattttggttattgattggtcgttcggacggggcggggttacgtggtttaaggcgttattagtcgttcgggagatattcgtcgggggagaatagggttgtattattttagaagttgttgttagttcgtcggttttcggtacgtcgttcgttcgtttttgcgttgttcgttttttttttagcgttattttcggtttttcgttgagggggttcgtgcggtttttaggaggcgtgaatcgcggattatgagcgtgggttttatcggggtcggttagttggtttatgttttggcgcggggttttacggtcgtaggtaagcgcgtggaggcgggaggcggtttcgcgggcggtttcgaggttcgagggggttttcgttttattagtatgagcgaatgaaagggg

SEQ ID NO: 29228 - DNA, 565 bp, Artificial Sequence
  chemically treated genomic DNA (Homo sapiens) CpG-island No: 29228
cccctttcattcgctcatactaataaaacgaaaaccccctcgaacctcgaaaccgcccgcgaaaccgcctcccgcctccacgcgcttacctacgaccgtaaaaccccgcgccaaaacataaaccaactaaccgaccccgataaaacccacgctcataatccgcgattcacgcctcctaaaaaccgcacgaaccccctcaacgaaaaaccgaaaataacgctaaaaaaaaaacgaacaacgcaaaaacgaacgaacgacgtaccgaaaaccgacgaactaacaacaacttctaaaataatacaaccctattctcccccgacgaatatctcccgaacgactaataacgccttaaaccacgtaaccccgccccgtccgaacgaccaatcaataaccaaaatctcgaaacaaaccaatccgcgaccgaaccaaaccgcgtacccgcctcctccgctcgcgactaaaaaacgaaactccgaactaaaatcccgaaaacccctataacaacttaacgtaaactccaaacgcccgccgacccaaaacgcccgaccgcccccacccccccccc

SEQ ID NO: 29229 - DNA, 579 bp, Artificial Sequence
  chemically treated genomic DNA (Homo sapiens) CpG-island No: 29229
agcgttttggcgcgattttttgtagcgggagtcggggcgagtcggtcggcgggtcggggttgttgtattgtagaggggagtagttgcgggtattcgtggcggcgggagcggcggtagggagttgcgattcgcggttcgagtcgggggtcggggggcgagcgtcgcgtatgtgtgcgcgcgagtgtggtcggcgcgcgttcgagtgtggtcggcgtgcgcggttttgttcggggcgtgcgggtatgagcgtgagcgtcggtgtggttcgaaaggttttttttttaaatttttcggtagtcggtttttgtgtgtgatacgatgatgttattatcgtcgagtagttttaacgtttgtatttttataaagttttatcgcgggtttcggaaacggggttgggggtggggaggcgaagattttttttttgtttcggtttttttcgtttcgtcgggatcgttcgtattgtgtagttttgaaatgtaaacgagtcgcggttcgggagttggggttttagaaaggaggggcgtggtggtcgggcgggttgattatcgagagagtagggggtttagttttgttggttta

SEQ ID NO: 29230 - DNA, 579 bp, Artificial Sequence
  chemically treated genomic DNA (Homo sapiens) CpG-island No: 29230
taaaccaacaaaactaaaccccctactctctcgataatcaacccgcccgaccaccacgcccctcctttctaaaaccccaactcccgaaccgcgactcgtttacatttcaaaactacacaatacgaacgatcccgacgaaacgaaaaaaaccgaaacaaaaaaaaaatcttcgcctccccacccccaaccccgtttccgaaacccgcgataaaactttataaaaatacaaacgttaaaactactcgacgataataacatcatcgtatcacacacaaaaaccgactaccgaaaaatttaaaaaaaaaacctttcgaaccacaccgacgctcacgctcatacccgcacgccccgaacaaaaccgcgcacgccgaccacactcgaacgcgcgccgaccacactcgcgcgcacacatacgcgacgctcgccccccgacccccgactcgaaccgcgaatcgcaactccctaccgccgctcccgccgccacgaatacccgcaactactcccctctacaatacaacaaccccgacccgccgaccgactcgccccgactcccgctacaaaaaatcgcgccaaaacgct

SEQ ID NO: 29231 - DNA, 579 bp, Artificial Sequence
  chemically treated genomic DNA (Homo sapiens) CpG-island No: 29231
tgagttaatagggttgagttttttattttttcggtggttagttcgttcgattattacgttttttttttttagggttttagttttcgggtcgcggttcgtttgtattttaaagttatataatgcgggcggtttcggcgaggcgggaggggtcggggtagagggagggttttcgtttttttatttttagtttcgttttcggagttcgcgatggagttttgtgaagatgtaggcgttggggttgttcggcgatgatgatattatcgtgttatatataggagtcggttgtcggggggtttaagagaagagtttttcggattatatcggcgtttacgtttatattcgtacgtttcgggtagagtcgcgtacgtcggttatattcgggcgcgcgtcggttatattcgcgcgtatatatacgcggcgttcgtttttcggttttcggttcgggtcgcgagtcgtagttttttgtcgtcgttttcgtcgttacggatgttcgtagttgtttttttttgtagtgtagtaatttcggttcgtcggtcggttcgtttcggttttcgttgtaaggaatcgcgttaggacgtt

SEQ ID NO: 29232 - DNA, 579 bp, Artificial Sequence
  chemically treated genomic DNA (Homo sapiens) CpG-island No: 29232
aacgtcctaacgcgattccttacaacgaaaaccgaaacgaaccgaccgacgaaccgaaattactacactacaaaaaaaaacaactacgaacatccgtaacgacgaaaacgacgacaaaaaactacgactcgcgacccgaaccgaaaaccgaaaaacgaacgccgcgtatatatacgcgcgaatataaccgacgcgcgcccgaatataaccgacgtacgcgactctacccgaaacgtacgaatataaacgtaaacgccgatataatccgaaaaactcttctcttaaaccccccgacaaccgactcctatatataacacgataatatcatcatcgccgaacaaccccaacgcctacatcttcacaaaactccatcgcgaactccgaaaacgaaactaaaaataaaaaaacgaaaaccctccctctaccccgacccctcccgcctcgccgaaaccgcccgcattatataactttaaaatacaaacgaaccgcgacccgaaaactaaaaccctaaaaaaaaaaaacgtaataatcgaacgaactaaccaccgaaaaaataaaaaactcaaccctattaactca

SEQ ID NO: 29233 - DNA, 536 bp, Artificial Sequence
  chemically treated genomic DNA (Homo sapiens) CpG-island No: 29233
ggatagcggtgacgtttttggtttagttttatcgtcgattcgttgtttaggttacgtttcgttattttattatttaaataattttttttttgattttatacgatcgttttagtttttaatttttcggttttcgtatattttcgttttcgttcgtacgttattttttcgatcgttatttgtttttatcggttttatgttttttggtattcgtcgagattttgttttttatttcgtatatcgtttattgtcgtttttattattcggttttcgtatgacggtatgtttagattcgtgttgagcgtttttatttttcgtttcgtcgtttagtagcgtatagcgttagtcgtttttagattaatttttaagatataggattttattattttttcgtagagcgttcgatgtagggataggtagtgacgttagggatgggagcgggggttttttggcggtgtatcggtttattaatttaatatttacgtcgttatgttttcgtttaatttttacggttttaggtattagtgggtggtgtcgtt

SEQ ID NO: 29234 - DNA, 536 bp, Artificial Sequence
  chemically treated genomic DNA (Homo sapiens) CpG-island No: 29234
aacgacaccacccactaatacctaaaaccgtaaaaattaaacgaaaacataacgacgtaaatattaaattaataaaccgatacaccgccaaaaaacccccgctcccatccctaacgtcactacctatccctacatcgaacgctctacgaaaaaataataaaatcctatatcttaaaaattaatctaaaaacgactaacgctatacgctactaaacgacgaaacgaaaaataaaaacgctcaacacgaatctaaacataccgtcatacgaaaaccgaataataaaaacgacaataaacgatatacgaaataaaaaacaaaatctcgacgaataccaaaaaacataaaaccgataaaaacaaataacgatcgaaaaaataacgtacgaacgaaaacgaaaatatacgaaaaccgaaaaattaaaaactaaaacgatcgtataaaatcaaaaaaaaaattatttaaataataaaataacgaaacgtaacctaaacaacgaatcgacgataaaactaaaccaaaaacgtcaccgctatcc

SEQ ID NO: 29235 - DNA, 536 bp, Artificial Sequence
  chemically treated genomic DNA (Homo sapiens) CpG-island No: 29235
agcggtattatttattgatgtttggggtcgtggggattgggcgaaggtataacgacgtggatattagattgataggtcggtgtatcgttagggggttttcgtttttatttttggcgttattgtttatttttatatcggacgttttgcgaaggggtgatggaattttgtattttaaaaattggtttgggggcggttgacgttatgcgttgttgggcggcggggcgggaaataggagcgtttaatacggatttaggtatgtcgttatgcggggatcggatggtagggacggtagtgggcgatatacgggatggggggtaaaatttcggcgggtattaaaaggtatgggatcggtggggataaataacggtcggggaagtgacgtgcgggcgggggcgagaatatgcgggggtcggggggttaggggttagagcgatcgtgtggaattaaggggggggttgtttgggtgataggatggcggggcgtggtttggatagcgaatcggcggtgagattgagttaggaacgttatcgttattt

SEQ ID NO: 29236 - DNA, 536 bp, Artificial Sequence
  chemically treated genomic DNA (Homo sapiens) CpG-island No: 29236
aaataacgataacgttcctaactcaatctcaccgccgattcgctatccaaaccacgccccgccatcctatcacccaaacaaccccccccttaattccacacgatcgctctaacccctaaccccccgacccccgcatattctcgcccccgcccgcacgtcacttccccgaccgttatttatccccaccgatcccataccttttaatacccgccgaaattttaccccccatcccgtatatcgcccactaccgtccctaccatccgatccccgcataacgacatacctaaatccgtattaaacgctcctatttcccgccccgccgcccaacaacgcataacgtcaaccgcccccaaaccaatttttaaaatacaaaattccatcaccccttcgcaaaacgtccgatataaaaataaacaataacgccaaaaataaaaacgaaaaccccctaacgatacaccgacctatcaatctaatatccacgtcgttataccttcgcccaatccccacgaccccaaacatcaataaataataccgct

SEQ ID NO: 29237 - DNA, 881 bp, Artificial Sequence
  chemically treated genomic DNA (Homo sapiens) CpG-island No: 29237
gggggcgcgcggggtttatttttttcgtttttttttttttcgaagttattttgagtttttgtgtttagcgaattagttcggtgttgcgttaggtcgttggttgcgcgttgggttcgggtgggggttcgtcggttcgtttttgttattggggtcgggttgtagtttttttttcgtcgtttcgagtttttttttcggttcggagttttttttcgcgcgtttttttttttttttttttttttttttttttttttgtttgttaggttttgttttcgttttttgcgtttatagttttcgttagcgtcgattttttcggagttcgagtcggagagcggcgaaggggagtcgtcggtttttttttaggacgttgatagtaggtttcggggttttcgtttcgttttttcgtcgacgggatatattttcgttttttttttgtttcgttagttttcgtcggatttatcgggcggcggagagagcgagcgggcgagcgtagcgcggcggtcgcgcgggagtgaaggggcgcgcggtaggtcggcggggagtttttcggggcgtacggagttcgcgcgtttttcgggattttttttcgtttttgggtcggatttgtgggcgtcgggagttcgggtagcgttcggcgcgtcgggtcggggtggcgggcggtttcgggatttcggtagttggagaaggagtcggagttcggtcgggatgagaaggtgacgtcgtcgggggcgttattcgttttgtgggggaagatgttcgtttattgcgtgtaggatgttatcgtggtggacgtggagaagcggaggaatttttttaagtattacgtgagtatagttttcgtcgattttgttgggggtggttcgaggtttcgggagggtttcgga

SEQ ID NO: 29238 - DNA, 881 bp, Artificial Sequence
  chemically treated genomic DNA (Homo sapiens) CpG-island No: 29238
tccgaaaccctcccgaaacctcgaaccacccccaacaaaatcgacgaaaactatactcacgtaatacttaaaaaaattcctccgcttctccacgtccaccacgataacatcctacacgcaataaacgaacatcttcccccacaaaacgaataacgcccccgacgacgtcaccttctcatcccgaccgaactccgactccttctccaactaccgaaatcccgaaaccgcccgccaccccgacccgacgcgccgaacgctacccgaactcccgacgcccacaaatccgacccaaaaacgaaaaaaaatcccgaaaaacgcgcgaactccgtacgccccgaaaaactccccgccgacctaccgcgcgccccttcactcccgcgcgaccgccgcgctacgctcgcccgctcgctctctccgccgcccgataaatccgacgaaaactaacgaaacaaaaaaaaaacgaaaatatatcccgtcgacgaaaaaacgaaacgaaaaccccgaaacctactatcaacgtcctaaaaaaaaaccgacgactccccttcgccgctctccgactcgaactccgaaaaaatcgacgctaacgaaaactataaacgcaaaaaacgaaaacaaaacctaacaaacaaaaaaaaaaaaaaaaaaaaaaaaaaaaaaaaaaacgcgcgaaaaaaaactccgaaccgaaaaaaaaactcgaaacgacgaaaaaaaaactacaacccgaccccaataacaaaaacgaaccgacgaacccccacccgaacccaacgcgcaaccaacgacctaacgcaacaccgaactaattcgctaaacacaaaaactcaaaataacttcgaaaaaaaaaaaaacgaaaaaaataaaccccgcgcgccccc

SEQ ID NO: 29239 - DNA, 881 bp, Artificial Sequence
  chemically treated genomic DNA (Homo sapiens) CpG-island No: 29239
ttcggggttttttcgggatttcgggttatttttagtagggtcggcgggggttgtatttacgtagtgtttggaggggttttttcgtttttttacgtttattacggtggtattttgtacgtagtaggcgagtatttttttttataaagcgagtggcgttttcggcggcgttatttttttatttcggtcgggtttcggttttttttttagttgtcggggtttcggggtcgttcgttatttcggttcggcgcgtcgaacgttgttcggattttcggcgtttataggttcggtttagggacgggggagggtttcggagggcgcgcgggtttcgtgcgtttcgggggatttttcgtcggtttgtcgcgcgtttttttattttcgcgcggtcgtcgcgttgcgttcgttcgttcgtttttttcgtcgttcggtgggttcggcgggaattggcggagtagaggaggggcgggggtgtgtttcgtcggcgaggggacggggcgggggtttcggagtttgttgttagcgttttggggaggggtcggcggttttttttcgtcgtttttcggttcgggtttcggggggatcggcgttggcggaggttgtgggcgtaggaggcggaggtagggtttggtaggtagggaagggaagggagggaggggagagaggggaagcgcgcggggaggggtttcgggtcgggggaggggttcggggcgacggggagggggttgtagttcggttttagtggtaggggcgggtcgacgagtttttattcgagtttagcgcgtagttagcggtttggcgtagtatcgggttagttcgttaggtataaaaatttagggtggtttcggggggagagggagcggggaaagtgagtttcgcgcgttttt

SEQ ID NO: 29240 - DNA, 881 bp, Artificial Sequence
  chemically treated genomic DNA (Homo sapiens) CpG-island No: 29240
aaaaacgcgcgaaactcactttccccgctccctctccccccgaaaccaccctaaatttttatacctaacgaactaacccgatactacgccaaaccgctaactacgcgctaaactcgaataaaaactcgtcgacccgcccctaccactaaaaccgaactacaaccccctccccgtcgccccgaacccctcccccgacccgaaacccctccccgcgcgcttcccctctctcccctccctcccttcccttccctacctaccaaaccctacctccgcctcctacgcccacaacctccgccaacgccgatccccccgaaacccgaaccgaaaaacgacgaaaaaaaaccgccgacccctccccaaaacgctaacaacaaactccgaaacccccgccccgtcccctcgccgacgaaacacacccccgcccctcctctactccgccaattcccgccgaacccaccgaacgacgaaaaaaacgaacgaacgaacgcaacgcgacgaccgcgcgaaaataaaaaaacgcgcgacaaaccgacgaaaaatcccccgaaacgcacgaaacccgcgcgccctccgaaaccctcccccgtccctaaaccgaacctataaacgccgaaaatccgaacaacgttcgacgcgccgaaccgaaataacgaacgaccccgaaaccccgacaactaaaaaaaaaaccgaaacccgaccgaaataaaaaaataacgccgccgaaaacgccactcgctttataaaaaaaaatactcgcctactacgtacaaaataccaccgtaataaacgtaaaaaaacgaaaaaacccctccaaacactacgtaaatacaacccccgccgaccctactaaaaataacccgaaatcccgaaaaaaccccgaa

SEQ ID NO: 29241 - DNA, 1366 bp, Artificial Sequence
  chemically treated genomic DNA (Homo sapiens) CpG-island No: 29241
ttggcgagggcggggcgggatggtgtagttggtggggaagggtggggcgaatttaggaaggcggttttatagggcgggcgtagattgggcgttcgggacgggttaaggagggcggaatgaatttggagagggcggggcggttgggggaggggcgggaaggttttggggattggtttaggggcgggttcggtggggtgggggggcggtgtcgaatgaatttgaaggggcggggtcggtttggcgcggttagggtggggtggggcgttttaggttttggttaaggagcgcgcggcgggcgggtcggtcgtagggtttgggtacgattatggtgggacgtcgttcgcggtttcggggatcgttgcggtagtagaggcggttggttaggaacgcgggtcgaggttggattttttgggtagttagttcgtgatttttgtcgttatcgatcgcgatttttattttttcgttttttttcggcgtcgacggttatatcgtcggacgatgcgcgttcgcggtcgttcgggaggttgagtttagtttttcgtttcgtttttttcgcgtagttgtttttatggttttgcggggcgtcgcgggagcgatcgatatttcggtgttttcggtcgggggagttttcggcggtttagcgttttcgtcgtttattttttcgggcggttcggtttcggcgggcgcggggttgtgggtcgcgttttatgattacgaggttcgcggcgaggacgagttgagtttgcggcgcggttagttggtggaggtgttgtcgtaggacgtcgtcgtgtcgggcgacgagggttggtgggtaggttaggtgtagcggcgtttcggtatttttttcgttaattacgtggttttttgtcgttcggtcgttagtttcgcgtcgtcgttttcgcggtttagtttttcggtatacgtcgttttcgagcggttggagttgaaggagtttatcggcgttgggggtttcgggtaggtgtatcgcgttatttggtagggttaggaggtggtcgtgaaggcggcgcgttaggattcggagtaggacgcggcggcggttgtcgagagcgtgcggcgcgaggttcggtttttcgttatgttgcggtattttaatattatcgagttgcgcggcgtgtgtttgtagtagtcgtatttttgtttggtgttggagttcgttcgcggcggagcgtttaatcgagcgttggtcgttgttaacgtcgtttcggattcgcgcgcgttcggttttcgtcgcgcgcgtcgtattttttcgtacgtgttggttaattgggtcgtgtagatagcgcggggtatgttttatttgtatgaggaggttttcgtgtttattttgtatcgggattttaagttt

SEQ ID NO: 29242 - DNA, 1366 bp, Artificial Sequence
  chemically treated genomic DNA (Homo sapiens) CpG-island No: 29242
aaacttaaaatcccgatacaaaataaacacgaaaacctcctcatacaaataaaacataccccgcgctatctacacgacccaattaaccaacacgtacgaaaaaatacgacgcgcgcgacgaaaaccgaacgcgcgcgaatccgaaacgacgttaacaacgaccaacgctcgattaaacgctccgccgcgaacgaactccaacaccaaacaaaaatacgactactacaaacacacgccgcgcaactcgataatattaaaataccgcaacataacgaaaaaccgaacctcgcgccgcacgctctcgacaaccgccgccgcgtcctactccgaatcctaacgcgccgccttcacgaccacctcctaaccctaccaaataacgcgatacacctacccgaaacccccaacgccgataaactccttcaactccaaccgctcgaaaacgacgtataccgaaaaactaaaccgcgaaaacgacgacgcgaaactaacgaccgaacgacaaaaaaccacgtaattaacgaaaaaaataccgaaacgccgctacacctaacctacccaccaaccctcgtcgcccgacacgacgacgtcctacgacaacacctccaccaactaaccgcgccgcaaactcaactcgtcctcgccgcgaacctcgtaatcataaaacgcgacccacaaccccgcgcccgccgaaaccgaaccgcccgaaaaaataaacgacgaaaacgctaaaccgccgaaaactcccccgaccgaaaacaccgaaatatcgatcgctcccgcgacgccccgcaaaaccataaaaacaactacgcgaaaaaaacgaaacgaaaaactaaactcaacctcccgaacgaccgcgaacgcgcatcgtccgacgatataaccgtcgacgccgaaaaaaaacgaaaaaataaaaatcgcgatcgataacgacaaaaatcacgaactaactacccaaaaaatccaacctcgacccgcgttcctaaccaaccgcctctactaccgcaacgatccccgaaaccgcgaacgacgtcccaccataatcgtacccaaaccctacgaccgacccgcccgccgcgcgctccttaaccaaaacctaaaacgccccaccccaccctaaccgcgccaaaccgaccccgccccttcaaattcattcgacaccgcccccccaccccaccgaacccgcccctaaaccaatccccaaaaccttcccgcccctcccccaaccgccccgccctctccaaattcattccgccctccttaacccgtcccgaacgcccaatctacgcccgccctataaaaccgccttcctaaattcgccccacccttccccaccaactacaccatcccgccccgccctcgccaa

SEQ ID NO: 29243 - DNA, 1366 bp, Artificial Sequence
  chemically treated genomic DNA (Homo sapiens) CpG-island No: 29243
ggatttgaggtttcggtgtaggatgggtacgaaggtttttttatgtaggtagagtatgtttcgcgttatttgtacggtttagttgattagtacgtgcggagggatgcggcgcgcgcggcgggggtcgggcgcgcgcgggttcggggcggcgttggtagcggttagcgttcggttgagcgtttcgtcgcgggcgaattttagtattaggtagaggtgcggttgttgtaggtatacgtcgcgtagttcgatgatgttggggtgtcgtagtatggcgaagagtcgagtttcgcgtcgtacgttttcggtagtcgtcgtcgcgttttgtttcgggttttggcgcgtcgtttttacggttattttttggttttgttaggtggcgcggtatatttgttcgaagtttttagcgtcgatgagtttttttagttttagtcgttcgaaggcgacgtgtatcggggagttgggtcgcgagggcggcggcgcggggttggcggtcgggcggtagggagttacgtagttggcggggaagatgtcgaggcgtcgttgtatttggtttgtttattagttttcgtcgttcgatacggcggcgttttgcgatagtatttttattagttggtcgcgtcgtaggtttagttcgttttcgtcgcgagtttcgtagttatagagcgcggtttatagtttcgcgttcgtcgaggtcgagtcgttcgaggaggtggacgacgaggacgttgagtcgtcgggggttttttcggtcgaggatatcggggtgtcggtcgttttcgcggcgtttcgtaaagttatgggggtagttgcgcggggaaggcggagcgggaagttgggtttagtttttcgggcggtcgcgggcgcgtatcgttcggcggtgtggtcgtcggcgtcgggggaaggcgagggggtaggaatcgcgatcggtgacggtagagattacgggttagttgtttaaagggtttagtttcggttcgcgtttttggttagtcgtttttgttgtcgtagcggttttcgaagtcgcgggcgacgttttattatggtcgtgtttaggttttgcggtcggttcgttcgtcgcgcgttttttagttagagtttgggacgttttattttattttagtcgcgttaggtcggtttcgtttttttaggtttattcggtatcgtttttttattttatcgggttcgtttttaggttagtttttagggttttttcgttttttttttagtcgtttcgttttttttaggtttatttcgttttttttgattcgtttcgggcgtttagtttgcgttcgttttatgggatcgtttttttaggttcgttttatttttttttattaattgtattatttcgtttcgttttcgttag

SEQ ID NO: 29244 - DNA, 1366 bp, Artificial Sequence
  chemically treated genomic DNA (Homo sapiens) CpG-island No: 29244
ctaacgaaaacgaaacgaaataatacaattaataaaaaaaaataaaacgaacctaaaaaaacgatcccataaaacgaacgcaaactaaacgcccgaaacgaatcaaaaaaaacgaaataaacctaaaaaaaacgaaacgactaaaaaaaaaacgaaaaaaccctaaaaactaacctaaaaacgaacccgataaaataaaaaaacgataccgaataaacctaaaaaaacgaaaccgacctaacgcgactaaaataaaataaaacgtcccaaactctaactaaaaaacgcgcgacgaacgaaccgaccgcaaaacctaaacacgaccataataaaacgtcgcccgcgacttcgaaaaccgctacgacaacaaaaacgactaaccaaaaacgcgaaccgaaactaaaccctttaaacaactaacccgtaatctctaccgtcaccgatcgcgattcctaccccctcgccttcccccgacgccgacgaccacaccgccgaacgatacgcgcccgcgaccgcccgaaaaactaaacccaacttcccgctccgccttccccgcgcaactacccccataactttacgaaacgccgcgaaaacgaccgacaccccgatatcctcgaccgaaaaaacccccgacgactcaacgtcctcgtcgtccacctcctcgaacgactcgacctcgacgaacgcgaaactataaaccgcgctctataactacgaaactcgcgacgaaaacgaactaaacctacgacgcgaccaactaataaaaatactatcgcaaaacgccgccgtatcgaacgacgaaaactaataaacaaaccaaatacaacgacgcctcgacatcttccccgccaactacgtaactccctaccgcccgaccgccaaccccgcgccgccgccctcgcgacccaactccccgatacacgtcgccttcgaacgactaaaactaaaaaaactcatcgacgctaaaaacttcgaacaaatataccgcgccacctaacaaaaccaaaaaataaccgtaaaaacgacgcgccaaaacccgaaacaaaacgcgacgacgactaccgaaaacgtacgacgcgaaactcgactcttcgccatactacgacaccccaacatcatcgaactacgcgacgtatacctacaacaaccgcacctctacctaatactaaaattcgcccgcgacgaaacgctcaaccgaacgctaaccgctaccaacgccgccccgaacccgcgcgcgcccgacccccgccgcgcgcgccgcatccctccgcacgtactaatcaactaaaccgtacaaataacgcgaaacatactctacctacataaaaaaaccttcgtacccatcctacaccgaaacctcaaatcc

SEQ ID NO: 29245 - DNA, 1080 bp, Artificial Sequence
  chemically treated genomic DNA (Homo sapiens) CpG-island No: 29245
gttttcgggcgttcggttatcgtcgtaggtgcgggtcgtatgaatggagcgtcgggcgtaaggtaaagtttggtatcgtttgcgcggtcgttatttgttttcggagcgtgagtgcggggtgtggggcgtgcgcgtgcgcgtttagagggggtttaaggcgagcgcgtcgggtagttgcgggcgcgtggttgttgaggttggcggcggtgtcgcgcgttcgacgggtcggtggttgcggggtttttcgtttcgattcgggttgggggtagtcgtggcggtcgtcggggatcgtaaggggcggaggaaaggagggggtcggtttcggtacgtagaggagtagtcgattatgtttcgagataatatggtttttttgatttaacggatcgttcgttaggtttgttttatttttcggggtagcgggggcggtcgcggcgttttcgatcgcgacgcggtttttggttcggaggcgtcgatgtagtcgggttttttcgagaatttgagtaagttgaagagttttttgatttagtttcgcgtcgaggatttgaatatcgtttcgcgtaaggttatattgtagtcgttgtcgtttaatttgtcgttagttatttatatgtatatttacgagacggacggttttagtttgggcgtgtttttgtttaagagcggtacgtttatttcgttgtacgattattcgggtatgtacggtatgtttaaggtgttgtacggtatcgtgcgtattagttgtatggataagttagacgcgggcggcgggtaacggtcgcgggttttgtcgttcgagtagtagttcgagtcgtcgttgtagtttcgggagcgagaagtcgtgcggtcgggcgtgttgcgttcgcgggtcgagtatatcgaggttagcggtttttgtatttttatatcgtatcgggataatttgtattagatcgacgtcgtggaagggtttgtcgtttttttggatattttggtttcgttttacgattcggacgatggtcgggattgttattattatcgggtgttggagtcggttaggtttaaggaggtttttagttcggtttgtgatttgtttcgagaggt

SEQ ID NO: 29246 - DNA, 1080 bp, Artificial Sequence
  chemically treated genomic DNA (Homo sapiens) CpG-island No: 29246
acctctcgaaacaaatcacaaaccgaactaaaaacctccttaaacctaaccgactccaacacccgataataataacaatcccgaccatcgtccgaatcgtaaaacgaaaccaaaatatccaaaaaaacgacaaacccttccacgacgtcgatctaatacaaattatcccgatacgatataaaaatacaaaaaccgctaacctcgatatactcgacccgcgaacgcaacacgcccgaccgcacgacttctcgctcccgaaactacaacgacgactcgaactactactcgaacgacaaaacccgcgaccgttacccgccgcccgcgtctaacttatccatacaactaatacgcacgataccgtacaacaccttaaacataccgtacatacccgaataatcgtacaacgaaataaacgtaccgctcttaaacaaaaacacgcccaaactaaaaccgtccgtctcgtaaatatacatataaataactaacgacaaattaaacgacaacgactacaatataaccttacgcgaaacgatattcaaatcctcgacgcgaaactaaatcaaaaaactcttcaacttactcaaattctcgaaaaaacccgactacatcgacgcctccgaaccaaaaaccgcgtcgcgatcgaaaacgccgcgaccgcccccgctaccccgaaaaataaaacaaacctaacgaacgatccgttaaatcaaaaaaaccatattatctcgaaacataatcgactactcctctacgtaccgaaaccgaccccctcctttcctccgccccttacgatccccgacgaccgccacgactacccccaacccgaatcgaaacgaaaaaccccgcaaccaccgacccgtcgaacgcgcgacaccgccgccaacctcaacaaccacgcgcccgcaactacccgacgcgctcgccttaaaccccctctaaacgcgcacgcgcacgccccacaccccgcactcacgctccgaaaacaaataacgaccgcgcaaacgataccaaactttaccttacgcccgacgctccattcatacgacccgcacctacgacgataaccgaacgcccgaaaac

SEQ ID NO: 29247 - DNA, 1080 bp, Artificial Sequence
  chemically treated genomic DNA (Homo sapiens) CpG-island No: 29247
atttttcgaggtaggttataggtcgagttggaggtttttttgggtttgatcggttttagtattcggtaatagtggtagtttcggttatcgttcgggtcgtagggcggggttaggatgtttaggaaggcggtaggtttttttacggcgtcgatttggtgtaggttgtttcggtgcggtgtgaggatgtaggggtcgttggtttcggtgtattcggttcgcgaacgtagtacgttcggtcgtacggtttttcgttttcggggttgtagcggcggttcgaattgttgttcgggcggtaaggttcgcggtcgttgttcgtcgttcgcgtttagtttgtttatgtagttgatgcgtacggtgtcgtatagtattttgagtatgtcgtgtatgttcgggtggtcgtgtagcgggatggacgtgtcgtttttgagtaggaatacgtttaggttgaagtcgttcgtttcgtagatgtgtatgtaggtgattggcggtaggttgggcggtagcggttgtagtgtggttttgcgcggggcgatgtttaagttttcggcgcggagttgggttaggaggttttttagtttgtttaggttttcggggaagttcggttgtatcggcgttttcgggttagaagtcgcgtcgcgatcggaagcgtcgcggtcgttttcgttgtttcggaaggtgaggtaagtttggcgggcgattcgttggattaaggaggttatgttgtttcggggtatggtcggttgtttttttgcgtgtcgggatcggtttttttttttttttcgttttttgcggttttcggcggtcgttacggttgtttttagttcgggtcgaggcgggaggtttcgtaattatcggttcgtcgggcgcgcggtatcgtcgttaattttagtagttacgcgttcgtaattgttcggcgcgttcgttttgagttttttttgagcgcgtacgcgtacgttttatatttcgtatttacgtttcgggagtagatagcggtcgcgtagacggtgttaggttttgttttacgttcggcgttttatttatgcggttcgtatttacgacggtggtcgggcgttcggggat

SEQ ID NO: 29248 - DNA, 1080 bp, Artificial Sequence
  chemically treated genomic DNA (Homo sapiens) CpG-island No: 29248
atccccgaacgcccgaccaccgtcgtaaatacgaaccgcataaataaaacgccgaacgtaaaacaaaacctaacaccgtctacgcgaccgctatctactcccgaaacgtaaatacgaaatataaaacgtacgcgtacgcgctcaaaaaaaactcaaaacgaacgcgccgaacaattacgaacgcgtaactactaaaattaacgacgataccgcgcgcccgacgaaccgataattacgaaacctcccgcctcgacccgaactaaaaacaaccgtaacgaccgccgaaaaccgcaaaaaacgaaaaaaaaaaaaaaaccgatcccgacacgcaaaaaaacaaccgaccataccccgaaacaacataacctccttaatccaacgaatcgcccgccaaacttacctcaccttccgaaacaacgaaaacgaccgcgacgcttccgatcgcgacgcgacttctaacccgaaaacgccgatacaaccgaacttccccgaaaacctaaacaaactaaaaaacctcctaacccaactccgcgccgaaaacttaaacatcgccccgcgcaaaaccacactacaaccgctaccgcccaacctaccgccaatcacctacatacacatctacgaaacgaacgacttcaacctaaacgtattcctactcaaaaacgacacgtccatcccgctacacgaccacccgaacatacacgacatactcaaaatactatacgacaccgtacgcatcaactacataaacaaactaaacgcgaacgacgaacaacgaccgcgaaccttaccgcccgaacaacaattcgaaccgccgctacaaccccgaaaacgaaaaaccgtacgaccgaacgtactacgttcgcgaaccgaatacaccgaaaccaacgacccctacatcctcacaccgcaccgaaacaacctacaccaaatcgacgccgtaaaaaaacctaccgccttcctaaacatcctaaccccgccctacgacccgaacgataaccgaaactaccactattaccgaatactaaaaccgatcaaacccaaaaaaacctccaactcgacctataacctacctcgaaaaat

SEQ ID NO: 29249 - DNA, 548 bp, Artificial Sequence
  chemically treated genomic DNA (Homo sapiens) CpG-island No: 29249
ggagttcgtaggttttcgtgtttttttaatttttttcgtttttttcgatagtcgcgcgttttcgttttagtttaaggttagtggttcggtttcgaggaaggcgcgggggtcgcgagagacgattttttatagtatcgttaaggaaatcggcgtcgtcggtgttttcgcgggtttttttcggtagttcgggggttgtttttcgtcgttgcgcgtttttttttattatttattcgttgttttcgtcggtcggagttttcgttttattaatttttttaatttcgcgggcggcgggtaggtgggggcgcgtttttaggtcgtaagaagggagcgtttcgagattttttcggggtcggttttgtttaggagggagttatcgacgtttttttttggcgttttttcgtcgttcggttttttaggcgcgtagtttttttcgagagtttcgaattttatcgttattttgtttttgtttcgggagaggggaggtcgaagtgttgtcggttagagggtttacgtaagtttcgaaattcggggggacgttttttttattt

SEQ ID NO: 29250 - DNA, 548 bp, Artificial Sequence
  chemically treated genomic DNA (Homo sapiens) CpG-island No: 29250
aaataaaaaaaacgtccccccgaatttcgaaacttacgtaaaccctctaaccgacaacacttcgacctcccctctcccgaaacaaaaacaaaataacgataaaattcgaaactctcgaaaaaaactacgcgcctaaaaaaccgaacgacgaaaaaacgccaaaaaaaaacgtcgataactccctcctaaacaaaaccgaccccgaaaaaatctcgaaacgctcccttcttacgacctaaaaacgcgcccccacctacccgccgcccgcgaaattaaaaaaattaataaaacgaaaactccgaccgacgaaaacaacgaataaataataaaaaaaaacgcgcaacgacgaaaaacaacccccgaactaccgaaaaaaacccgcgaaaacaccgacgacgccgatttccttaacgatactataaaaaatcgtctctcgcgacccccgcgccttcctcgaaaccgaaccactaaccttaaactaaaacgaaaacgcgcgactatcgaaaaaaacgaaaaaaattaaaaaaacacgaaaacctacgaactcc

SEQ ID NO: 29251 - DNA, 548 bp, Artificial Sequence
  chemically treated genomic DNA (Homo sapiens) CpG-island No: 29251
gggtggaagaggcgttttttcgggtttcgaggtttgcgtaggttttttggtcggtagtatttcgattttttttttttcggggtaggggtaaagtgacggtaaagttcggggttttcggggagagttgcgcgtttggagagtcgagcggcggagaagcgttaggggaaagcgtcggtagtttttttttgggtagagtcgatttcgggaaaatttcggagcgttttttttttgcggtttggaggcgcgtttttatttgttcgtcgttcgcgaagttgagggggttagtaaggcgggggtttcggtcggcggaggtagcgagtgggtggtggaggagggcgcgtaacggcgggaagtagttttcggattgtcgagggaggttcgcgggggtatcggcgacgtcggtttttttggcgatgttgtggaaagtcgtttttcgcggttttcgcgtttttttcgaggtcgggttattggttttgggttgaggcggggacgcgcggttgtcgggaaaggcggagaagattgggagggtacggaaatttacggatttt

SEQ ID NO: 29252 - DNA, 548 bp, Artificial Sequence
  chemically treated genomic DNA (Homo sapiens) CpG-island No: 29252
aaaatccgtaaatttccgtaccctcccaatcttctccgcctttcccgacaaccgcgcgtccccgcctcaacccaaaaccaataacccgacctcgaaaaaaacgcgaaaaccgcgaaaaacgactttccacaacatcgccaaaaaaaccgacgtcgccgatacccccgcgaacctccctcgacaatccgaaaactacttcccgccgttacgcgccctcctccaccacccactcgctacctccgccgaccgaaacccccgccttactaaccccctcaacttcgcgaacgacgaacaaataaaaacgcgcctccaaaccgcaaaaaaaaaacgctccgaaattttcccgaaatcgactctacccaaaaaaaaactaccgacgctttcccctaacgcttctccgccgctcgactctccaaacgcgcaactctccccgaaaaccccgaactttaccgtcactttacccctaccccgaaaaaaaaaaaatcgaaatactaccgaccaaaaaacctacgcaaacctcgaaacccgaaaaaacgcctcttccaccc

SEQ ID NO: 29253 - DNA, 501 bp, Artificial Sequence
  chemically treated genomic DNA (Homo sapiens) CpG-island No: 29253
ggtttcgcggttttcgcgttgattatgggtaagacgacgtttcggaagggagttcgattcgtatttcgggttttgagttcgaaagaacgggggaaagtcgaattatgtaaatgcggatttttgcgatggggttcgggttacggttttcgtcggttttttaggtgaggtatttatcggtagtaagcgcgggcgaggcgattgttcgcgtttcgtttttttttgcgtacgtgggcggatcggtaggcgggcgagttgttcgggtcgtttcgcgattggcgttgttgttaaattcgtcggcggtcgtcgcgcgttatttcgagggggagtttttggacgttcgagtgttcggttagtagggcgcggagggtaggatcggggttgggggcggggcggggtgtttgagcgagggaaaatcgcgaggttttcggttgttatttttttcggaggaggatgttagtagaaggcgggtggaggagggggttttattaaggagttttgaaa

SEQ ID NO: 29254 - DNA, 501 bp, Artificial Sequence
  chemically treated genomic DNA (Homo sapiens) CpG-island No: 29254
tttcaaaactccttaataaaaccccctcctccacccgccttctactaacatcctcctccgaaaaaaataacaaccgaaaacctcgcgattttccctcgctcaaacaccccgccccgcccccaaccccgatcctaccctccgcgccctactaaccgaacactcgaacgtccaaaaactccccctcgaaataacgcgcgacgaccgccgacgaatttaacaacaacgccaatcgcgaaacgacccgaacaactcgcccgcctaccgatccgcccacgtacgcaaaaaaaaacgaaacgcgaacaatcgcctcgcccgcgcttactaccgataaatacctcacctaaaaaaccgacgaaaaccgtaacccgaaccccatcgcaaaaatccgcatttacataattcgactttcccccgttctttcgaactcaaaacccgaaatacgaatcgaactcccttccgaaacgtcgtcttacccataatcaacgcgaaaaccgcgaaacc

SEQ ID NO: 29255 - DNA, 501 bp, Artificial Sequence
  chemically treated genomic DNA (Homo sapiens) CpG-island No: 29255
ttttaagattttttgatggggtttttttttttattcgttttttattggtattttttttcgggaaaggtggtagtcgaagatttcgcggttttttttcgtttaggtatttcgtttcgtttttagtttcggttttgtttttcgcgttttgttggtcgggtattcgggcgtttaggagttttttttcggggtggcgcgcggcgatcgtcggcgggtttggtagtagcgttagtcgcggggcggttcgggtaattcgttcgtttgtcggttcgtttacgtgcgtagagaggagcgaagcgcgagtagtcgtttcgttcgcgtttgttgtcggtgggtgttttatttaaggggtcggcgggggtcgtaattcgagttttatcgtagggattcgtatttgtataattcggttttttttcgttttttcggatttagggttcgagatgcgagtcggattttttttcgaggcgtcgttttgtttatggttagcgcgggggtcgcgggatt

SEQ ID NO: 29256 - DNA, 501 bp, Artificial Sequence
  chemically treated genomic DNA (Homo sapiens) CpG-island No: 29256
aatcccgcgacccccgcgctaaccataaacaaaacgacgcctcgaaaaaaaatccgactcgcatctcgaaccctaaatccgaaaaaacgaaaaaaaaccgaattatacaaatacgaatccctacgataaaactcgaattacgacccccgccgaccccttaaataaaacacccaccgacaacaaacgcgaacgaaacgactactcgcgcttcgctcctctctacgcacgtaaacgaaccgacaaacgaacgaattacccgaaccgccccgcgactaacgctactaccaaacccgccgacgatcgccgcgcgccaccccgaaaaaaaactcctaaacgcccgaatacccgaccaacaaaacgcgaaaaacaaaaccgaaactaaaaacgaaacgaaatacctaaacgaaaaaaaaccgcgaaatcttcgactaccacctttcccgaaaaaaaataccaataaaaaacgaataaaaaaaaaaaccccatcaaaaaatcttaaaa

SEQ ID NO: 29257 - DNA, 1025 bp, Artificial Sequence
  chemically treated genomic DNA (Homo sapiens) CpG-island No: 29257
ttttagaacgttattttcgggtgataatttgtagggtttttcgtttttcgcgatttttcgggagtttttttttcggcgttttttcggggttgtaggggttgtaggttcggtttcggggtttttttatcgtagttcgttcggttttaggttagtgggttttaattacgtcgataatatgatttcggcgattttgtgcggcgatgggatgcggtcgtgggcggtggagtttaggcggagttcgttttttatacgcgagggcgttttttttttatcgttcgtcggttttaaagttcgcgttttaggcgacggtagttaacgggttgtcggttggaggtttcgtcgacgtttcgttttttgcgtgtttattcgcgtttcgtagtttcgtttttagcgtcgattttaagtttcggcgtttagtggttcggcgttttttaaggttcggtgtttagcgttaatttcgaggtttttatgtttcgtttttcgacgttagggggtagggttagcgcgttgcgcgtcggggcggggttttggttgcgtcggtcgcgtagttcgcgcgcggagcgtattttgttgcggtcgttggtcgttagcgcggtttcggcggttgttttggagaagtaagatggcggcgacggcggtcgtagtggtggtcgaggaggatacggagttgcgggatttgttggtgtagacgttggagaatagcggggttttgaatcgtattaaggtgaggtcggaggttggggtcgggtttggcggattcgtagggtttgcgtggatagcgggcgttataacggtcgcggcgaggaggtcgtttttttggcgagggatcggggtcggcgggtattgggggcgcgttcggtatggttttcgttttgttcgttttatagagggggtcggttcgttcgttcgtgtggtttcggagggtatcgcggattgggggtgtttggttcgttttttgttttatttcgtgggggcgggatcgcggggtttgggggttatacgggcggttcgtagttgggttttgg

SEQ ID NO: 29258 - DNA, 1025 bp, Artificial Sequence
  chemically treated genomic DNA (Homo sapiens) CpG-island No: 29258
ccaaaacccaactacgaaccgcccgtataacccccaaaccccgcgatcccgcccccacgaaataaaacaaaaaacgaaccaaacacccccaatccgcgataccctccgaaaccacacgaacgaacgaaccgaccccctctataaaacgaacaaaacgaaaaccataccgaacgcgcccccaatacccgccgaccccgatccctcgccaaaaaaacgacctcctcgccgcgaccgttataacgcccgctatccacgcaaaccctacgaatccgccaaacccgaccccaacctccgacctcaccttaatacgattcaaaaccccgctattctccaacgtctacaccaacaaatcccgcaactccgtatcctcctcgaccaccactacgaccgccgtcgccgccatcttacttctccaaaacaaccgccgaaaccgcgctaacgaccaacgaccgcaacaaaatacgctccgcgcgcgaactacgcgaccgacgcaaccaaaaccccgccccgacgcgcaacgcgctaaccctaccccctaacgtcgaaaaacgaaacataaaaacctcgaaattaacgctaaacaccgaaccttaaaaaacgccgaaccactaaacgccgaaacttaaaatcgacgctaaaaacgaaactacgaaacgcgaataaacacgcaaaaaacgaaacgtcgacgaaacctccaaccgacaacccgttaactaccgtcgcctaaaacgcgaactttaaaaccgacgaacgataaaaaaaaaacgccctcgcgtataaaaaacgaactccgcctaaactccaccgcccacgaccgcatcccatcgccgcacaaaatcgccgaaatcatattatcgacgtaattaaaacccactaacctaaaaccgaacgaactacgataaaaaaaccccgaaaccgaacctacaacccctacaaccccgaaaaaacgccgaaaaaaaaactcccgaaaaatcgcgaaaaacgaaaaaccctacaaattatcacccgaaaataacgttctaaaa

SEQ ID NO: 29259 - DNA, 1025 bp, Artificial Sequence
  chemically treated genomic DNA (Homo sapiens) CpG-island No: 29259
ttagggtttagttgcgggtcgttcgtgtggtttttaagtttcgcggtttcgtttttacggaatgaggtaggggacgggttaggtatttttagttcgcggtgtttttcgggattatacgaacgaacgagtcgattttttttgtggggcgggtaggacggaggttatgtcgggcgcgtttttagtgttcgtcggtttcggtttttcgttagggaggcggttttttcgtcgcgatcgttgtgacgttcgttgtttacgtaagttttgcggattcgttaggttcggttttagttttcggttttattttgatgcggtttaggatttcgttgttttttagcgtttgtattagtaggtttcgtagtttcgtgtttttttcggttattattgcggtcgtcgtcgtcgttattttgtttttttaagataatcgtcgaagtcgcgttaacggttaacggtcgtagtagggtacgtttcgcgcgcgggttacgcggtcgacgtagttaaagtttcgtttcgacgcgtagcgcgttggttttgttttttggcgtcgggaggcggggtatagagatttcggggttgacgttggatatcgagttttggggagcgtcggattattgagcgtcgaaatttagggtcggcgttgggggcggggttgcggggcgcgggtgggtacgtaaggggcggggcgtcggcggggtttttagtcggtaattcgttggttgtcgtcgtttgaggcgcgagttttgaagtcggcgagcggtgaggaggaggcgttttcgcgtgtggagagcggatttcgtttggattttatcgtttacggtcgtattttatcgtcgtataagatcgtcggagttatattatcgacgtagttaaagtttattagtttaaagtcgggcggattgcggtaaggaggtttcgagatcgaatttgtagtttttgtagtttcgggggggcgtcggggaagggattttcgagaggtcgcgaggggcggaaggttttgtaggttgttattcggaaataacgttttgagg

SEQ ID NO: 29260 - DNA, 1025 bp, Artificial Sequence
  chemically treated genomic DNA (Homo sapiens) CpG-island No: 29260
cctcaaaacgttatttccgaataacaacctacaaaaccttccgcccctcgcgacctctcgaaaatcccttccccgacgcccccccgaaactacaaaaactacaaattcgatctcgaaacctccttaccgcaatccgcccgactttaaactaataaactttaactacgtcgataatataactccgacgatcttatacgacgataaaatacgaccgtaaacgataaaatccaaacgaaatccgctctccacacgcgaaaacgcctcctcctcaccgctcgccgacttcaaaactcgcgcctcaaacgacgacaaccaacgaattaccgactaaaaaccccgccgacgccccgccccttacgtacccacccgcgccccgcaaccccgcccccaacgccgaccctaaatttcgacgctcaataatccgacgctccccaaaactcgatatccaacgtcaaccccgaaatctctataccccgcctcccgacgccaaaaaacaaaaccaacgcgctacgcgtcgaaacgaaactttaactacgtcgaccgcgtaacccgcgcgcgaaacgtaccctactacgaccgttaaccgttaacgcgacttcgacgattatcttaaaaaaacaaaataacgacgacgacgaccgcaataataaccgaaaaaaacacgaaactacgaaacctactaatacaaacgctaaaaaacaacgaaatcctaaaccgcatcaaaataaaaccgaaaactaaaaccgaacctaacgaatccgcaaaacttacgtaaacaacgaacgtcacaacgatcgcgacgaaaaaaccgcctccctaacgaaaaaccgaaaccgacgaacactaaaaacgcgcccgacataacctccgtcctacccgccccacaaaaaaaatcgactcgttcgttcgtataatcccgaaaaacaccgcgaactaaaaatacctaacccgtcccctacctcattccgtaaaaacgaaaccgcgaaacttaaaaaccacacgaacgacccgcaactaaaccctaa

SEQ ID NO: 29261 - DNA, 742 bp, Artificial Sequence
  chemically treated genomic DNA (Homo sapiens) CpG-island No: 29261
cgttcgttatcgtaggaaattttcgattttatcgatagcgggaaagaggttttgagattggagaggaaattacggatttgtagggttcgtttcgttttttcgttaagttaagtggtgtttttaatttgtttcgatttgttttcgtgcgtttaggtcgtttgttcggtttagtagtggtaatggagtggttaggtacgcggtagttattgttttttaggtatgcgatggtttaggggttagacgttcggtgtagtattttcgttcggttcgttagcgtttttttttagtcgtaggtattgtttttgacgaaggcgaaggcgttagcgaattttcgcgggagtggttattttggcgtttttttttcgtcgggtcggggtttgtgttttcgttggtaggcgtaggatgcgtaggatggagcgcgtatgcgtattggtcgttagtcgaggacggaagtgggcgttcggaagttagacgtgttttttgggcgtgatttggtattgtcgcgtcgtagttgtcgtattcgtcgtattcgttgtaggcgcgaggttgggtgtaggtagttgtttgagtttcgaggtatcgacggacggatagacggacggattgattgacgatgtcgcgtttttataggttttcgtttatcgcgtagcgggttgttattgtcgtagtagtcgagtttaagtttgagggcgttgtggttatgatttttaagattttttttttttttgtagggtttatggtt

SEQ ID NO: 29262 - DNA, 742 bp, Artificial Sequence
  chemically treated genomic DNA (Homo sapiens) CpG-island No: 29262
aaccataaaccctacaaaaaaaaaaaaaatcttaaaaatcataaccacaacgccctcaaacttaaactcgactactacgacaataacaacccgctacgcgataaacgaaaacctataaaaacgcgacatcgtcaatcaatccgtccgtctatccgtccgtcgatacctcgaaactcaaacaactacctacacccaacctcgcgcctacaacgaatacgacgaatacgacaactacgacgcgacaataccaaatcacgcccaaaaaacacgtctaacttccgaacgcccacttccgtcctcgactaacgaccaatacgcatacgcgctccatcctacgcatcctacgcctaccaacgaaaacacaaaccccgacccgacgaaaaaaaaacgccaaaataaccactcccgcgaaaattcgctaacgccttcgccttcgtcaaaaacaatacctacgactaaaaaaaaacgctaacgaaccgaacgaaaatactacaccgaacgtctaacccctaaaccatcgcatacctaaaaaacaataactaccgcgtacctaaccactccattaccactactaaaccgaacaaacgacctaaacgcacgaaaacaaatcgaaacaaattaaaaacaccacttaacttaacgaaaaaacgaaacgaaccctacaaatccgtaatttcctctccaatctcaaaacctctttcccgctatcgataaaatcgaaaatttcctacgataacgaacg

SEQ ID NO: 29263 - DNA, 742 bp, Artificial Sequence
  chemically treated genomic DNA (Homo sapiens) CpG-island No: 29263
aattataagttttgtaaaaaggagaaaaattttgaaagttatagttataacgtttttagatttgggttcggttgttgcggtagtggtagttcgttgcgcggtaggcggaggtttgtgagagcgcggtatcgttagttagttcgttcgtttgttcgttcgtcgatgtttcgaggtttaaatagttgtttgtatttaatttcgcgtttgtagcgaatgcggcgaatgcggtaattgcgacgcggtagtgttaagttacgtttaggggatacgtttagttttcggacgtttattttcgttttcggttggcggttagtgcgtatgcgcgttttattttgcgtattttacgtttattaacgagggtatagatttcggttcggcgggggaggggcgttagggtggttattttcgcgagagttcgttggcgttttcgttttcgttagggatagtgtttgcggttggaggggggcgttggcgggtcgggcgagggtattgtatcgagcgtttggtttttaggttatcgtatgtttaagagatagtggttgtcgcgtgtttggttattttattattattgttggatcgggtaggcgatttgagcgtacggaagtaagtcgaagtaagttgggaatattatttggtttagcggagaggcgaggcgggttttgtaggttcgtggttttttttttagttttagagtttttttttcgttgtcgatagagtcgggggttttttgcgataacgggcg

SEQ ID NO: 29264 - DNA, 742 bp, Artificial Sequence
  chemically treated genomic DNA (Homo sapiens) CpG-island No: 29264
cgcccgttatcgcaaaaaacccccgactctatcgacaacgaaaaaaaaactctaaaactaaaaaaaaaaccacgaacctacaaaacccgcctcgcctctccgctaaaccaaataatattcccaacttacttcgacttacttccgtacgctcaaatcgcctacccgatccaacaataataataaaataaccaaacacgcgacaaccactatctcttaaacatacgataacctaaaaaccaaacgctcgatacaataccctcgcccgacccgccaacgcccccctccaaccgcaaacactatccctaacgaaaacgaaaacgccaacgaactctcgcgaaaataaccaccctaacgcccctcccccgccgaaccgaaatctataccctcgttaataaacgtaaaatacgcaaaataaaacgcgcatacgcactaaccgccaaccgaaaacgaaaataaacgtccgaaaactaaacgtatcccctaaacgtaacttaacactaccgcgtcgcaattaccgcattcgccgcattcgctacaaacgcgaaattaaatacaaacaactatttaaacctcgaaacatcgacgaacgaacaaacgaacgaactaactaacgataccgcgctctcacaaacctccgcctaccgcgcaacgaactaccactaccgcaacaaccgaacccaaatctaaaaacgttataactataactttcaaaatttttctcctttttacaaaacttataatt

SEQ ID NO: 29265 - DNA, 743 bp, Artificial Sequence
  chemically treated genomic DNA (Homo sapiens) CpG-island No: 29265
gcgagttttcgagatggtatcgcgtgggggtcgcgcggcggggttttgtttcggggttcggtaaattcggttgttcgttcggttcgtttttcggcgtcgttatttatcgaagaatttttgtacgatttttagcgggtggttgagttaattttttttatacggtatttcgttaggggtcggggtcggcgaagatcgggcggaggcgattcgcgggtcgagcgcggtcgggcggtcggcgtttagtttttttttagcggttcggtcgtttttcgttcgcgttcgttcgcgtttttttacgtatagcgagtcgcggggcgcgggtttttcgcgttttagggagcggcggttgcggtggggtcgtcgaggagttgttggcgatagttaggcgggcgcgtacgggtttttagtttttatttcgtataatggcgggaaatagtcgtcgtcgatcgcgttgtttgcgatttgggtggagttcgcgtggggaggggcggcgggagcgcgcggcgtagcgcggttttgcgcggcgaggaggaggggcggcggcggcgtcgttattttggagacgggtaaaaggaagggtacgtagcgtcgttggaggttgcgtagcgcggggttcggcgacgcgttttaagggcggcgcgttgtcgtttgtatttttgggtcggcgtgtagcgggaatttttatagtgggtttataagagggtaaagcgagtttgtataatagttgaaaagtattaagttta

SEQ ID NO: 29266 - DNA, 743 bp, Artificial Sequence
  chemically treated genomic DNA (Homo sapiens) CpG-island No: 29266
taaacttaatacttttcaactattatacaaactcgctttaccctcttataaacccactataaaaattcccgctacacgccgacccaaaaatacaaacgacaacgcgccgcccttaaaacgcgtcgccgaaccccgcgctacgcaacctccaacgacgctacgtacccttccttttacccgtctccaaaataacgacgccgccgccgcccctcctcctcgccgcgcaaaaccgcgctacgccgcgcgctcccgccgcccctccccacgcgaactccacccaaatcgcaaacaacgcgatcgacgacgactatttcccgccattatacgaaataaaaactaaaaacccgtacgcgcccgcctaactatcgccaacaactcctcgacgaccccaccgcaaccgccgctccctaaaacgcgaaaaacccgcgccccgcgactcgctatacgtaaaaaaacgcgaacgaacgcgaacgaaaaacgaccgaaccgctaaaaaaaaactaaacgccgaccgcccgaccgcgctcgacccgcgaatcgcctccgcccgatcttcgccgaccccgacccctaacgaaataccgtataaaaaaaattaactcaaccacccgctaaaaatcgtacaaaaattcttcgataaataacgacgccgaaaaacgaaccgaacgaacaaccgaatttaccgaaccccgaaacaaaaccccgccgcgcgacccccacgcgataccatctcgaaaactcgc

SEQ ID NO: 29267 - DNA, 743 bp, Artificial Sequence
  chemically treated genomic DNA (Homo sapiens) CpG-island No: 29267
tgagtttaatgttttttagttgttgtgtagattcgttttgtttttttataagtttattatgggagttttcgttatacgtcggtttaggggtataaacgataacgcgtcgtttttggagcgcgtcgtcgggtttcgcgttgcgtagtttttagcggcgttgcgtgtttttttttttgttcgtttttaaaatggcggcgtcgtcgtcgtttttttttttcgtcgcgtagagtcgcgttgcgtcgcgcgttttcgtcgtttttttttacgcgagttttatttaggtcgtaggtagcgcggtcggcggcggttatttttcgttattgtgcgaagtgaaggttaggggttcgtacgcgttcgtttgattgtcgttagtagtttttcggcggttttatcgtagtcgtcgttttttgaggcgcgggaggttcgcgtttcgcggttcgttgtgcgtgggagggcgcgagcgaacgcgggcgaggagcggtcgagtcgttgaagaggagttgggcgtcggtcgttcggtcgcgttcggttcgcggatcgttttcgttcggttttcgtcggtttcggtttttggcgagatgtcgtgtggggaggattggtttagttattcgttgggaatcgtgtagggatttttcggtgagtggcggcgtcggggggcgggtcgggcgggtagtcgagtttgtcgggtttcggggtagggtttcgtcgcgcggtttttacgcggtattatttcgagggttcgt

SEQ ID NO: 29268 - DNA, 743 bp, Artificial Sequence
  chemically treated genomic DNA (Homo sapiens) CpG-island No: 29268
acgaaccctcgaaataataccgcgtaaaaaccgcgcgacgaaaccctaccccgaaacccgacaaactcgactacccgcccgacccgccccccgacgccgccactcaccgaaaaatccctacacgattcccaacgaataactaaaccaatcctccccacacgacatctcgccaaaaaccgaaaccgacgaaaaccgaacgaaaacgatccgcgaaccgaacgcgaccgaacgaccgacgcccaactcctcttcaacgactcgaccgctcctcgcccgcgttcgctcgcgccctcccacgcacaacgaaccgcgaaacgcgaacctcccgcgcctcaaaaaacgacgactacgataaaaccgccgaaaaactactaacgacaatcaaacgaacgcgtacgaacccctaaccttcacttcgcacaataacgaaaaataaccgccgccgaccgcgctacctacgacctaaataaaactcgcgtaaaaaaaaacgacgaaaacgcgcgacgcaacgcgactctacgcgacgaaaaaaaaaaacgacgacgacgccgccattttaaaaacgaacaaaaaaaaaaacacgcaacgccgctaaaaactacgcaacgcgaaacccgacgacgcgctccaaaaacgacgcgttatcgtttatacccctaaaccgacgtataacgaaaactcccataataaacttataaaaaaacaaaacgaatctacacaacaactaaaaaacattaaactca

SEQ ID NO: 29269 - DNA, 837 bp, Artificial Sequence
  chemically treated genomic DNA (Homo sapiens) CpG-island No: 29269
tagcgggtcgagtcgtggttcgttaatttcgttgttttcgcgtattcggcgtttgtaggtcgttttcggggttatcgggtcgttgagcgacgggcgtcgggaggtttttgcgttttttttgcgatttttttcggtcgttcgcgtcggttttgtggttcgaggtttcggttgggtttttgtcgtcgcggggatcggtttcggtcgtcgtcgtcgtttcgtcgcgttttttgcgttgtagttgttgttggcgtcggcgttcggtttcgcgtaggatgtcgaacgggttcgattcgtcgtttagtagttgatggaagcggttggttattacgtagtcgaaatttttttgtatcgcggcgttagcggtagttacgggattttttagagcgttttttatgtcgtcgcgattattgcgggttcgggagggtagtttacgcgagcgcgttttagcgaagtcggcggttaggatttatgtcgttcgtttcgtcgttatcgtttttcgggttttattttgttcggtttttatcggcgttcgttttcgcggcgtcgtcgtcgttcgtttcgttgcgttagatagttagttagcgcgcgcgggtgcgtttttttttcgatacggcgcgtttggagatttaattatcgatcggttgttgttacgttacgcgatttttgggtttcgtttcgttcgtttagtagggaggggcggggtttaggggcggagttattggttggtttaggcggcgtcgacgaagcggtggggtttcggttgtgtgtgttttttttcgggattgcgatcgtatttgttatgggttattttgttttgaagtttatgtatatatttag

SEQ ID NO: 29270 - DNA, 837 bp, Artificial Sequence
  chemically treated genomic DNA (Homo sapiens) CpG-island No: 29270
ctaaatatatacataaacttcaaaacaaaataacccataacaaatacgatcgcaatcccgaaaaaaaacacacacaaccgaaaccccaccgcttcgtcgacgccgcctaaaccaaccaataactccgcccctaaaccccgcccctccctactaaacgaacgaaacgaaacccaaaaatcgcgtaacgtaacaacaaccgatcgataattaaatctccaaacgcgccgtatcgaaaaaaaaacgcacccgcgcgcgctaactaactatctaacgcaacgaaacgaacgacgacgacgccgcgaaaacgaacgccgataaaaaccgaacaaaataaaacccgaaaaacgataacgacgaaacgaacgacataaatcctaaccgccgacttcgctaaaacgcgctcgcgtaaactaccctcccgaacccgcaataatcgcgacgacataaaaaacgctctaaaaaatcccgtaactaccgctaacgccgcgatacaaaaaaatttcgactacgtaataaccaaccgcttccatcaactactaaacgacgaatcgaacccgttcgacatcctacgcgaaaccgaacgccgacgccaacaacaactacaacgcaaaaaacgcgacgaaacgacgacgacgaccgaaaccgatccccgcgacgacaaaaacccaaccgaaacctcgaaccacaaaaccgacgcgaacgaccgaaaaaaatcgcaaaaaaaacgcaaaaacctcccgacgcccgtcgctcaacgacccgataaccccgaaaacgacctacaaacgccgaatacgcgaaaacaacgaaattaacgaaccacgactcgacccgcta

SEQ ID NO: 29271 - DNA, 837 bp, Artificial Sequence
  chemically treated genomic DNA (Homo sapiens) CpG-island No: 29271
ttaaatgtatatataagttttaaagtagagtggtttatagtaaatacggtcgtagtttcgggagaaagtatatatagtcgagattttatcgtttcgtcggcgtcgtttggattagttagtagtttcgtttttgggtttcgtttttttttgttgagcgaacggggcggggtttagaggtcgcgtgacgtgatagtagtcggtcggtgattgggtttttaggcgcgtcgtgtcggaaagggggcgtattcgcgcgcgttgattggttgtttggcgtagcggggcggacggcggcggcgtcgcgggggcgggcgtcggtaggggtcggatagggtagggttcggagggcggtggcggcggagcgggcggtatgggttttggtcgtcggtttcgttgagacgcgttcgcgtgggttgttttttcgggttcgtagtggtcgcggcggtatgaagggcgttttggggagtttcgtggttgtcgttggcgtcgcgatgtaggagagtttcggttgcgtggtggttaatcgtttttattagttgttggacgacgagtcggattcgttcgatattttgcgcgaggtcgagcgtcggcgttagtagtagttgtagcgtaagaggcgcgacgaggcggcggcggcggtcggggtcggttttcgcggcggtaggagtttagtcggggtttcgggttatagagtcggcgcgggcggtcggagggagtcgtagaaggagcgtaagagtttttcggcgttcgtcgtttagcggttcgatagtttcgggggcggtttgtaggcgtcgggtacgcggggatagcggggttagcggattacggttcggttcgttg

SEQ ID NO: 29272 - DNA, 837 bp, Artificial Sequence
  chemically treated genomic DNA (Homo sapiens) CpG-island No: 29272
caacgaaccgaaccgtaatccgctaaccccgctatccccgcgtacccgacgcctacaaaccgcccccgaaactatcgaaccgctaaacgacgaacgccgaaaaactcttacgctccttctacgactccctccgaccgcccgcgccgactctataacccgaaaccccgactaaactcctaccgccgcgaaaaccgaccccgaccgccgccgccgcctcgtcgcgcctcttacgctacaactactactaacgccgacgctcgacctcgcgcaaaatatcgaacgaatccgactcgtcgtccaacaactaataaaaacgattaaccaccacgcaaccgaaactctcctacatcgcgacgccaacgacaaccacgaaactccccaaaacgcccttcataccgccgcgaccactacgaacccgaaaaaacaacccacgcgaacgcgtctcaacgaaaccgacgaccaaaacccataccgcccgctccgccgccaccgccctccgaaccctaccctatccgacccctaccgacgcccgcccccgcgacgccgccgccgtccgccccgctacgccaaacaaccaatcaacgcgcgcgaatacgccccctttccgacacgacgcgcctaaaaacccaatcaccgaccgactactatcacgtcacgcgacctctaaaccccgccccgttcgctcaacaaaaaaaaacgaaacccaaaaacgaaactactaactaatccaaacgacgccgacgaaacgataaaatctcgactatatatactttctcccgaaactacgaccgtatttactataaaccactctactttaaaacttatatatacatttaa

SEQ ID NO: 29273 - DNA, 1795 bp, Artificial Sequence
  chemically treated genomic DNA (Homo sapiens) CpG-island No: 29273
cggaattcgattaagaaattaggtacgtcgggtgtttattaggatttcgggtagtagagattttagtcgtcgggcgggtggtgggatcgagggcggggcgggcggcggggttttagttttttaaattttttgcgcgcgggaatcgcggtttaataattaacggcgggcggggtcgagcggggcgcgcgtttttatcgtttaacgattattatttttttcgatttcgtttcgtcgttgtttaattagtcgtttttttgtcgtttttttcgtcgtttttgtttttttggttcggattaattacgcggagggacggcggggcggggcggtaggcgggtgtgttcgggcgagtggagacgtcgcgcgttttattggagtttcgaacgttgttggttttttagatagaaaaaaatataagagcggcggttaatggcgaggtgggaaggattcgcgcgtagattcggtttcgtttcggtcggttggaaagaaggttaggtttggttattggttcgcgtcgtttgttattcgtcggtgcggttagcgggtagcggtttcgcggtgattggtttcgtttaggcgcgaaatgtaacgcgggaaaagtcggggtaggtatcgcggcggtaggttgttatttttgggggtttagcgtcgcgcgttttgtttttttgttatcgtaagggtcgggtcgttcgttgttttttatttttgtagtttgcgttgcggagtataaagagcggagggcgcgtttgatttggggttggggtttagttttgttcgtcggtgtcgtttgtttaattagttaggtggttgttgcgtaggatttcgggaaacgttagtttgttatgagtcggtaggattgagtttgcgattcggagtagagcgagtgaggggtagagcggtgtttaggagtgcggttcggggtcgtcggagttgggggtcgggtcgggcgatgattcggggtttcgaggcgtttatggcggagaattcgtcgtcgtcgtcgtcgttcgttattttttgttacgatttttcgaagcgggtgttggtgtcggttattaggacgatttcgattaagttaacgtgcggcggtggaggggagtcggagtcgtcgtcgtcgtttatttttattagtttcggttttagcgattttatggtgtattcgtggcgttggggcgagaacgtatataacgtgacgtttagttttggggtcgcgggggtcgtcgtttcggtcgttttgtttgtagtcgtagtcgtcgagtattcggggtttcgtggtcggggcgcgttttcgttcgtcgtttcggttttcgtcgtcgtttcgggaggtgaggacgaggaggaagcgagtagtttagatagcggttattttaaggtgagcggcgcgggcgggcgggcgggcgggacgtggggtagtcggggttcgttaacggtgcggcgggcggggcggagttgaaaacgcgaggtcgattcggttacggcgggggttgcggttgataggatgttgacgttattgtcgcgcgttaaaaatcggttttagtcggggggggtttgttacgtgataggcgggagcggcgcgggagatcgtttttgcggtaggtgtagtgggcgggagcgcggttcggggtcgttggggaggtcgggttaacggttattgatattttttcggcgggttgtcgagtttttagtttcgagaggaaacgagagggatgagggttttgagttgttttatcgattgcgagagggtagggagcgtatagtgtttgttttattattgtagatcgttttcgttttgttaaaagat

SEQ ID NO: 29274 - DNA, 1795 bp, Artificial Sequence
  chemically treated genomic DNA (Homo sapiens) CpG-island No: 29274
atcttttaacaaaacgaaaacgatctacaataataaaacaaacactatacgctccctaccctctcgcaatcgataaaacaactcaaaaccctcatccctctcgtttcctctcgaaactaaaaactcgacaacccgccgaaaaaatatcaataaccgttaacccgacctccccaacgaccccgaaccgcgctcccgcccactacacctaccgcaaaaacgatctcccgcgccgctcccgcctatcacgtaacaaaccccccccgactaaaaccgatttttaacgcgcgacaataacgtcaacatcctatcaaccgcaacccccgccgtaaccgaatcgacctcgcgttttcaactccgccccgcccgccgcaccgttaacgaaccccgactaccccacgtcccgcccgcccgcccgcccgcgccgctcaccttaaaataaccgctatctaaactactcgcttcctcctcgtcctcacctcccgaaacgacgacgaaaaccgaaacgacgaacgaaaacgcgccccgaccacgaaaccccgaatactcgacgactacgactacaaacaaaacgaccgaaacgacgacccccgcgaccccaaaactaaacgtcacgttatatacgttctcgccccaacgccacgaatacaccataaaatcgctaaaaccgaaactaataaaaataaacgacgacgacgactccgactcccctccaccgccgcacgttaacttaatcgaaatcgtcctaataaccgacaccaacacccgcttcgaaaaatcgtaacaaaaaataacgaacgacgacgacgacgacgaattctccgccataaacgcctcgaaaccccgaatcatcgcccgacccgacccccaactccgacgaccccgaaccgcactcctaaacaccgctctacccctcactcgctctactccgaatcgcaaactcaatcctaccgactcataacaaactaacgtttcccgaaatcctacgcaacaaccacctaactaattaaacaaacgacaccgacgaacaaaactaaaccccaaccccaaatcaaacgcgccctccgctctttatactccgcaacgcaaactacaaaaataaaaaacaacgaacgacccgacccttacgataacaaaaaaacaaaacgcgcgacgctaaacccccaaaaataacaacctaccgccgcgatacctaccccgacttttcccgcgttacatttcgcgcctaaacgaaaccaatcaccgcgaaaccgctacccgctaaccgcaccgacgaataacaaacgacgcgaaccaataaccaaacctaaccttctttccaaccgaccgaaacgaaaccgaatctacgcgcgaatccttcccacctcgccattaaccgccgctcttatatttttttctatctaaaaaaccaacaacgttcgaaactccaataaaacgcgcgacgtctccactcgcccgaacacacccgcctaccgccccgccccgccgtccctccgcgtaattaatccgaaccaaaaaaacaaaaacgacgaaaaaaacgacaaaaaaacgactaattaaacaacgacgaaacgaaatcgaaaaaaataataatcgttaaacgataaaaacgcgcgccccgctcgaccccgcccgccgttaattattaaaccgcgattcccgcgcgcaaaaaatttaaaaaactaaaaccccgccgcccgccccgccctcgatcccaccacccgcccgacgactaaaatctctactacccgaaatcctaataaacacccgacgtacctaatttcttaatcgaattccg

SEQ ID NO: 29275 - DNA, 1795 bp, Artificial Sequence
  chemically treated genomic DNA (Homo sapiens) CpG-island No: 29275
attttttaatagggcgagggcgatttgtagtaatggagtaaatattgtgcgttttttgttttttcgtagtcggtggaataatttaaggtttttatttttttcgttttttttcggaattgaggattcggtagttcgtcgggaggatgttagtggtcgttgattcggtttttttagcgatttcgggtcgcgttttcgtttattgtatttgtcgtaaggacggtttttcgcgtcgttttcgtttgttacgtgataggtttttttcgattggggtcggtttttggcgcgcggtagtgacgttagtattttgttagtcgtagttttcgtcgtagtcggatcgatttcgcgtttttaatttcgtttcgttcgtcgtatcgttaacgggtttcggttgttttacgtttcgttcgttcgttcgttcgcgtcgtttattttgaggtggtcgttgtttgggttgttcgtttttttttcgtttttatttttcgaggcggcggcggaggtcgaggcggcgggcgggggcgcgtttcggttacgaagtttcgagtgttcggcggttgcggttgtaggtagggcggtcgaggcggcggttttcgcggttttagggttgagcgttacgttgtgtgcgttttcgttttagcgttacgggtatattatgaagtcgttgaagtcggggttggtggggatgagcggcggcggcggtttcggtttttttttatcgtcgtacgttggtttgatcggggtcgttttgatgatcgatattagtattcgtttcggggagtcgtggtagaagatgacgggcggcggcggcggcggcgggtttttcgttatgggcgtttcgaagtttcggattatcgttcggttcgatttttagtttcggcggtttcgggtcgtatttttgagtatcgttttgttttttattcgttttgtttcgagtcgtaggtttagttttgtcggtttatggtagattgacgtttttcggaattttgcgtagtagttatttaattagttgagtagacggtatcggcgggtagggttggattttagttttaggttaagcgcgtttttcgttttttgtatttcgtagcgtaggttgtaggggtgggaagtagcgggcggttcggtttttgcggtgataggaaagtaggacgcgcggcgttgagtttttaaaaataataatttgtcgtcgcggtgtttgtttcggtttttttcgcgttatatttcgcgtttgggcggaattagttatcgcgaggtcgttgttcgttggtcgtatcggcgagtgataggcggcgcgagttaatggttaggtttggttttttttttagtcggtcggggcggggtcgggtttgcgcgcgggttttttttatttcgttattggtcgtcgtttttatatttttttttgtttggagggttaatagcgttcgaaattttagtggagcgcgcggcgtttttattcgttcggatatattcgtttgtcgtttcgtttcgtcgttttttcgcgtggttagttcgggttagggagataagggcggcggggagggcggtaagagggcggttgattggatagcggcggggcggggtcggggggggtggtgatcgttgggcggtggaggcgcgcgtttcgttcggtttcgttcgtcgttggttgttgggtcgcggttttcgcgcgtagggagtttaaagggttggggtttcgtcgttcgtttcgttttcggttttattattcgttcggcggttggagtttttgttgttcgaggttttgatgggtattcggcgtgtttggttttttaatcgagtttcg

SEQ ID NO: 29276 - DNA, 1795 bp, Artificial Sequence
  chemically treated genomic DNA (Homo sapiens) CpG-island No: 29276
cgaaactcgattaaaaaaccaaacacgccgaatacccatcaaaacctcgaacaacaaaaactccaaccgccgaacgaataataaaaccgaaaacgaaacgaacgacgaaaccccaaccctttaaactccctacgcgcgaaaaccgcgacccaacaaccaacgacgaacgaaaccgaacgaaacgcgcgcctccaccgcccaacgatcaccaccccccccgaccccgccccgccgctatccaatcaaccgccctcttaccgccctccccgccgcccttatctccctaacccgaactaaccacgcgaaaaaacgacgaaacgaaacgacaaacgaatatatccgaacgaataaaaacgccgcgcgctccactaaaatttcgaacgctattaaccctccaaacaaaaaaaaatataaaaacgacgaccaataacgaaataaaaaaaacccgcgcgcaaacccgaccccgccccgaccgactaaaaaaaaaaccaaacctaaccattaactcgcgccgcctatcactcgccgatacgaccaacgaacaacgacctcgcgataactaattccgcccaaacgcgaaatataacgcgaaaaaaaccgaaacaaacaccgcgacgacaaattattatttttaaaaactcaacgccgcgcgtcctactttcctatcaccgcaaaaaccgaaccgcccgctacttcccacccctacaacctacgctacgaaatacaaaaaacgaaaaacgcgcttaacctaaaactaaaatccaaccctacccgccgataccgtctactcaactaattaaataactactacgcaaaattccgaaaaacgtcaatctaccataaaccgacaaaactaaacctacgactcgaaacaaaacgaataaaaaacaaaacgatactcaaaaatacgacccgaaaccgccgaaactaaaaatcgaaccgaacgataatccgaaacttcgaaacgcccataacgaaaaacccgccgccgccgccgccgcccgtcatcttctaccacgactccccgaaacgaatactaatatcgatcatcaaaacgaccccgatcaaaccaacgtacgacgataaaaaaaaaccgaaaccgccgccgccgctcatccccaccaaccccgacttcaacgacttcataatatacccgtaacgctaaaacgaaaacgcacacaacgtaacgctcaaccctaaaaccgcgaaaaccgccgcctcgaccgccctacctacaaccgcaaccgccgaacactcgaaacttcgtaaccgaaacgcgcccccgcccgccgcctcgacctccgccgccgcctcgaaaaataaaaacgaaaaaaaaacgaacaacccaaacaacgaccacctcaaaataaacgacgcgaacgaacgaacgaacgaaacgtaaaacaaccgaaacccgttaacgatacgacgaacgaaacgaaattaaaaacgcgaaatcgatccgactacgacgaaaactacgactaacaaaatactaacgtcactaccgcgcgccaaaaaccgaccccaatcgaaaaaaacctatcacgtaacaaacgaaaacgacgcgaaaaaccgtccttacgacaaatacaataaacgaaaacgcgacccgaaatcgctaaaaaaaccgaatcaacgaccactaacatcctcccgacgaactaccgaatcctcaattccgaaaaaaaacgaaaaaaataaaaaccttaaattattccaccgactacgaaaaaacaaaaaacgcacaatatttactccattactacaaatcgccctcgccctattaaaaaat

SEQ ID NO: 29277 - DNA, 595 bp, Artificial Sequence
  chemically treated genomic DNA (Homo sapiens) CpG-island No: 29277
ggcgtcgcgtttcgttcggttcgcgtcgttttttttgcggttcgggtttttagcggtaggcgggcgagcgcgtttatcggatcgatcggacgtcgggttcgataggcggcgacgatttttagcgcgcgcgttcgattagtcgatttgaggagagacgatcggaattattttgaggcgttgtcgtagatatcgttttaaagataggaagaggttatgtttgcgtcgcgtagagtgtttatttatagagttggagtttttatatggaggttacggcgttaagtcggatttcgcgagatttacgtcgggtttcgttttaaagaggaagcggttcgggagagggttatagattcgagggaacgaaaatgggtaggcgcggagagggcgggtcggaggggcggggttattaaaagtcgttatttgttttatcgtttgtatttggttattgggtacgttttttagtttttgggtttcggaagattgcgcggttattatatcggttgtcgttttgaggtttcgttttagagttgagggggcgggtgtttttttaggtttagcggatatggttttttggttttaaaaatatattaaaaataag

SEQ ID NO: 29278 - DNA, 595 bp, Artificial Sequence
  chemically treated genomic DNA (Homo sapiens) CpG-island No: 29278
cttatttttaatatatttttaaaaccaaaaaaccatatccgctaaacctaaaaaaacacccgccccctcaactctaaaacgaaacctcaaaacgacaaccgatataataaccgcgcaatcttccgaaacccaaaaactaaaaaacgtacccaataaccaaatacaaacgataaaacaaataacgacttttaataaccccgcccctccgacccgccctctccgcgcctacccattttcgttccctcgaatctataaccctctcccgaaccgcttcctctttaaaacgaaacccgacgtaaatctcgcgaaatccgacttaacgccgtaacctccatataaaaactccaactctataaataaacactctacgcgacgcaaacataacctcttcctatctttaaaacgatatctacgacaacgcctcaaaataattccgatcgtctctcctcaaatcgactaatcgaacgcgcgcgctaaaaatcgtcgccgcctatcgaacccgacgtccgatcgatccgataaacgcgctcgcccgcctaccgctaaaaacccgaaccgcaaaaaaaacgacgcgaaccgaacgaaacgcgacgcc

SEQ ID NO: 29279 - DNA, 595 bp, Artificial Sequence
  chemically treated genomic DNA (Homo sapiens) CpG-island No: 29279
tttatttttggtgtgtttttgagattaaagaattatattcgttaagtttgaggaggtattcgtttttttagttttgaaacgaggttttaaaacggtaatcgatgtggtagtcgcgtaatttttcgaaatttaaaggttagagggcgtgtttagtggttaggtgtaggcggtggggtaagtaacggtttttggtagtttcgttttttcgattcgtttttttcgcgtttgtttattttcgttttttcgggtttgtaattttttttcgggtcgttttttttttaaggcggagttcggcgtggatttcgcgagattcggtttggcgtcgtgatttttatgtgggagttttagttttataagtaaatattttgcgcggcgtagatatggtttttttttatttttgaggcggtgtttgcggtagcgttttagagtggtttcggtcgtttttttttaagtcggttagtcgggcgcgcgcgttgagagtcgtcgtcgtttgtcgggttcggcgttcggtcggttcggtgggcgcgttcgttcgtttgtcgttgagggttcgagtcgtagggaaagcggcgcgggtcgggcggggcgcggcgtt

SEQ ID NO: 29280 - DNA, 595 bp, Artificial Sequence
  chemically treated genomic DNA (Homo sapiens) CpG-island No: 29280
aacgccgcgccccgcccgacccgcgccgctttccctacgactcgaaccctcaacgacaaacgaacgaacgcgcccaccgaaccgaccgaacgccgaacccgacaaacgacgacgactctcaacgcgcgcgcccgactaaccgacttaaaaaaaaacgaccgaaaccactctaaaacgctaccgcaaacaccgcctcaaaaataaaaaaaaaccatatctacgccgcgcaaaatatttacttataaaactaaaactcccacataaaaatcacgacgccaaaccgaatctcgcgaaatccacgccgaactccgccttaaaaaaaaaacgacccgaaaaaaaattacaaacccgaaaaaacgaaaataaacaaacgcgaaaaaaacgaatcgaaaaaacgaaactaccaaaaaccgttacttaccccaccgcctacacctaaccactaaacacgccctctaacctttaaatttcgaaaaattacgcgactaccacatcgattaccgttttaaaacctcgtttcaaaactaaaaaaacgaatacctcctcaaacttaacgaatataattctttaatctcaaaaacacaccaaaaataaa

SEQ ID NO: 29281 - DNA, 593 bp, Artificial Sequence
  chemically treated genomic DNA (Homo sapiens) CpG-island No: 29281
atcgtggattttattttcggagtcgtcgttggaggggttagtcgcgaggtagatagcggatcgtcgggcggggcgggacgtagtgggcggggcggaggggcggggttaaaagttttttgtttaattttcgttgtttttttttatcgtttgcgcgcgtcggggtcgtagtcggggggaggcggcggtagcggtagcggttgcgggtagcgcgcggggcgtagggcgcggggcgattatcgtcggggttcgggaggcgggtagtgggtataggtttttcggtgttcgttttttcgttgcggaggggggtcgcgagcgggcggtcggggaggggtcggtatcgtcgttataaaatgagtttgttgtcggttatcgatacgagcgtcgtttcggtgtattagttcgtttagttgtttaattgggtttatttgtcgttgtaggatacgtattaggttagcgttttcgatgtttttcggttcgagtcgatcgtcggcgtcgtattttcggagttggttttcggtaagggtcgtttcgagtagttgggttcgtttttgtattttagttattttaatagttttttttagttgtagcgcgga

SEQ ID NO: 29282 - DNA, 593 bp, Artificial Sequence
  chemically treated genomic DNA (Homo sapiens) CpG-island No: 29282
tccgcgctacaactaaaaaaaactattaaaataactaaaatacaaaaacgaacccaactactcgaaacgacccttaccgaaaaccaactccgaaaatacgacgccgacgatcgactcgaaccgaaaaacatcgaaaacgctaacctaatacgtatcctacaacgacaaataaacccaattaaacaactaaacgaactaatacaccgaaacgacgctcgtatcgataaccgacaacaaactcattttataacgacgataccgacccctccccgaccgcccgctcgcgacccccctccgcaacgaaaaaacgaacaccgaaaaacctatacccactacccgcctcccgaaccccgacgataatcgccccgcgccctacgccccgcgcgctacccgcaaccgctaccgctaccgccgcctccccccgactacgaccccgacgcgcgcaaacgataaaaaaaaacaacgaaaattaaacaaaaaacttttaaccccgcccctccgccccgcccactacgtcccgccccgcccgacgatccgctatctacctcgcgactaacccctccaacgacgactccgaaaataaaatccacgat

SEQ ID NO: 29283 - DNA, 593 bp, Artificial Sequence
  chemically treated genomic DNA (Homo sapiens) CpG-island No: 29283
ttcgcgttgtagttggaagaagttgttgagatagttggagtgtaggggcgagtttagttgttcggggcggtttttgtcgaaggttagtttcgggggtgcggcgtcggcggtcggttcgggtcggaaggtatcgaaggcgttagtttggtgcgtgttttgtagcgataggtagatttagttgagtagttgggcgggttggtatatcgaggcggcgttcgtgtcgatggtcgatagtaggtttattttgtggcggcggtgtcggttttttttcggtcgttcgttcgcggttttttttcgtagcggaggggcgggtatcggggagtttgtgtttattgttcgtttttcgagtttcgacggtgatcgtttcgcgttttgcgtttcgcgcgttgttcgtagtcgttgtcgttgtcgtcgttttttttcgattgcggtttcggcgcgcgtaggcggtggaaggaggtagcgaaagttgggtaggaaatttttggtttcgttttttcgtttcgtttattgcgtttcgtttcgttcggcgattcgttatttgtttcgcggttgatttttttagcggcggtttcgggggtggggtttacgat

SEQ ID NO: 29284 - DNA, 593 bp, Artificial Sequence
  chemically treated genomic DNA (Homo sapiens) CpG-island No: 29284
atcgtaaaccccacccccgaaaccgccgctaaaaaaatcaaccgcgaaacaaataacgaatcgccgaacgaaacgaaacgcaataaacgaaacgaaaaaacgaaaccaaaaatttcctacccaactttcgctacctccttccaccgcctacgcgcgccgaaaccgcaatcgaaaaaaaacgacgacaacgacaacgactacgaacaacgcgcgaaacgcaaaacgcgaaacgatcaccgtcgaaactcgaaaaacgaacaataaacacaaactccccgatacccgcccctccgctacgaaaaaaaaccgcgaacgaacgaccgaaaaaaaaccgacaccgccgccacaaaataaacctactatcgaccatcgacacgaacgccgcctcgatataccaacccgcccaactactcaactaaatctacctatcgctacaaaacacgcaccaaactaacgccttcgataccttccgacccgaaccgaccgccgacgccgcacccccgaaactaaccttcgacaaaaaccgccccgaacaactaaactcgcccctacactccaactatctcaacaacttcttccaactacaacgcgaa

SEQ ID NO: 29285 - DNA, 1327 bp, Artificial Sequence
  chemically treated genomic DNA (Homo sapiens) CpG-island No: 29285
ttttaaagcgtagatttaggtcggtttttagcgtggaattcgatttatgtatttcgtttttttacgtggtattagatgttttgtcggttgttatcgtgaattttagttttcgcggagtcgatattgatttggttattttagagttcggagggaaatagcgttttcgtattttcgttttatttgggttgtttttcggatcgtcgttcgttttagattttaggaggcgttattaggtttcgttgatttcgttttatattttcgggagtttttagttggtcggtcgcggcgatcggaagtttcggattgaggtattggtttcgttcgtcgtttttttagtcgagattcggtagcggcggtcggagcggttgttacgtcgtatttgttcgcgagggggcgcgttaggtttaggtcgtagtcgattgtcgcgttttttgttttcgtttttcgttattttcggattgcgtttatttgtttgggtcgttggtttgggaggcgggggtcggcgggagttaagtcgaggaaagggcggagcggtttttcgggcgcgttatcggagtattatggcggagttaggagttggcggcgacggttataggggcggcgacggcgtagtgcgaagcgaaataggtgatcgtatagcggggatagtgggggtttcgtcgggtaggggacggcgagcggggtcggcgggttggtatcgaaattattcggcgtcggtagtttttttttcgttcgcgcggtcgcggttcggaataatcggttttgcgcgtcgcgtattttgtttcgagagcgttttttttcgtttttcgtcgtcgcggttcggttagttcggttcggtttcggtcggggttgcggtcgttttcgggcgttttatcgcgattttttcgtaataggtggaggcgagtcgggggaggaaacggagagatttcggtcgttgtttttttcgtcgcggtttcgggtttaatttagttgaatgggaaatcgtattttttagattaaattagtggttagagagtcgtcggttaggtgcgattggtaggacgagtagtttttgggtattttttttcgttttttttggtcgtttcgggtgtcgggggttttttagcggggtcggtgtggggtaggatcgcggggtgagcggttcgttttttaatttggtgttcgtagtggcgacgatcgtcgttcgaggggatcgagttcgggagggtcggggtttagtgtagtacggtgggggtttgcgagtgcgggtttgacgggattagattttcgttgatttgtcggagtttttagagttttttgtttttagtttgtgtaggagtttaaagga

SEQ ID NO: 29286 - DNA, 1327 bp, Artificial Sequence
  chemically treated genomic DNA (Homo sapiens) CpG-island No: 29286
tcctttaaactcctacacaaactaaaaacaaaaaactctaaaaactccgacaaatcaacgaaaatctaatcccgtcaaacccgcactcgcaaacccccaccgtactacactaaaccccgaccctcccgaactcgatcccctcgaacgacgatcgtcgccactacgaacaccaaattaaaaaacgaaccgctcaccccgcgatcctaccccacaccgaccccgctaaaaaacccccgacacccgaaacgaccaaaaaaaacgaaaaaaaatacccaaaaactactcgtcctaccaatcgcacctaaccgacgactctctaaccactaatttaatctaaaaaatacgatttcccattcaactaaattaaacccgaaaccgcgacgaaaaaaacaacgaccgaaatctctccgtttcctcccccgactcgcctccacctattacgaaaaaatcgcgataaaacgcccgaaaacgaccgcaaccccgaccgaaaccgaaccgaactaaccgaaccgcgacgacgaaaaacgaaaaaaaacgctctcgaaacaaaatacgcgacgcgcaaaaccgattattccgaaccgcgaccgcgcgaacgaaaaaaaaactaccgacgccgaataatttcgataccaacccgccgaccccgctcgccgtcccctacccgacgaaacccccactatccccgctatacgatcacctatttcgcttcgcactacgccgtcgccgcccctataaccgtcgccgccaactcctaactccgccataatactccgataacgcgcccgaaaaaccgctccgccctttcctcgacttaactcccgccgacccccgcctcccaaaccaacgacccaaacaaataaacgcaatccgaaaataacgaaaaacgaaaacaaaaaacgcgacaatcgactacgacctaaacctaacgcgccccctcgcgaacaaatacgacgtaacaaccgctccgaccgccgctaccgaatctcgactaaaaaaacgacgaacgaaaccaatacctcaatccgaaacttccgatcgccgcgaccgaccaactaaaaactcccgaaaatataaaacgaaatcaacgaaacctaataacgcctcctaaaatctaaaacgaacgacgatccgaaaaacaacccaaataaaacgaaaatacgaaaacgctatttccctccgaactctaaaataaccaaatcaatatcgactccgcgaaaactaaaattcacgataacaaccgacaaaacatctaataccacgtaaaaaaacgaaatacataaatcgaattccacgctaaaaaccgacctaaatctacgctttaaaa

SEQ ID NO: 29287 - DNA, 1327 bp, Artificial Sequence
  chemically treated genomic DNA (Homo sapiens) CpG-island No: 29287
ttttttgggtttttgtatagattaaaaataaaaaattttgagaatttcgataagttaacgaaagtttgatttcgttaagttcgtattcgtaaatttttatcgtgttgtattgggtttcggttttttcgagttcggttttttcggacgacggtcgtcgttattgcgggtattagattggggggcgggtcgtttatttcgcggttttgttttatatcgatttcgttgaggagttttcggtattcggggcgattagggaaggcgggaggaggtgtttagaaattgttcgttttgttagtcgtatttggtcgacgattttttggttattggtttggtttgggggatacgattttttatttaattgaattagattcgaggtcgcggcggggagggtagcggtcggggttttttcgttttttttttcggttcgtttttatttgttgcgggaaagtcgcggtggagcgttcgagggcggtcgtaatttcggtcggggtcgagtcgggttggtcgagtcgcggcggcgaagggcgggggaaggcgttttcggagtagggtgcgcggcgcgtagggtcggttgtttcgggtcgcggtcgcgcgggcggggagggggttgtcggcgtcgggtgatttcggtgttagttcgtcggtttcgttcgtcgttttttgttcgacgggatttttattattttcgttgtgcggttatttgtttcgtttcgtattgcgtcgtcgtcgtttttgtggtcgtcgtcgttagtttttagtttcgttatggtgtttcgatgacgcgttcggagagtcgtttcgtttttttttcggtttggttttcgtcggttttcgttttttaggttagcggtttagataggtgagcgtagttcggggatggcggagggcggggatagagagcgcggtagtcggttgcggtttgggtttggcgcgttttttcgcgggtaggtgcggcgtggtagtcgtttcgatcgtcgttgtcgagtttcggttggaagagcggcgggcggaattagtattttagttcggagttttcggtcgtcgcggtcgattagttgagggttttcggagatatggagcggggttagcgaggtttggtggcgttttttggagtttgggacgagcggcggttcgaggagtagtttaggtggggcgagggtacggagacgttattttttttcgaattttgaagtagttaggttagtgtcggtttcgcgagggttggagtttacggtgatagtcggtagagtatttgatgttacgtggagaggcgaagtatatgggtcggattttacgttgggagtcggtttggatttgcgttttagga

SEQ ID NO: 29288 - DNA, 1327 bp, Artificial Sequence
  chemically treated genomic DNA (Homo sapiens) CpG-island No: 29288
tcctaaaacgcaaatccaaaccgactcccaacgtaaaatccgacccatatacttcgcctctccacgtaacatcaaatactctaccgactatcaccgtaaactccaaccctcgcgaaaccgacactaacctaactacttcaaaattcgaaaaaaaataacgtctccgtaccctcgccccacctaaactactcctcgaaccgccgctcgtcccaaactccaaaaaacgccaccaaacctcgctaaccccgctccatatctccgaaaaccctcaactaatcgaccgcgacgaccgaaaactccgaactaaaatactaattccgcccgccgctcttccaaccgaaactcgacaacgacgatcgaaacgactaccacgccgcacctacccgcgaaaaaacgcgccaaacccaaaccgcaaccgactaccgcgctctctatccccgccctccgccatccccgaactacgctcacctatctaaaccgctaacctaaaaaacgaaaaccgacgaaaaccaaaccgaaaaaaaaacgaaacgactctccgaacgcgtcatcgaaacaccataacgaaactaaaaactaacgacgacgaccacaaaaacgacgacgacgcaatacgaaacgaaacaaataaccgcacaacgaaaataataaaaatcccgtcgaacaaaaaacgacgaacgaaaccgacgaactaacaccgaaatcacccgacgccgacaaccccctccccgcccgcgcgaccgcgacccgaaacaaccgaccctacgcgccgcgcaccctactccgaaaacgccttcccccgcccttcgccgccgcgactcgaccaacccgactcgaccccgaccgaaattacgaccgccctcgaacgctccaccgcgactttcccgcaacaaataaaaacgaaccgaaaaaaaaaacgaaaaaaccccgaccgctaccctccccgccgcgacctcgaatctaattcaattaaataaaaaatcgtatcccccaaaccaaaccaataaccaaaaaatcgtcgaccaaatacgactaacaaaacgaacaatttctaaacacctcctcccgccttccctaatcgccccgaataccgaaaactcctcaacgaaatcgatataaaacaaaaccgcgaaataaacgacccgccccccaatctaatacccgcaataacgacgaccgtcgtccgaaaaaaccgaactcgaaaaaaccgaaacccaatacaacacgataaaaatttacgaatacgaacttaacgaaatcaaactttcgttaacttatcgaaattctcaaaattttttatttttaatctatacaaaaacccaaaaaa

SEQ ID NO: 29289 - DNA, 1377 bp, Artificial Sequence
  chemically treated genomic DNA (Homo sapiens) CpG-island No: 29289
cgtcgtcgcgggtgtggtgatttcgggttcgtcgtttatttggagcgtttcggcggcgtttggtttagaattatcggggcggatagttttttggagttgtacgcggattgcggaaggggatagtgagcgggatcggttcgtatttcgttcgcgggttcggatcgttggaagtattcgggtttttttttttttttgtttttcggtttcgttttttttttttcgcgttgcgcgtggcggtttcgggttgcgcgtttttgtaggaggagatcggtattgtcgtcggcggttttttttttaatcgttagtttcggtcgcgcgtttcgtttcgtttcgcggaggagggtgggggcgtttttcgcgtcgggttcgtttagttttttcgcggttgttcgggtcgggttttttattggtcggcgggcgggaggtgaggggcggtagggttcgtttttggcggttcgcgttcgggaaggtcggtagtcgagcgtcggaggtcgtggagagggcgggtagggaggcggcgggcgtcgaggagacgtagcggcggcggtggtggcggtggtggcggcggtggcggcggcggcgtttggtttcggtcgtagtttttgcgtttcgttcgttttgggtcgtttttgttagtttcgcgcgcggttcgtttttcgtcgcggttcgtagtttgcggcgttcgagtttcgagggcgttttttcgggcgttgggttcgaggcggttaagacggcgggtcggtcgggtacggggcggcgggcgttgtgttgcgggttgcgttggtggggggcggcgggtcgcggcgcgggtttagggttcggcgtgtgcggttgggaggtattgtgggggcgggcgcgcgggcggcggtcggggttatggtcgagggcggcgggggcgcgcggaggagggcgtcggcgttgttcgaggttgttcgcgcgcgttacgagagtttgtatatttcggacgacgtgttcggcgagttcggttcggatagcggcgggaattttttttatagtatttcggtcgtttcgcgttttttttcggtcgttttttcggacgacgagcgcgagttttcgggatttttaggggtcgtttcgttatcgtttcgcgtttcggacgtataggagtcggaggaggacgaggtcggcgcgggttggagcgtagcgttgcgggatcgttcgttttcgcgtttcgaggatatcggcggtaaggggttgttcgcgggtggatgtcgggggcggcgttggaatcgggcgcgggggaggcgtgggtgttggggcgggcgagtttagatttttcgtgggttggtttgtgggtgttttttcggaaataaatgaggttgtaggagcggtgatcggtttgattgtttttggggg

SEQ ID NO: 29290 - DNA, 1377 bp, Artificial Sequence
  chemically treated genomic DNA (Homo sapiens) CpG-island No: 29290
cccccaaaaacaatcaaaccgatcaccgctcctacaacctcatttatttccgaaaaaacacccacaaaccaacccacgaaaaatctaaactcgcccgccccaacacccacgcctcccccgcgcccgattccaacgccgcccccgacatccacccgcgaacaaccccttaccgccgatatcctcgaaacgcgaaaacgaacgatcccgcaacgctacgctccaacccgcgccgacctcgtcctcctccgactcctatacgtccgaaacgcgaaacgataacgaaacgacccctaaaaatcccgaaaactcgcgctcgtcgtccgaaaaaacgaccgaaaaaaaacgcgaaacgaccgaaatactataaaaaaaattcccgccgctatccgaaccgaactcgccgaacacgtcgtccgaaatatacaaactctcgtaacgcgcgcgaacaacctcgaacaacgccgacgccctcctccgcgcgcccccgccgccctcgaccataaccccgaccgccgcccgcgcgcccgcccccacaatacctcccaaccgcacacgccgaaccctaaacccgcgccgcgacccgccgccccccaccaacgcaacccgcaacacaacgcccgccgccccgtacccgaccgacccgccgtcttaaccgcctcgaacccaacgcccgaaaaaacgccctcgaaactcgaacgccgcaaactacgaaccgcgacgaaaaacgaaccgcgcgcgaaactaacaaaaacgacccaaaacgaacgaaacgcaaaaactacgaccgaaaccaaacgccgccgccgccaccgccgccaccaccgccaccaccgccgccgctacgtctcctcgacgcccgccgcctccctacccgccctctccacgacctccgacgctcgactaccgaccttcccgaacgcgaaccgccaaaaacgaaccctaccgcccctcacctcccgcccgccgaccaataaaaaacccgacccgaacaaccgcgaaaaaactaaacgaacccgacgcgaaaaacgcccccaccctcctccgcgaaacgaaacgaaacgcgcgaccgaaactaacgattaaaaaaaaaaccgccgacgacaataccgatctcctcctacaaaaacgcgcaacccgaaaccgccacgcgcaacgcgaaaaaaaaaaaacgaaaccgaaaaacaaaaaaaaaaaaaaacccgaatacttccaacgatccgaacccgcgaacgaaatacgaaccgatcccgctcactatccccttccgcaatccgcgtacaactccaaaaaactatccgccccgataattctaaaccaaacgccgccgaaacgctccaaataaacgacgaacccgaaatcaccacacccgcgacgacg

SEQ ID NO: 29291 - DNA, 1377 bp, Artificial Sequence
  chemically treated genomic DNA (Homo sapiens) CpG-island No: 29291
tttttaggagtagttagatcgattatcgtttttgtagttttatttgttttcggagagatatttataagttagtttacggagagtttggattcgttcgttttagtatttacgtttttttcgcgttcggttttagcgtcgttttcgatatttattcgcgggtagttttttatcgtcggtattttcgaagcgcgggggcgggcggtttcgtagcgttgcgttttagttcgcgtcggtttcgttttttttcggtttttgtgcgttcggggcgcggggcggtggcggggcggtttttgggggtttcgggggttcgcgttcgtcgttcgaggaggcggtcgaggaggagcgcgaggcggtcgaggtgttgtagaaggggttttcgtcgttgttcgggtcggattcgtcgaatacgtcgttcgagatgtgtaggttttcgtagcgcgcgcgggtagtttcgagtagcgtcggcgttttttttcgcgcgttttcgtcgttttcggttatggtttcggtcgtcgttcgcgcgttcgtttttatagtgttttttagtcgtatacgtcgggttttgggttcgcgtcgcggttcgtcgttttttattagcgtagttcgtagtatagcgttcgtcgtttcgtgttcggtcggttcgtcgttttggtcgtttcgggtttagcgttcggggaagcgttttcggagttcgggcgtcgtaggttgcgggtcgcggcgggaggcgagtcgcgcgcggggttggtaggggcgatttagagcgggcgggacgtagaggttgcggtcgagattaggcgtcgtcgtcgttatcgtcgttattatcgttattatcgtcgtcgttgcgttttttcggcgttcgtcgtttttttgttcgttttttttacggttttcggcgttcggttgtcgattttttcgggcgcgagtcgttagaggcgggttttgtcgttttttatttttcgttcgtcggttaatggggagttcggttcggatagtcgcgggggagttgggcgggttcggcgcggggaacgtttttattttttttcgcggggcggggcggggcgcgcggtcggggttggcggttagggggagggtcgtcggcggtagtgtcggtttttttttatagggacgcgtagttcgggatcgttacgcgtagcgcgggagggggagggcgggatcggggaataggaggggagggggattcgggtgtttttagcggttcgggttcgcggacggagtgcgggtcgatttcgtttattgttttttttcgtagttcgcgtgtagttttagggagttgttcgtttcggtggttttgaattaggcgtcgtcgaaacgttttaggtaggcggcgggttcgaggttattatattcgcggcggcg

SEQ ID NO: 29292 - DNA, 1377 bp, Artificial Sequence
  chemically treated genomic DNA (Homo sapiens) CpG-island No: 29292
cgccgccgcgaatataataacctcgaacccgccgcctacctaaaacgtttcgacgacgcctaattcaaaaccaccgaaacgaacaactccctaaaactacacgcgaactacgaaaaaaaacaataaacgaaatcgacccgcactccgtccgcgaacccgaaccgctaaaaacacccgaatccccctcccctcctattccccgatcccgccctccccctcccgcgctacgcgtaacgatcccgaactacgcgtccctataaaaaaaaaccgacactaccgccgacgaccctccccctaaccgccaaccccgaccgcgcgccccgccccgccccgcgaaaaaaaataaaaacgttccccgcgccgaacccgcccaactcccccgcgactatccgaaccgaactccccattaaccgacgaacgaaaaataaaaaacgacaaaacccgcctctaacgactcgcgcccgaaaaaatcgacaaccgaacgccgaaaaccgtaaaaaaaacgaacaaaaaaacgacgaacgccgaaaaaacgcaacgacgacgataataacgataataacgacgataacgacgacgacgcctaatctcgaccgcaacctctacgtcccgcccgctctaaatcgcccctaccaaccccgcgcgcgactcgcctcccgccgcgacccgcaacctacgacgcccgaactccgaaaacgcttccccgaacgctaaacccgaaacgaccaaaacgacgaaccgaccgaacacgaaacgacgaacgctatactacgaactacgctaataaaaaacgacgaaccgcgacgcgaacccaaaacccgacgtatacgactaaaaaacactataaaaacgaacgcgcgaacgacgaccgaaaccataaccgaaaacgacgaaaacgcgcgaaaaaaaacgccgacgctactcgaaactacccgcgcgcgctacgaaaacctacacatctcgaacgacgtattcgacgaatccgacccgaacaacgacgaaaaccccttctacaacacctcgaccgcctcgcgctcctcctcgaccgcctcctcgaacgacgaacgcgaacccccgaaacccccaaaaaccgccccgccaccgccccgcgccccgaacgcacaaaaaccgaaaaaaaacgaaaccgacgcgaactaaaacgcaacgctacgaaaccgcccgcccccgcgcttcgaaaataccgacgataaaaaactacccgcgaataaatatcgaaaacgacgctaaaaccgaacgcgaaaaaaacgtaaatactaaaacgaacgaatccaaactctccgtaaactaacttataaatatctctccgaaaacaaataaaactacaaaaacgataatcgatctaactactcctaaaaa

SEQ ID NO: 29293 - DNA, 689 bp, Artificial Sequence
  chemically treated genomic DNA (Homo sapiens) CpG-island No: 29293
tcgtcggtttttatttaggtcgaggtggttcggttttatgtatcgcgacgtaacgcggggaggtagataaggtatagggcggcgtttataatttatgttaattcgttttatgtgttcgtcgaggcggtataaatcgtcgtgacgattagcggtttaatgatcgaagttaggttggtaagagtcgcgagcgatttttgaagttgtttttgatggtcgttatttatttgtttggatagtatggtttgtaacgcgggtatttcgatgtcgtcggaagcgagaagaattataatggggaaggttatttagtttcgcgtcgcgaacgttagtaagacgtagtttagcgcgtcggtcgttatgtcggcgataatggtttgtttttcgtcgaaacgtttggtggcgggattagtgacgaaggtttgagcgagggcgtgtaagatttttaatatcgtaagcgataggtcgattatcgtcgcgttttagcgaaagcggttttcgtcgaaaatgatttatagcgttgtcggtatttgttttacgagttgtatgataaaaaagttagttataagtgcggcggcgatagttatgtttcgcgttcgtcgtaaggagttgattgggttgaaggtttttaagggtatcggttcgattttgaatttttaaggatttatatggttttaaaaaaaattgcgggtcgt

SEQ ID NO: 29294 - DNA, 689 bp, Artificial Sequence
  chemically treated genomic DNA (Homo sapiens) CpG-island No: 29294
acgacccgcaattttttttaaaaccatataaatccttaaaaattcaaaatcgaaccgatacccttaaaaaccttcaacccaatcaactccttacgacgaacgcgaaacataactatcgccgccgcacttataactaacttttttatcatacaactcgtaaaacaaataccgacaacgctataaatcattttcgacgaaaaccgctttcgctaaaacgcgacgataatcgacctatcgcttacgatattaaaaatcttacacgccctcgctcaaaccttcgtcactaatcccgccaccaaacgtttcgacgaaaaacaaaccattatcgccgacataacgaccgacgcgctaaactacgtcttactaacgttcgcgacgcgaaactaaataaccttccccattataattcttctcgcttccgacgacatcgaaatacccgcgttacaaaccatactatccaaacaaataaataacgaccatcaaaaacaacttcaaaaatcgctcgcgactcttaccaacctaacttcgatcattaaaccgctaatcgtcacgacgatttataccgcctcgacgaacacataaaacgaattaacataaattataaacgccgccctataccttatctacctccccgcgttacgtcgcgatacataaaaccgaaccacctcgacctaaataaaaaccgacga

SEQ ID NO: 29295 - DNA, 689 bp, Artificial Sequence
  chemically treated genomic DNA (Homo sapiens) CpG-island No: 29295
gcggttcgtaattttttttagagttatataggtttttaaaagtttaaggtcggatcgatgtttttgagagtttttaatttagttagttttttacggcgggcgcggggtatgattatcgtcgtcgtatttatgattgatttttttattatgtaattcgtaggataggtgtcggtagcgttgtgggttattttcggcgaggatcgttttcgttggagcgcgacgatgatcggtttgtcgtttgcggtattaggaattttgtacgttttcgtttaagttttcgttattggtttcgttattaaacgtttcggcgagaagtaggttattatcgtcggtatggcggtcgacgcgttgggttacgttttgttggcgttcgcgacgcgaggttggatggttttttttattatgatttttttcgttttcggcggtatcgggatgttcgcgttgtaggttatgttgtttaggtaggtagatgacgattattagggatagttttaaggatcgttcgcggtttttattagtttaatttcgattattggatcgttgatcgttacggcgatttatgtcgtttcggcgagtatatggaacgggttggtatggattgtaggcgtcgttttatattttgtttgttttttcgcgttgcgtcgcggtgtatggagtcgggttatttcgatttgaatggaagtcggcgg

SEQ ID NO: 29296 - DNA, 689 bp, Artificial Sequence
  chemically treated genomic DNA (Homo sapiens) CpG-island No: 29296
ccgccgacttccattcaaatcgaaataacccgactccatacaccgcgacgcaacgcgaaaaaacaaacaaaatataaaacgacgcctacaatccataccaacccgttccatatactcgccgaaacgacataaatcgccgtaacgatcaacgatccaataatcgaaattaaactaataaaaaccgcgaacgatccttaaaactatccctaataatcgtcatctacctacctaaacaacataacctacaacgcgaacatcccgataccgccgaaaacgaaaaaaatcataataaaaaaaaccatccaacctcgcgtcgcgaacgccaacaaaacgtaacccaacgcgtcgaccgccataccgacgataataacctacttctcgccgaaacgtttaataacgaaaccaataacgaaaacttaaacgaaaacgtacaaaattcctaataccgcaaacgacaaaccgatcatcgtcgcgctccaacgaaaacgatcctcgccgaaaataacccacaacgctaccgacacctatcctacgaattacataataaaaaaatcaatcataaatacgacgacgataatcataccccgcgcccgccgtaaaaaactaactaaattaaaaactctcaaaaacatcgatccgaccttaaacttttaaaaacctatataactctaaaaaaaattacgaaccgc

SEQ ID NO: 29297 - DNA, 699 bp, Artificial Sequence
  chemically treated genomic DNA (Homo sapiens) CpG-island No: 29297
ggggtattcgcgtattttcgggttttttatcgtttcgagtggaggagattgttttcgttcgcgtggtcggggaggcgggagttttttaagttttttgaagttcgcgttcgtttgcggtttgagggttttcgggtaggcgtcgtacggtttttttttttggaagaaggcggtggaggcgcggggacggggtcgcggttttcgtttagagcgcgggacgtatcggtcgttatgggaacggcggcgtaggtaggcgttgacgttagtaggcggcgcgttgttcgtattgcggtatagagtcgcggtttgtttttaggatacgggtcgttggcgggttaggtggttgcgtggtcgttttatttcgcgtacgcgtcgttaggttgggggagttgatttgtattgtttcgggtgtcggtttcggcgggacgggcggttttgcgtattttttttcgtgagtatattatgggtgcgttggtggcgggagcgcgggtcggggtgttcggtttgttcggtttttttttgggcggcgtgtcggggttgttggagttcgagagcgcggaggttgatagcgtagtgatcgacgagcgtgggtcgggtgtttcgggggaatgcgatttttgagagtttttatcgtatttttgcgttttttttattggttttcgtgttttcggagagttgagtatggtgttttgatagagaatt

SEQ ID NO: 29298 - DNA, 699 bp, Artificial Sequence
  chemically treated genomic DNA (Homo sapiens) CpG-island No: 29298
aattctctatcaaaacaccatactcaactctccgaaaacacgaaaaccaataaaaaaaacgcaaaaatacgataaaaactctcaaaaatcgcattcccccgaaacacccgacccacgctcgtcgatcactacgctatcaacctccgcgctctcgaactccaacaaccccgacacgccgcccaaaaaaaaaccgaacaaaccgaacaccccgacccgcgctcccgccaccaacgcacccataatatactcacgaaaaaaaatacgcaaaaccgcccgtcccgccgaaaccgacacccgaaacaatacaaatcaactcccccaacctaacgacgcgtacgcgaaataaaacgaccacgcaaccacctaacccgccaacgacccgtatcctaaaaacaaaccgcgactctataccgcaatacgaacaacgcgccgcctactaacgtcaacgcctacctacgccgccgttcccataacgaccgatacgtcccgcgctctaaacgaaaaccgcgaccccgtccccgcgcctccaccgccttcttccaaaaaaaaaaaccgtacgacgcctacccgaaaaccctcaaaccgcaaacgaacgcgaacttcaaaaaacttaaaaaactcccgcctccccgaccacgcgaacgaaaacaatctcctccactcgaaacgataaaaaacccgaaaatacgcgaatacccc

SEQ ID NO: 29299 - DNA, 699 bp, Artificial Sequence
  chemically treated genomic DNA (Homo sapiens) CpG-island No: 29299
aattttttattagagtattatgtttaatttttcggggatacggagattagtgaaagaagcgtaaaagtacggtgaggatttttagaaatcgtattttttcgggatattcggtttacgttcgtcggttattacgttattagttttcgcgttttcggattttagtagtttcgatacgtcgtttaggagagggtcgggtaggtcgagtatttcggttcgcgttttcgttattagcgtatttatgatgtatttacggagaggggtacgtagaatcgttcgtttcgtcggagtcgatattcggagtagtgtaaattaatttttttagtttagcggcgcgtgcgcgaagtgaggcggttacgtagttatttaattcgttagcgattcgtgttttgaaagtaagtcgcggttttgtgtcgtagtgcggatagcgcgtcgtttgttgacgttagcgtttgtttacgtcgtcgtttttatggcgatcgatgcgtttcgcgttttaggcgaagatcgcggtttcgttttcgcgtttttatcgtttttttttaggaggaggggtcgtgcggcgtttgttcgggggtttttaggtcgtaggcgggcgcgagttttagggaatttagggggttttcgttttttcggttacgcgagcgggaatagttttttttattcggagcggtaagggattcggaaatgcgcgggtgtttt

SEQ ID NO: 29300 - DNA, 699 bp, Artificial Sequence
  chemically treated genomic DNA (Homo sapiens) CpG-island No: 29300
aaaacacccgcgcatttccgaatcccttaccgctccgaataaaaaaaactattcccgctcgcgtaaccgaaaaaacgaaaaccccctaaattccctaaaactcgcgcccgcctacgacctaaaaacccccgaacaaacgccgcacgacccctcctcctaaaaaaaaacgataaaaacgcgaaaacgaaaccgcgatcttcgcctaaaacgcgaaacgcatcgatcgccataaaaacgacgacgtaaacaaacgctaacgtcaacaaacgacgcgctatccgcactacgacacaaaaccgcgacttactttcaaaacacgaatcgctaacgaattaaataactacgtaaccgcctcacttcgcgcacgcgccgctaaactaaaaaaattaatttacactactccgaatatcgactccgacgaaacgaacgattctacgtacccctctccgtaaatacatcataaatacgctaataacgaaaacgcgaaccgaaatactcgacctacccgaccctctcctaaacgacgtatcgaaactactaaaatccgaaaacgcgaaaactaataacgtaataaccgacgaacgtaaaccgaatatcccgaaaaaatacgatttctaaaaatcctcaccgtacttttacgcttctttcactaatctccgtatccccgaaaaattaaacataatactctaataaaaaatt

SEQ ID NO: 29301 - DNA, 530 bp, Artificial Sequence
  chemically treated genomic DNA (Homo sapiens) CpG-island No: 29301
ttcgtcgaaaagtttatcgtttgttcgttatttggtatttcgggtattttagttttttttgtttggtttataatcgtgcgttttttaggatcggcgtttatttttggttgcgggaagagcggacgtaggtagagcggtttcgtcgagtgtttcgtttcgtttcgcggtcgtcggagtagtttagagcgcgcgtcgggtcgacgaggaagtggatttcgtttagtcgagcgttaattggttttcgggttggtagtttcgtcgtagtaggagcgcgggcggcgcgtacggcggcggaattagtcggagtcgagcgagggcgaagcgggcgtgcgttagtgtagtgtcgcgggtcgcgcgcgttttcgatagggaagggtcggagttgcgtaggggcgcgcggaagaggttaagttagtcggagtttcgtttcgtttcgtttcgttttaacgggggttggaattcggcgtcgagagtagagaaaaggggtttttggtgatcgtttttatttggtatttttttaatttaggagg

SEQ ID NO: 29302 - DNA, 530 bp, Artificial Sequence
  chemically treated genomic DNA (Homo sapiens) CpG-island No: 29302
cctcctaaattaaaaaaataccaaataaaaacgatcaccaaaaaccccttttctctactctcgacgccgaattccaacccccgttaaaacgaaacgaaacgaaacgaaactccgactaacttaacctcttccgcgcgcccctacgcaactccgacccttccctatcgaaaacgcgcgcgacccgcgacactacactaacgcacgcccgcttcgccctcgctcgactccgactaattccgccgccgtacgcgccgcccgcgctcctactacgacgaaactaccaacccgaaaaccaattaacgctcgactaaacgaaatccacttcctcgtcgacccgacgcgcgctctaaactactccgacgaccgcgaaacgaaacgaaacactcgacgaaaccgctctacctacgtccgctcttcccgcaaccaaaaataaacgccgatcctaaaaaacgcacgattataaaccaaacaaaaaaaactaaaatacccgaaataccaaataacgaacaaacgataaacttttcgacgaa

SEQ ID NO: 29303 - DNA, 530 bp, Artificial Sequence
  chemically treated genomic DNA (Homo sapiens) CpG-island No: 29303
ttttttgggttagagggatgttaggtaggggcggttattagaggttttttttttttattttcggcgtcgggttttagttttcgttggggcggggcggggcggggcggggtttcggttagtttggtttttttcgcgcgtttttgcgtagtttcggtttttttttatcgggagcgcgcgcggttcgcggtattgtattggcgtacgttcgtttcgttttcgttcggtttcggttggtttcgtcgtcgtgcgcgtcgttcgcgtttttgttgcggcgaagttgttagttcgggagttaattagcgttcggttaggcggggtttattttttcgtcggttcggcgcgcgttttggattgtttcggcggtcgcggggcggggcggagtattcggcggagtcgttttgtttgcgttcgtttttttcgtagttaagggtgggcgtcggttttaggaggcgtacggttgtaagttagataaaaagaattggggtgttcggagtgttaggtggcgggtaagcggtgggtttttcggcggg

SEQ ID NO: 29304 - DNA, 530 bp, Artificial Sequence
  chemically treated genomic DNA (Homo sapiens) CpG-island No: 29304
cccgccgaaaaacccaccgcttacccgccacctaacactccgaacaccccaattctttttatctaacttacaaccgtacgcctcctaaaaccgacgcccacccttaactacgaaaaaaacgaacgcaaacaaaacgactccgccgaatactccgccccgccccgcgaccgccgaaacaatccaaaacgcgcgccgaaccgacgaaaaaataaaccccgcctaaccgaacgctaattaactcccgaactaacaacttcgccgcaacaaaaacgcgaacgacgcgcacgacgacgaaaccaaccgaaaccgaacgaaaacgaaacgaacgtacgccaatacaataccgcgaaccgcgcgcgctcccgataaaaaaaaaccgaaactacgcaaaaacgcgcgaaaaaaaccaaactaaccgaaaccccgccccgccccgccccgccccaacgaaaactaaaacccgacgccgaaaataaaaaaaaaaaacctctaataaccgcccctacctaacatccctctaacccaaaaaa

SEQ ID NO: 29305 - DNA, 538 bp, Artificial Sequence
  chemically treated genomic DNA (Homo sapiens) CpG-island No: 29305
tttcggacgtagcgattgtagggattgttttggagttcgagcgagggaggcgtgaagtataggagtaacggggtattttcggttcggtttgcggggaagggaagtaggggtagggtcgagggggaagaggttttcgcgagttcgatttcgcgtttatacgttatttgcgaggttagttgttgtcgcgtcgtttcgcgggatcgtagggattttcgaagttttaatgggcgtagaagtgcgagcgagcggcggtgtttatcggtagcgaagaggaggagcgttagggcgtcgggttcgtcgggttacgtggtttcggtcgttttacgtgattcggtgtagcgcgcgttcgggacgttatttagtcgagtatttcgtatcgtttcggtttcggtttcggtttcggtcgaaattttgtttttcgggttttataattcgatttttttagaagtcgattggtcgttttaggttcgtttcgaggttttgttattggagtgtttttatgaaattcggtggttgttgtcgggatttagaggttttt

SEQ ID NO: 29306 - DNA, 538 bp, Artificial Sequence
  chemically treated genomic DNA (Homo sapiens) CpG-island No: 29306
aaaaacctctaaatcccgacaacaaccaccgaatttcataaaaacactccaataacaaaacctcgaaacgaacctaaaacgaccaatcgacttctaaaaaaatcgaattataaaacccgaaaaacaaaatttcgaccgaaaccgaaaccgaaaccgaaacgatacgaaatactcgactaaataacgtcccgaacgcgcgctacaccgaatcacgtaaaacgaccgaaaccacgtaacccgacgaacccgacgccctaacgctcctcctcttcgctaccgataaacaccgccgctcgctcgcacttctacgcccattaaaacttcgaaaatccctacgatcccgcgaaacgacgcgacaacaactaacctcgcaaataacgtataaacgcgaaatcgaactcgcgaaaacctcttccccctcgaccctacccctacttcccttccccgcaaaccgaaccgaaaataccccgttactcctatacttcacgcctccctcgctcgaactccaaaacaatccctacaatcgctacgtccgaaa

SEQ ID NO: 29307 - DNA, 538 bp, Artificial Sequence
  chemically treated genomic DNA (Homo sapiens) CpG-island No: 29307
aaaagtttttaagtttcggtagtagttatcggattttatggggatattttagtggtagggtttcggggcgggtttgagacggttaatcggtttttaaagaagtcgggttgtagggttcgaagagtagggtttcggtcggggtcggggtcggggtcggggcggtgcgggatgttcggttgggtagcgtttcgggcgcgcgttgtatcgggttacgtgaggcggtcggggttacgtgattcggcgggttcggcgttttggcgtttttttttttcgttgtcggtgggtatcgtcgttcgttcgtatttttgcgtttattggagtttcggagatttttgcggtttcgcgggacggcgcggtagtagttgatttcgtaggtagcgtgtgggcgcggggtcgagttcgcggaggttttttttttttcggttttgtttttgtttttttttttcgtaggtcgggtcgggagtgtttcgttatttttgtattttacgtttttttcgttcgggttttagggtagtttttgtagtcgttgcgttcgggg

SEQ ID NO: 29308 - DNA, 538 bp, Artificial Sequence
  chemically treated genomic DNA (Homo sapiens) CpG-island No: 29308
ccccgaacgcaacgactacaaaaactaccctaaaacccgaacgaaaaaaacgtaaaatacaaaaataacgaaacactcccgacccgacctacgaaaaaaaaaaacaaaaacaaaaccgaaaaaaaaaaaacctccgcgaactcgaccccgcgcccacacgctacctacgaaatcaactactaccgcgccgtcccgcgaaaccgcaaaaatctccgaaactccaataaacgcaaaaatacgaacgaacgacgatacccaccgacaacgaaaaaaaaaaacgccaaaacgccgaacccgccgaatcacgtaaccccgaccgcctcacgtaacccgatacaacgcgcgcccgaaacgctacccaaccgaacatcccgcaccgccccgaccccgaccccgaccccgaccgaaaccctactcttcgaaccctacaacccgacttctttaaaaaccgattaaccgtctcaaacccgccccgaaaccctaccactaaaatatccccataaaatccgataactactaccgaaacttaaaaactttt

SEQ ID NO: 29309 - DNA, 538 bp, Artificial Sequence
  chemically treated genomic DNA (Homo sapiens) CpG-island No: 29309
tagcgcgaagtgtattagcgcgtcgtagtagagttagatgagcgtttcgcggttcgtcgttttttgttcgcggtttaggcgtaggtttagggcgtagttcgtcgttagtagcgcggcgtatagtagtagcgaatcgttagtttcggtttttagtttttatttagcgtttatgttttaggttttcgacgttaacggtttaggattatgcggtagaggaaagtagggagagaaacgacggggcggggttggtcgggaaggggcggagtcggatggttaaggaggagcggagttgattggttaaggcggttcggggagggacggggtttttcggtcgggtcggggttagagcgaggatttcgtgttcgtttcgtattttggttagtttgttgagttcggtggttttgttaggtgtcgtttatggaggtttcgtagaaggaacgtgtttattaatttgcgtaatcgtttcgattaaatttgtttttaaatcgagtttaaaggattggtaatagggttatattttttgatgttgtttcgtttt

SEQ ID NO: 29310 - DNA, 538 bp, Artificial Sequence
  chemically treated genomic DNA (Homo sapiens) CpG-island No: 29310
aaaacgaaacaacatcaaaaaatataaccctattaccaatcctttaaactcgatttaaaaacaaatttaatcgaaacgattacgcaaattaataaacacgttccttctacgaaacctccataaacgacacctaacaaaaccaccgaactcaacaaactaaccaaaatacgaaacgaacacgaaatcctcgctctaaccccgacccgaccgaaaaaccccgtccctccccgaaccgccttaaccaatcaactccgctcctccttaaccatccgactccgccccttcccgaccaaccccgccccgtcgtttctctccctactttcctctaccgcataatcctaaaccgttaacgtcgaaaacctaaaacataaacgctaaataaaaactaaaaaccgaaactaacgattcgctactactatacgccgcgctactaacgacgaactacgccctaaacctacgcctaaaccgcgaacaaaaaacgacgaaccgcgaaacgctcatctaactctactacgacgcgctaatacacttcgcgcta

SEQ ID NO: 29311 - DNA, 538 bp, Artificial Sequence
  chemically treated genomic DNA (Homo sapiens) CpG-island No: 29311
aaagcgaaataatattaaaaggtgtggttttattattaattttttgggttcggtttgggaataggtttggtcgaggcggttgcgtaagttggtgagtacgttttttttacggaatttttatgggcggtatttggtaaaattatcggatttagtaggttggttagggtgcgaggcgggtacggaattttcgttttggtttcgattcggtcggggagtttcgttttttttcggatcgttttggttaattagtttcgtttttttttggttattcggtttcgttttttttcggttagtttcgtttcgtcgtttttttttttgtttttttttgtcgtatggttttgggtcgttggcgtcggaagtttgaagtatgggcgttgagtgggagttgggggtcgaggttggcggttcgttgttgttgtgcgtcgcgttgttggcggcgggttgcgttttgggtttgcgtttgggtcgcgggtagggggcggcggatcgcggggcgtttatttggttttgttacgacgcgttggtgtatttcgcgttg

SEQ ID NO: 29312 - DNA, 538 bp, Artificial Sequence
  chemically treated genomic DNA (Homo sapiens) CpG-island No: 29312
caacgcgaaatacaccaacgcgtcgtaacaaaaccaaataaacgccccgcgatccgccgccccctacccgcgacccaaacgcaaacccaaaacgcaacccgccgccaacaacgcgacgcacaacaacaacgaaccgccaacctcgacccccaactcccactcaacgcccatacttcaaacttccgacgccaacgacccaaaaccatacgacaaaaaaaaacaaaaaaaaaaacgacgaaacgaaactaaccgaaaaaaaacgaaaccgaataaccaaaaaaaaacgaaactaattaaccaaaacgatccgaaaaaaaacgaaactccccgaccgaatcgaaaccaaaacgaaaattccgtacccgcctcgcaccctaaccaacctactaaatccgataattttaccaaataccgcccataaaaattccgtaaaaaaaacgtactcaccaacttacgcaaccgcctcgaccaaacctattcccaaaccgaacccaaaaaattaataataaaaccacaccttttaatattatttcgcttt

SEQ ID NO: 29313 - DNA, 938 bp, Artificial Sequence
  chemically treated genomic DNA (Homo sapiens) CpG-island No: 29313
ggttgattttttcggggagtttggtttttaaagcgcggatttcgcgacgcgcggtttgtaggattgcggggttcggcggtcgagacgcggtatttataggggttttttcgcgcggtcgcggcggtggtggcgggaatttgggattggtcggcgaggggtttcgtatggtaatcgttttcgatcgtaagttataggttgtgggtatcgcgtagagcgtattttttatcgaattttttttattttattttaattttcgagatcgaaagtgcggagcgcggagttttgtaaatttgatttcgagttaaggtgcgcgaggcgacggcgagtgtttttcgggttttttgtagtttcggggttggaagtttcggttttcgcgtatttcgttttttgttcgttcgaaagcgaaatttggtcggcgggtaggaggggagagttcggtttcgagttttgtttggcggggtttcggtttggaggtattttcgattcgtatttggcggcgcgatttatttatttgttcgtttttaaggcgtcgttaggagtaatagtagtagcggcggtagcggtagcggtcgtagggtcgggcggtcgggagttcgtatgggcggcggggttgggttatatgtcggggggtagtagattgtttagttttacgttcgttggggttaagcgcggtcgcgcggttttagtttcgcgtttggggttttgcgtgttacgttttaggcgatttgagttttagggcgttttcgttatagtcgcgttttttaggtttttttagaaattaagggcgagcgattcgcggagtttttacgcgcgttttttcggttatttagttggatggtagcgcgagggtagttttcgcggatttatagtttttagttattcggttgttagttttgagagtttgagagtttttatttttcggggtttatgtttagatt

SEQ ID NO: 29314 - DNA, 938 bp, Artificial Sequence
  chemically treated genomic DNA (Homo sapiens) CpG-island No: 29314
aatctaaacataaaccccgaaaaataaaaactctcaaactctcaaaactaacaaccgaataactaaaaactataaatccgcgaaaactaccctcgcgctaccatccaactaaataaccgaaaaaacgcgcgtaaaaactccgcgaatcgctcgcccttaatttctaaaaaaacctaaaaaacgcgactataacgaaaacgccctaaaactcaaatcgcctaaaacgtaacacgcaaaaccccaaacgcgaaactaaaaccgcgcgaccgcgcttaaccccaacgaacgtaaaactaaacaatctactaccccccgacatataacccaaccccgccgcccatacgaactcccgaccgcccgaccctacgaccgctaccgctaccgccgctactactattactcctaacgacgccttaaaaacgaacaaataaataaatcgcgccgccaaatacgaatcgaaaatacctccaaaccgaaaccccgccaaacaaaactcgaaaccgaactctcccctcctacccgccgaccaaatttcgctttcgaacgaacaaaaaacgaaatacgcgaaaaccgaaacttccaaccccgaaactacaaaaaacccgaaaaacactcgccgtcgcctcgcgcaccttaactcgaaatcaaatttacaaaactccgcgctccgcactttcgatctcgaaaattaaaataaaataaaaaaaattcgataaaaaatacgctctacgcgatacccacaacctataacttacgatcgaaaacgattaccatacgaaacccctcgccgaccaatcccaaattcccgccaccaccgccgcgaccgcgcgaaaaaacccctataaataccgcgtctcgaccgccgaaccccgcaatcctacaaaccgcgcgtcgcgaaatccgcgctttaaaaaccaaactccccgaaaaaatcaacc

SEQ ID NO: 29315 - DNA, 938 bp, Artificial Sequence
  chemically treated genomic DNA (Homo sapiens) CpG-island No: 29315
ggtttgggtatgaatttcgagaggtggaaatttttagatttttaggattgatagtcgagtggttggggattataaattcgcgagaattgttttcgcgttgttatttagttgggtagtcgggggagcgcgcgtgggggtttcgcgagtcgttcgtttttggtttttggggaagtttgggggacgcggttgtggcggaggcgttttgggatttaggtcgtttggagcgtggtacgtagagttttaggcgcggagttgaggtcgcgcggtcgcgtttggttttagcgggcgtgggattgagtagtttgttgtttttcgatatgtgatttagtttcgtcgtttatgcgggttttcggtcgttcggttttgcggtcgttgtcgttgtcgtcgttgttgttgttgtttttggcggcgttttggggacgggtaggtaggtgggtcgcgtcgttaggtgcgggtcggggatgtttttaggtcggggtttcgttaggtagagttcgaggtcgagttttttttttttgttcgtcggttaggtttcgttttcgggcgggtagaggacgaggtgcgcggaggtcggagtttttagtttcggggttgtagggagttcgggggatattcgtcgtcgtttcgcgtattttggttcggggttaagtttgtaggatttcgcgtttcgtattttcggtttcgagaattgaggtggggtggggggagttcggtggggggtgcgttttgcgcggtgtttatagtttatgatttgcggtcggggacggttattatgcggggtttttcgtcggttagttttaggttttcgttattatcgtcgcggtcgcgcggaggggtttttgtggatgtcgcgtttcggtcgtcgggtttcgtagttttgtaagtcgcgcgtcgcgagattcgcgttttaaaagttaaatttttcgaaagggttagtt

SEQ ID NO: 29316 - DNA, 938 bp, Artificial Sequence
  chemically treated genomic DNA (Homo sapiens) CpG-island No: 29316
aactaaccctttcgaaaaatttaacttttaaaacgcgaatctcgcgacgcgcgacttacaaaactacgaaacccgacgaccgaaacgcgacatccacaaaaacccctccgcgcgaccgcgacgataataacgaaaacctaaaactaaccgacgaaaaaccccgcataataaccgtccccgaccgcaaatcataaactataaacaccgcgcaaaacgcaccccccaccgaactccccccaccccacctcaattctcgaaaccgaaaatacgaaacgcgaaatcctacaaacttaaccccgaaccaaaatacgcgaaacgacgacgaatatcccccgaactccctacaaccccgaaactaaaaactccgacctccgcgcacctcgtcctctacccgcccgaaaacgaaacctaaccgacgaacaaaaaaaaaaaactcgacctcgaactctacctaacgaaaccccgacctaaaaacatccccgacccgcacctaacgacgcgacccacctacctacccgtccccaaaacgccgccaaaaacaacaacaacaacgacgacaacgacaacgaccgcaaaaccgaacgaccgaaaacccgcataaacgacgaaactaaatcacatatcgaaaaacaacaaactactcaatcccacgcccgctaaaaccaaacgcgaccgcgcgacctcaactccgcgcctaaaactctacgtaccacgctccaaacgacctaaatcccaaaacgcctccgccacaaccgcgtcccccaaacttccccaaaaaccaaaaacgaacgactcgcgaaacccccacgcgcgctcccccgactacccaactaaataacaacgcgaaaacaattctcgcgaatttataatccccaaccactcgactatcaatcctaaaaatctaaaaatttccacctctcgaaattcatacccaaacc

SEQ ID NO: 29317 - DNA, 521 bp, Artificial Sequence
  chemically treated genomic DNA (Homo sapiens) CpG-island No: 29317
atttcgtttgttttaacgaacgcgggcgcggggtttttttcgtaggttatataaggtagtcgcgggtggaggtagtagaggcgagcgtacgttcgtcgagggggaaaggggcgtggggaggcggtcggggcggtcggtatttttcgggcgtgagtgcgtagcgcgcgggggagcgtagggcgcggcggagtcgggttttagagcgcgggtgattcggggcgcgggtcgggagtcgggattttgttcgtcgtcgtcgttgtcgagcgtcgtttttgttttttgtaggaagggcgagcgcggcggttagcgtttagcgatttttcgtttttcgttaagttttaacgttttgttcgattagtcgcgcgtttttcggggtttcgtagattcgcgagatggtattaaggtaagattcgtttttttgttttttcgcgtttcgggtttttttaatatttttgttcgttttattttttttttttcgggtatattttgtaggaggaataacgggtagtgttggtgtttgt

SEQ ID NO: 29318 - DNA, 521 bp, Artificial Sequence
  chemically treated genomic DNA (Homo sapiens) CpG-island No: 29318
acaaacaccaacactacccgttattcctcctacaaaatatacccgaaaaaaaaaaaataaaacgaacaaaaatattaaaaaaacccgaaacgcgaaaaaacaaaaaaacgaatcttaccttaataccatctcgcgaatctacgaaaccccgaaaaacgcgcgactaatcgaacaaaacgttaaaacttaacgaaaaacgaaaaatcgctaaacgctaaccgccgcgctcgcccttcctacaaaaaacaaaaacgacgctcgacaacgacgacgacgaacaaaatcccgactcccgacccgcgccccgaatcacccgcgctctaaaacccgactccgccgcgccctacgctcccccgcgcgctacgcactcacgcccgaaaaataccgaccgccccgaccgcctccccacgcccctttccccctcgacgaacgtacgctcgcctctactacctccacccgcgactaccttatataacctacgaaaaaaaccccgcgcccgcgttcgttaaaacaaacgaaat

SEQ ID NO: 29319 - DNA, 521 bp, Artificial Sequence
  chemically treated genomic DNA (Homo sapiens) CpG-island No: 29319
gtagatattagtattgttcgttgttttttttgtaagatgtgttcgagggagaaaaggtgaggcgggtaagagtattggaggggttcgggacgcgaggaagtagagaagcgggttttattttggtgttatttcgcgggtttgcggagtttcggaaggcgcgcggttagtcgagtagagcgttggagtttagcggaggacgaagggtcgttgagcgttggtcgtcgcgttcgttttttttgtagggaataaaggcggcgttcggtagcggcggcggcgggtagaatttcggttttcggttcgcgtttcgagttattcgcgttttgaaattcgatttcgtcgcgttttgcgttttttcgcgcgttgcgtatttacgttcgggggatatcggtcgtttcggtcgtttttttacgtttttttttttttcgacggacgtgcgttcgtttttgttgtttttattcgcggttgttttatgtaatttgcgaggaaagtttcgcgttcgcgttcgttggggtaagcgggat

SEQ ID NO: 29320 - DNA, 521 bp, Artificial Sequence
  chemically treated genomic DNA (Homo sapiens) CpG-island No: 29320
atcccgcttaccccaacgaacgcgaacgcgaaactttcctcgcaaattacataaaacaaccgcgaataaaaacaacaaaaacgaacgcacgtccgtcgaaaaaaaaaaaaacgtaaaaaaacgaccgaaacgaccgatatcccccgaacgtaaatacgcaacgcgcgaaaaaacgcaaaacgcgacgaaatcgaatttcaaaacgcgaataactcgaaacgcgaaccgaaaaccgaaattctacccgccgccgccgctaccgaacgccgcctttattccctacaaaaaaaacgaacgcgacgaccaacgctcaacgacccttcgtcctccgctaaactccaacgctctactcgactaaccgcgcgccttccgaaactccgcaaacccgcgaaataacaccaaaataaaacccgcttctctacttcctcgcgtcccgaacccctccaatactcttacccgcctcaccttttctccctcgaacacatcttacaaaaaaaacaacgaacaatactaatatctac

SEQ ID NO: 29321 - DNA, 536 bp, Artificial Sequence
  chemically treated genomic DNA (Homo sapiens) CpG-island No: 29321
gtgagatgcggtcgttgaggtagatgttaatttggtgtagtcgtacgttttttttttgtagtcgtagtttttcgttttgtagttgtagtcgtatcgtttcgtttcgcgcgtttagcgcgttcgtcggtatcggcggtcgcggtatgatcggttcgcgtcgttcggggcgcggggtgcgcgggggtttcggttcggtagtttcggtttcggttttacgttgagttcgtagtatcgagtttagttcggttaacgttagtagcgttaggagtattaatagcgtttttcggtcgcgtcgtagtttttcgcgggtagcgcgtcgcgcgtcgtgcgtttttatatgcgttcgttaattggtagttagcgatttgcgcgttttaaggcggcggtggaggttaggattcggatttcggaatcgtcgtgtcgttcggttttcggttcgttttatttgcgcgtcgtttttttttcgtttagtttcgcgttagtttaagcgtagttttcggggtggtttatttcggtagggtttttaagtgggttgg

SEQ ID NO: 29322 - DNA, 536 bp, Artificial Sequence
  chemically treated genomic DNA (Homo sapiens) CpG-island No: 29322
ccaacccacttaaaaaccctaccgaaataaaccaccccgaaaactacgcttaaactaacgcgaaactaaacgaaaaaaaaacgacgcgcaaataaaacgaaccgaaaaccgaacgacacgacgattccgaaatccgaatcctaacctccaccgccgccttaaaacgcgcaaatcgctaactaccaattaacgaacgcatataaaaacgcacgacgcgcgacgcgctacccgcgaaaaactacgacgcgaccgaaaaacgctattaatactcctaacgctactaacgttaaccgaactaaactcgatactacgaactcaacgtaaaaccgaaaccgaaactaccgaaccgaaacccccgcgcaccccgcgccccgaacgacgcgaaccgatcataccgcgaccgccgataccgacgaacgcgctaaacgcgcgaaacgaaacgatacgactacaactacaaaacgaaaaactacgactacaaaaaaaaaacgtacgactacaccaaattaacatctacctcaacgaccgcatctcac

SEQ ID NO: 29323 - DNA, 536 bp, Artificial Sequence
  chemically treated genomic DNA (Homo sapiens) CpG-island No: 29323
ttagtttatttgaagattttgtcgaaatgagttatttcgggggttgcgtttgggttggcgcggggttggacggaaagggggcggcgcgtaggtggggcgggtcgggggtcgggcggtacggcggtttcgggattcgggttttggtttttatcgtcgttttggggcgcgtagatcgttggttgttagttggcgggcgtatgtgggggcgtacggcgcgcggcgcgttgttcgcgggaaattacggcgcggtcgggaggcgttgttggtgtttttggcgttattggcgttggtcgggttgggttcggtgttgcgggtttagcgtggggtcggggtcggggttgtcgagtcgggattttcgcgtatttcgcgtttcgggcggcgcgagtcggttatgtcgcggtcgtcggtgtcggcgaacgcgttgggcgcgcggggcgaggcggtgcggttgtagttgtagggcgaggagttgcggttgtaggaggagagcgtgcggttgtattagattaatatttattttagcgatcgtattttat

SEQ ID NO: 29324 - DNA, 536 bp, Artificial Sequence
  chemically treated genomic DNA (Homo sapiens) CpG-island No: 29324
ataaaatacgatcgctaaaataaatattaatctaatacaaccgcacgctctcctcctacaaccgcaactcctcgccctacaactacaaccgcaccgcctcgccccgcgcgcccaacgcgttcgccgacaccgacgaccgcgacataaccgactcgcgccgcccgaaacgcgaaatacgcgaaaatcccgactcgacaaccccgaccccgaccccacgctaaacccgcaacaccgaacccaacccgaccaacgccaataacgccaaaaacaccaacaacgcctcccgaccgcgccgtaatttcccgcgaacaacgcgccgcgcgccgtacgcccccacatacgcccgccaactaacaaccaacgatctacgcgccccaaaacgacgataaaaaccaaaacccgaatcccgaaaccgccgtaccgcccgacccccgacccgccccacctacgcgccgccccctttccgtccaaccccgcgccaacccaaacgcaacccccgaaataactcatttcgacaaaatcttcaaataaactaa

SEQ ID NO: 29325 - DNA, 597 bp, Artificial Sequence
  chemically treated genomic DNA (Homo sapiens) CpG-island No: 29325
tttttttcgaggttttttaattttttggttttcgcgtaggaacgtttattttcgttgtgttcgcgtttgcgttttcgacgtttttttgaataggaaatatttgattagggtttgaataggttttttcgttttcggttcgtatatttcgcggttcgttattttatttcgtcgcgtttaggtcgacgtcgttcgtttttgattcggattagcgagtttagcgtcgggcggtttagatacgtgaagttttgtaatagtttttatttgtcgcgttggaagttgcggttggagttttgcgtcgcgcggttttttagcgtttagaatacgtcggtgtttagcgttaggtaagttaggtaggcgagtagtaggagtacggtgttgggtatcgcgtagtttcggattttgttttcgggagtcgttcgggttcgcggtcggtatatagcgggagaggcggggagtcggcgtcgggagcggtggattaggattcggtgggagggaagggttaggcgtttagttcgtattttttttcgtaaacgtttgttggtgttcggtttcgtcggggaggaggagtgttggggaatgggatagtttggttttatt

SEQ ID NO: 29326 - DNA, 597 bp, Artificial Sequence
  chemically treated genomic DNA (Homo sapiens) CpG-island No: 29326
aataaaaccaaactatcccattccccaacactcctcctccccgacgaaaccgaacaccaacaaacgtttacgaaaaaaaatacgaactaaacgcctaacccttccctcccaccgaatcctaatccaccgctcccgacgccgactccccgcctctcccgctatataccgaccgcgaacccgaacgactcccgaaaacaaaatccgaaactacgcgatacccaacaccgtactcctactactcgcctacctaacttacctaacgctaaacaccgacgtattctaaacgctaaaaaaccgcgcgacgcaaaactccaaccgcaacttccaacgcgacaaataaaaactattacaaaacttcacgtatctaaaccgcccgacgctaaactcgctaatccgaatcaaaaacgaacgacgtcgacctaaacgcgacgaaataaaataacgaaccgcgaaatatacgaaccgaaaacgaaaaaacctattcaaaccctaatcaaatatttcctattcaaaaaaacgtcgaaaacgcaaacgcgaacacaacgaaaataaacgttcctacgcgaaaaccaaaaaattaaaaaacctcgaaaaaaa

SEQ ID NO: 29327 - DNA, 597 bp, Artificial Sequence
  chemically treated genomic DNA (Homo sapiens) CpG-island No: 29327
ggtggggttaggttgttttattttttaatatttttttttttcggcgaaatcgggtattagtaggcgtttgcgagaggagatacgagttggacgtttggttttttttttttatcgggttttagtttatcgttttcggcgtcggtttttcgtttttttcgttatgtatcgatcgcgagttcgggcggttttcgagggtagggttcggggttgcgcggtgtttagtatcgtgtttttgttgttcgtttatttggtttatttggcgttgggtatcggcgtgttttggacgttggagggtcgcgcggcgtaggattttagtcgtagtttttagcgcgataagtgggagttgttgtagaattttacgtgtttggatcgttcggcgttggattcgttgattcgggttaggggcgagcggcgtcggtttgggcgcggcgggatggggtagcgggtcgcggggtgtacgggtcgagggcgagggggtttatttaggttttggttaggtgttttttgtttagggaaacgtcgggaacgtagacgcgggtataacgggggtgggcgtttttgcgcggggattagagggttgggggatttcggaggaaa

SEQ ID NO: 29328 - DNA, 597 bp, Artificial Sequence
  chemically treated genomic DNA (Homo sapiens) CpG-island No: 29328
tttcctccgaaatcccccaaccctctaatccccgcgcaaaaacgcccacccccgttatacccgcgtctacgttcccgacgtttccctaaacaaaaaacacctaaccaaaacctaaataaaccccctcgccctcgacccgtacaccccgcgacccgctaccccatcccgccgcgcccaaaccgacgccgctcgcccctaacccgaatcaacgaatccaacgccgaacgatccaaacacgtaaaattctacaacaactcccacttatcgcgctaaaaactacgactaaaatcctacgccgcgcgaccctccaacgtccaaaacacgccgatacccaacgccaaataaaccaaataaacgaacaacaaaaacacgatactaaacaccgcgcaaccccgaaccctaccctcgaaaaccgcccgaactcgcgatcgatacataacgaaaaaaacgaaaaaccgacgccgaaaacgataaactaaaacccgataaaaaaaaaaaaccaaacgtccaactcgtatctcctctcgcaaacgcctactaatacccgatttcgccgaaaaaaaaaaatattaaaaaataaaacaacctaaccccacc

SEQ ID NO: 29329 - DNA, 655 bp, Artificial Sequence
  chemically treated genomic DNA (Homo sapiens) CpG-island No: 29329
cgtgtttcgtaagggagttttcgtttttattattttcggttttaggcggagcgtagtttttcgcggtttcgttgtcgttgttttcggtttttttttcgttttcgttttcgtgggttaggtcggtattttggacggtagcggtgacgttggtttcgcgcgcggattggaggttcgttagaagtagttagtcgatagttattagtagttcggcggagtagttcgtgtttttggggtttatggttttcggtttcgacggtcgttcgaggcgtagtcgtcgtcgcggtttttgaggataggtacgtcgaagagagttgcgatatttcgttcgtagtcgttcggtttcgaatttcgtgacgaatcgtgacgttttaatggttgtcggggcgttgtttcggtgttgagcgtttggaattcgcgcggagttaggttgcgaggcgtgtaagacggaacgcgacgagaagtcgcgtgcgataagtttttaggagaggacgtcgttttttttcgtaatcggaagttttttgtttagggcgtttttttgagtttttcgggtgcggtaggcgttgttgtcggttgttttttttgttttagtttatggagcgattttttagttttttcgtttattttgtttgtttttttttaagatatttttttttcg

SEQ ID NO: 29330 - DNA, 655 bp, Artificial Sequence
  chemically treated genomic DNA (Homo sapiens) CpG-island No: 29330
cgaaaaaaaaatatcttaaaaaaaaacaaacaaaataaacgaaaaaactaaaaaatcgctccataaactaaaacaaaaaaaacaaccgacaacaacgcctaccgcacccgaaaaactcaaaaaaacgccctaaacaaaaaacttccgattacgaaaaaaaacgacgtcctctcctaaaaacttatcgcacgcgacttctcgtcgcgttccgtcttacacgcctcgcaacctaactccgcgcgaattccaaacgctcaacaccgaaacaacgccccgacaaccattaaaacgtcacgattcgtcacgaaattcgaaaccgaacgactacgaacgaaatatcgcaactctcttcgacgtacctatcctcaaaaaccgcgacgacgactacgcctcgaacgaccgtcgaaaccgaaaaccataaaccccaaaaacacgaactactccgccgaactactaataactatcgactaactacttctaacgaacctccaatccgcgcgcgaaaccaacgtcaccgctaccgtccaaaataccgacctaacccacgaaaacgaaaacgaaaaaaaaaccgaaaacaacgacaacgaaaccgcgaaaaactacgctccgcctaaaaccgaaaataataaaaacgaaaactcccttacgaaacacg

SEQ ID NO: 29331 - DNA, 655 bp, Artificial Sequence
  chemically treated genomic DNA (Homo sapiens) CpG-island No: 29331
cgaaaaagaaatgttttaaaagaaagtaggtagggtgagcgaggaggttgaagagtcgttttataaattgaggtagaaggagtagtcgatagtaacgtttatcgtattcggaaggtttaaggaggcgttttgggtagggaattttcggttgcggggaagggcggcgtttttttttagggatttgtcgtacgcggtttttcgtcgcgtttcgttttgtacgtttcgtagtttagtttcgcgcgagttttaggcgtttagtatcggagtagcgtttcggtaattattgaggcgttacggttcgttacgggattcggagtcgggcggttacgggcggggtgtcgtagtttttttcgacgtatttgtttttaggagtcgcggcggcgattgcgtttcggacggtcgtcggggtcgagaattatgagttttaggggtacgggttgtttcgtcgggttgttgatgattgtcggttggttgtttttggcgggtttttagttcgcgcgcgggattaacgttatcgttgtcgtttaggatgtcggtttggtttacgaaggcgagggcgaggaggagatcgaaaataacgatagcgagatcgcggagaattacgtttcgtttgaaatcgaggatggtgagggcgggagtttttttgcggggtacg

SEQ ID NO: 29332 - DNA, 655 bp, Artificial Sequence
  chemically treated genomic DNA (Homo sapiens) CpG-island No: 29332
cgtaccccgcaaaaaaactcccgccctcaccatcctcgatttcaaacgaaacgtaattctccgcgatctcgctatcgttattttcgatctcctcctcgccctcgccttcgtaaaccaaaccgacatcctaaacgacaacgataacgttaatcccgcgcgcgaactaaaaacccgccaaaaacaaccaaccgacaatcatcaacaacccgacgaaacaacccgtacccctaaaactcataattctcgaccccgacgaccgtccgaaacgcaatcgccgccgcgactcctaaaaacaaatacgtcgaaaaaaactacgacaccccgcccgtaaccgcccgactccgaatcccgtaacgaaccgtaacgcctcaataattaccgaaacgctactccgatactaaacgcctaaaactcgcgcgaaactaaactacgaaacgtacaaaacgaaacgcgacgaaaaaccgcgtacgacaaatccctaaaaaaaaacgccgcccttccccgcaaccgaaaattccctacccaaaacgcctccttaaaccttccgaatacgataaacgttactatcgactactccttctacctcaatttataaaacgactcttcaacctcctcgctcaccctacctactttcttttaaaacatttctttttcg

SEQ ID NO: 29333 - DNA, 720 bp, Artificial Sequence
  chemically treated genomic DNA (Homo sapiens) CpG-island No: 29333
gtttagcgggaggcggtttttatcggtttattcgagattttaattttaggcgttttgtagttttttttagatttttcgggatcgtgtttggtttttttattcgtacgttgcggttgcgtttttttttcgtaatattacgttggcgaatttggaaaggattaaatagttttattcgttaatttagcgcggcgggatcggtttaaaagggtttttgtagtttgcgtatgcggattcggcggtcgttatcgatttttcgtttgttttttttcgggcggtagtcgcggtttggagtttgttgatagttttgcgatcggcgggcgtagtttcgtttcgtgtttttacgttattttattagggacggggcggggcggcggttttcgtagtttattagcgcgaattacgatttcggcgagttcgggaggaaagtcgttagaaagaaggcgattggatggcggcggcgttttggggcgtagcgtcgttcgggtttcgtttatcgttgtttttttttgttgggttttagagttattgaggtttgagcgagagtcgacggcgggcgggcgtagttgttgtcggagcgtcggcgcgtgttggtgggttatatatttttttttttttttattcgcgagttttcggatatggtggttttcggtttcgtgattagtcggttgggttcggtatttttttttttgttagttttggtggatttgtagtacgaaggtg

SEQ ID NO: 29334 - DNA, 720 bp, Artificial Sequence
  chemically treated genomic DNA (Homo sapiens) CpG-island No: 29334
caccttcgtactacaaatccaccaaaactaacaaaaaaaaaaataccgaacccaaccgactaatcacgaaaccgaaaaccaccatatccgaaaactcgcgaataaaaaaaaaaaaaaatatataacccaccaacacgcgccgacgctccgacaacaactacgcccgcccgccgtcgactctcgctcaaacctcaataactctaaaacccaacaaaaaaaaacaacgataaacgaaacccgaacgacgctacgccccaaaacgccgccgccatccaatcgccttctttctaacgactttcctcccgaactcgccgaaatcgtaattcgcgctaataaactacgaaaaccgccgccccgccccgtccctaataaaataacgtaaaaacacgaaacgaaactacgcccgccgatcgcaaaactatcaacaaactccaaaccgcgactaccgcccgaaaaaaaacaaacgaaaaatcgataacgaccgccgaatccgcatacgcaaactacaaaaacccttttaaaccgatcccgccgcgctaaattaacgaataaaactatttaatcctttccaaattcgccaacgtaatattacgaaaaaaaaacgcaaccgcaacgtacgaataaaaaaaccaaacacgatcccgaaaaatctaaaaaaaactacaaaacgcctaaaattaaaatctcgaataaaccgataaaaaccgcctcccgctaaac

SEQ ID NO: 29335 - DNA, 720 bp, Artificial Sequence
  chemically treated genomic DNA (Homo sapiens) CpG-island No: 29335
tattttcgtattgtagatttattaggattagtaggaaggggaatatcgagtttagtcggttggttacggagtcgggggttattatgttcgagggttcgcgagtgaagaggaggaaaggtgtgtggtttattagtacgcgtcggcgtttcggtagtagttgcgttcgttcgtcgtcggttttcgtttaggttttagtggttttggagtttagtagaggaaggtagcggtgggcggggttcgggcgacgttacgttttagagcgtcgtcgttatttaatcgttttttttttggcggtttttttttcgggttcgtcggggtcgtggttcgcgttgataggttgcggaggtcgtcgtttcgtttcgtttttgataggataacgtggaagtacgagacgaggttgcgttcgtcggtcgtagagttgttagtaagttttaaatcgcggttgtcgttcggagggaagtagacggggagtcggtggcggtcgtcgagttcgtatgcgtaggttgtaaaggtttttttgggtcggtttcgtcgcgttaggttggcgagtgggattatttgattttttttaggttcgttagcgtggtgttacgagaggaaagcgtagtcgtagcgtacgaatgggaaggttaaatacggtttcggggagtttgagggaagttgtagggcgtttggaattggggtttcgagtgagtcggtaaaaatcgtttttcgttgagt

SEQ ID NO: 29336 - DNA, 720 bp, Artificial Sequence
  chemically treated genomic DNA (Homo sapiens) CpG-island No: 29336
actcaacgaaaaacgatttttaccgactcactcgaaaccccaattccaaacgccctacaacttccctcaaactccccgaaaccgtatttaaccttcccattcgtacgctacgactacgctttcctctcgtaacaccacgctaacgaacctaaaaaaaatcaaataatcccactcgccaacctaacgcgacgaaaccgacccaaaaaaacctttacaacctacgcatacgaactcgacgaccgccaccgactccccgtctacttccctccgaacgacaaccgcgatttaaaacttactaacaactctacgaccgacgaacgcaacctcgtctcgtacttccacgttatcctatcaaaaacgaaacgaaacgacgacctccgcaacctatcaacgcgaaccacgaccccgacgaacccgaaaaaaaaaccgccaaaaaaaaaacgattaaataacgacgacgctctaaaacgtaacgtcgcccgaaccccgcccaccgctaccttcctctactaaactccaaaaccactaaaacctaaacgaaaaccgacgacgaacgaacgcaactactaccgaaacgccgacgcgtactaataaaccacacacctttcctcctcttcactcgcgaaccctcgaacataataacccccgactccgtaaccaaccgactaaactcgatattccccttcctactaatcctaataaatctacaatacgaaaata

SEQ ID NO: 29337 - DNA, 728 bp, Artificial Sequence
  chemically treated genomic DNA (Homo sapiens) CpG-island No: 29337
agcgcgcgggcgtgcgagtagcgaaagggataggggtaaagtgagtgatttgtttttgggggtgatcgtcggagcgcggcgtgagtttttttttttgggatttcgtagttgattagtcgcgttgacggatagatagatagatatcgtttttagttttagttattatttttttttcggtcggcggcggatagtggacgcggcggcgagtcgcgggtaggggtcggagttcgcgttcggaggcggggtggagggggtcggggttcgcggcgtcgtattgaaatttttcgtttaatttttgggttgttttcgtttcggaggagtcgtggttcgcgcgggggaagtcgagtcgagcggagtcgcgagaagtgttagttcgggtcgggaggagtcgtagtcggaggagggggaggaggaagaagagaaggaagaggagagggggtcgtagtggcgattcggcgttcggaagtcgggtttatggacgggtgaggcggcggtgtgcgtagatagtgttttagtcgcgcgcgttttttaggttttggttcgggtttcgggtcggggaggaagagtagttcgtcgaggcgtcgaggagagcgggtcgttttatagttcgagtcggagagggagcgcgagtcgcgtcggtttcggtcgggttttcgaaattatgaattttttgttgttttgggtgtattggagttttgttttgttgttttatttttattatgttaagg

SEQ ID NO: 29338 - DNA, 728 bp, Artificial Sequence
  chemically treated genomic DNA (Homo sapiens) CpG-island No: 29338
ccttaacataataaaaataaaacaacaaaacaaaactccaatacacccaaaacaacaaaaaattcataatttcgaaaacccgaccgaaaccgacgcgactcgcgctccctctccgactcgaactataaaacgacccgctctcctcgacgcctcgacgaactactcttcctccccgacccgaaacccgaaccaaaacctaaaaaacgcgcgcgactaaaacactatctacgcacaccgccgcctcacccgtccataaacccgacttccgaacgccgaatcgccactacgaccccctctcctcttccttctcttcttcctcctccccctcctccgactacgactcctcccgacccgaactaacacttctcgcgactccgctcgactcgacttcccccgcgcgaaccacgactcctccgaaacgaaaacaacccaaaaattaaacgaaaaatttcaatacgacgccgcgaaccccgaccccctccaccccgcctccgaacgcgaactccgacccctacccgcgactcgccgccgcgtccactatccgccgccgaccgaaaaaaaaataataactaaaactaaaaacgatatctatctatctatccgtcaacgcgactaatcaactacgaaatcccaaaaaaaaaaactcacgccgcgctccgacgatcacccccaaaaacaaatcactcactttacccctatccctttcgctactcgcacgcccgcgcgct

SEQ ID NO: 29339 - DNA, 728 bp, Artificial Sequence
  chemically treated genomic DNA (Homo sapiens) CpG-island No: 29339
ttttggtatggtggaggtagagtagtaaggtaaggttttaatgtatttaagatagtagaaagtttatggtttcggaggttcgatcggggtcggcgcggttcgcgtttttttttcggttcgggttgtggggcggttcgtttttttcggcgtttcggcgagttatttttttttttcggttcgaggttcgggttagggtttggggagcgcgcgcggttggagtattgtttgcgtatatcgtcgttttattcgtttatgagttcggttttcgagcgtcgagtcgttattgcggttttttttttttttttttttttttttttttttttttttttttcggttgcggtttttttcggttcgagttagtatttttcgcggtttcgttcggttcggtttttttcgcgcggattacggttttttcgaagcgagaatagtttagaagttggacgaaaagttttagtgcgacgtcgcgagtttcgattttttttatttcgttttcgggcgcgggtttcggtttttgttcgcggttcgtcgtcgcgtttattgttcgtcgtcggtcggggaggaggtggtagttggggttgggggcggtgtttgtttgtttgttcgttagcgcgattggttagttgcgggattttaagggggagggtttacgtcgcgtttcggcggttatttttaaaagtaggttatttattttgtttttgtttttttcgttgttcgtacgttcgcgcgtt

SEQ ID NO: 29340 - DNA, 728 bp, Artificial Sequence
  chemically treated genomic DNA (Homo sapiens) CpG-island No: 29340
aacgcgcgaacgtacgaacaacgaaaaaaacaaaaacaaaataaataacctacttttaaaaataaccgccgaaacgcgacgtaaaccctcccccttaaaatcccgcaactaaccaatcgcgctaacgaacaaacaaacaaacaccgcccccaaccccaactaccacctcctccccgaccgacgacgaacaataaacgcgacgacgaaccgcgaacaaaaaccgaaacccgcgcccgaaaacgaaataaaaaaaatcgaaactcgcgacgtcgcactaaaacttttcgtccaacttctaaactattctcgcttcgaaaaaaccgtaatccgcgcgaaaaaaaccgaaccgaacgaaaccgcgaaaaatactaactcgaaccgaaaaaaaccgcaaccgaaaaaaaaaaaaaaaaaaaaaaaaaaaaaaaaaaaaaaaaaaccgcaataacgactcgacgctcgaaaaccgaactcataaacgaataaaacgacgatatacgcaaacaatactccaaccgcgcgcgctccccaaaccctaacccgaacctcgaaccgaaaaaaaaaaataactcgccgaaacgccgaaaaaaacgaaccgccccacaacccgaaccgaaaaaaaaacgcgaaccgcgccgaccccgatcgaacctccgaaaccataaactttctactatcttaaatacattaaaaccttaccttactactctacctccaccataccaaaa

SEQ ID NO: 29341 - DNA, 637 bp, Artificial Sequence
  chemically treated genomic DNA (Homo sapiens) CpG-island No: 29341
aaagacgtcgcgaggagagtttttgttttcgtttttttcgtttcgcgttttattcgtattagtttacgtcgttttcggaaattttataattaattttttttagagttcgtgcgcgcggcgagtgggttagaaggagaaatcgggataatcgtatttcgggattagagatgttttttttcgcgtttttttttggatagggagtattattttttgtatcgttcgttttagtttgcgagttgggcgattcgcggtgttagggcgagcggagtacgcgttttttttagttttttaagcgaatgatgtttttttagtttggacgcgtatagtattgggtagtggggtcggagataaagaagcggtcgtcggttacgcgtagggtcgcggttttggtcgtaaagtgaggtcgagagcgtaggaagagtacgggtgtgagtcgcgttcgtcgggtcgggtttttgcgcgtttcgtttcgttttcggattttagcgagtagtcgcgaggtaggatttagggatcgttcgggcggattttttggaacgtcggtttttttatttgcggggagtttcgatatttgcgtcgtttttttgcggagttttgggttttttgggtagttagtcgtttattggaagtttaggaa

SEQ ID NO: 29342 - DNA, 637 bp, Artificial Sequence
  chemically treated genomic DNA (Homo sapiens) CpG-island No: 29342
ttcctaaacttccaataaacgactaactacccaaaaaacccaaaactccgcaaaaaaacgacgcaaatatcgaaactccccgcaaataaaaaaaccgacgttccaaaaaatccgcccgaacgatccctaaatcctacctcgcgactactcgctaaaatccgaaaacgaaacgaaacgcgcaaaaacccgacccgacgaacgcgactcacacccgtactcttcctacgctctcgacctcactttacgaccaaaaccgcgaccctacgcgtaaccgacgaccgcttctttatctccgaccccactacccaatactatacgcgtccaaactaaaaaaacatcattcgcttaaaaaactaaaaaaaacgcgtactccgctcgccctaacaccgcgaatcgcccaactcgcaaactaaaacgaacgatacaaaaaataatactccctatccaaaaaaaaacgcgaaaaaaaacatctctaatcccgaaatacgattatcccgatttctccttctaacccactcgccgcgcgcacgaactctaaaaaaaattaattataaaatttccgaaaacgacgtaaactaatacgaataaaacgcgaaacgaaaaaaacgaaaacaaaaactctcctcgcgacgtcttt

SEQ ID NO: 29343 - DNA, 637 bp, Artificial Sequence
  chemically treated genomic DNA (Homo sapiens) CpG-island No: 29343
tttttgagtttttagtaggcgattgattgtttaagagatttagggtttcgtaaggagacggcgtaggtgtcggggtttttcgtaggtgaggaggtcgacgttttaggaggttcgttcgggcggtttttgagttttgtttcgcggttgttcgttgggattcgagggcggaacgggacgcgtaggaattcggttcgacgggcgcggtttatattcgtgttttttttgcgttttcggttttattttgcggttagagtcgcggttttgcgcgtggtcggcggtcgtttttttattttcgattttattgtttagtattgtacgcgtttagattaaagaaatattattcgtttaaggggttgggaaaagcgcgtgtttcgttcgttttggtatcgcgggtcgtttagttcgtagattgggacgggcggtgtaagaggtggtgttttttgtttaggaggggacgcggaagagggtatttttggtttcgggatgcgattgtttcggtttttttttttggtttattcgtcgcgcgtacgaattttaggggaagttggttgtaaagttttcgagagcggcgtgggttggtgcgagtgaagcgcggggcgggggaggcgaggatagaagtttttttcgcggcgttttt

SEQ ID NO: 29344 - DNA, 637 bp, Artificial Sequence
  chemically treated genomic DNA (Homo sapiens) CpG-island No: 29344
aaaaacgccgcgaaaaaaacttctatcctcgcctcccccgccccgcgcttcactcgcaccaacccacgccgctctcgaaaactttacaaccaacttcccctaaaattcgtacgcgcgacgaataaaccaaaaaaaaaaaccgaaacaatcgcatcccgaaaccaaaaataccctcttccgcgtcccctcctaaacaaaaaacaccacctcttacaccgcccgtcccaatctacgaactaaacgacccgcgataccaaaacgaacgaaacacgcgcttttcccaaccccttaaacgaataatatttctttaatctaaacgcgtacaatactaaacaataaaatcgaaaataaaaaaacgaccgccgaccacgcgcaaaaccgcgactctaaccgcaaaataaaaccgaaaacgcaaaaaaaacacgaatataaaccgcgcccgtcgaaccgaattcctacgcgtcccgttccgccctcgaatcccaacgaacaaccgcgaaacaaaactcaaaaaccgcccgaacgaacctcctaaaacgtcgacctcctcacctacgaaaaaccccgacacctacgccgtctccttacgaaaccctaaatctcttaaacaatcaatcgcctactaaaaactcaaaaa

SEQ ID NO: 29345 - DNA, 921 bp, Artificial Sequence
  chemically treated genomic DNA (Homo sapiens) CpG-island No: 29345
ttattcgcgttgttatttatattatttttttgtttataaagagttcgcgtttgggacgtttcgtaggttgaagggaggtttgggcgttcgcgattcgtttgtttttttttttttcgcgggttttttttttttttattttttttcgttattattttttttttttttttttcgcgaatttagtttatttttcgttttaggatttcggttcggttttagtttttcggattaggtcgggttacgtgggtttagggttacgtgtcgttgcgggttacgtgtcgttgcgggttacgtgtcggtttgtattacgcgtgagggggcgcgcggtgttggaagttgtcgtatttgcggggagtcgagtcgtcggcgttcgacgcgcgcgttttcgcgagattcgcgggattacgtgacgttcgggcgcggcgtagtttacgtgataagcgttgtcggtcgcggtgtttttttcgtgtcggcgtcgtagtggtcgggttttttgcgtttggtaacgtcgttgtttttaacgttagtttttggcgttcgcgtttcgttatcgtagcgttcggtagttcgcggtttaatcgtcgttcgcgttttcgtttttcgtatcgtattcggtcgtttcgcgttatggcggttttcggtagcgttcggcgatttttgttgttgttattgttgttgttgttgttcggtgagggggtcgaggcggggtttgggagcggcgggatcgggcggagtcgaggtttttgggttttgagggcgggggattgtcgggtcgttgtttcgcgggtcgtttcgtatttattgtttttggtttcggtcggttttgttcgcgggcgggtgtttttttcggggtcgtagggtcggagcggagtttaatggtaggtgtttgggggattaggaggttttattttaggatttggtttt

SEQ ID NO: 29346 - DNA, 921 bp, Artificial Sequence
  chemically treated genomic DNA (Homo sapiens) CpG-island No: 29346
aaaaccaaatcctaaaataaaacctcctaatcccccaaacacctaccattaaactccgctccgaccctacgaccccgaaaaaaacacccgcccgcgaacaaaaccgaccgaaaccaaaaacaataaatacgaaacgacccgcgaaacaacgacccgacaatcccccgccctcaaaacccaaaaacctcgactccgcccgatcccgccgctcccaaaccccgcctcgaccccctcaccgaacaacaacaacaacaataacaacaacaaaaatcgccgaacgctaccgaaaaccgccataacgcgaaacgaccgaatacgatacgaaaaacgaaaacgcgaacgacgattaaaccgcgaactaccgaacgctacgataacgaaacgcgaacgccaaaaactaacgttaaaaacaacgacgttaccaaacgcaaaaaacccgaccactacgacgccgacacgaaaaaaacaccgcgaccgacaacgcttatcacgtaaactacgccgcgcccgaacgtcacgtaatcccgcgaatctcgcgaaaacgcgcgcgtcgaacgccgacgactcgactccccgcaaatacgacaacttccaacaccgcgcgccccctcacgcgtaatacaaaccgacacgtaacccgcaacgacacgtaacccgcaacgacacgtaaccctaaacccacgtaacccgacctaatccgaaaaactaaaaccgaaccgaaatcctaaaacgaaaaataaactaaattcgcgaaaaaaaaaaaaaaaaaataataacgaaaaaaaataaaaaaaaaaaaaacccgcgaaaaaaaaaaaaacaaacgaatcgcgaacgcccaaacctcccttcaacctacgaaacgtcccaaacgcgaactctttataaacaaaaaaataatataaataacaacgcgaataa

SEQ ID NO: 29347 - DNA, 921 bp, Artificial Sequence
  chemically treated genomic DNA (Homo sapiens) CpG-island No: 29347
ggagttaggttttgggatgagattttttggttttttaagtatttgttattgagtttcgtttcgattttacgatttcgagagaaatattcgttcgcgggtagagtcggtcgggattaggagtagtgggtgcggggcgattcgcgggataacgattcggtagtttttcgtttttaagatttagggatttcggtttcgttcggtttcgtcgtttttaggtttcgtttcgatttttttatcgagtagtagtaatagtagtagtagtagtaggggtcgtcgggcgttgtcgggggtcgttatggcgcgaggcggtcgggtacggtgcggggagcgggggcgcgggcggcggttgggtcgcggattgtcgggcgttgcggtggcggggcgcgggcgttaagggttggcgttagagatagcggcgttattagacgtaagaggttcggttattgcgacgtcggtacgaagaagatatcgcggtcggtagcgtttgttacgtgagttgcgtcgcgttcgggcgttacgtgatttcgcgggtttcgcgagagcgcgcgcgtcgagcgtcggcggttcggtttttcgtaggtgcggtagtttttagtatcgcgcgtttttttacgcgtgatgtaggtcgatacgtgattcgtagcggtacgtgattcgtagcggtacgtgattttggatttacgtgattcggtttggttcgggggattggggtcgagtcgaggttttgaaacgggaagtgggttgggttcgcggaaaaggaagaggaagagtagtggcgggagaaagtgaggaaagaggaagttcgcgaggggagaaagggtagacggatcgcggacgtttaggtttttttttagtttgcgaggcgttttaaacgcgggttttttatggataggagggtggtgtgggtggtagcgcgggtga

SEQ ID NO: 29348 - DNA, 921 bp, Artificial Sequence
  chemically treated genomic DNA (Homo sapiens) CpG-island No: 29348
tcacccgcgctaccacccacaccaccctcctatccataaaaaacccgcgtttaaaacgcctcgcaaactaaaaaaaaacctaaacgtccgcgatccgtctaccctttctcccctcgcgaacttcctctttcctcactttctcccgccactactcttcctcttccttttccgcgaacccaacccacttcccgtttcaaaacctcgactcgaccccaatcccccgaaccaaaccgaatcacgtaaatccaaaatcacgtaccgctacgaatcacgtaccgctacgaatcacgtatcgacctacatcacgcgtaaaaaaacgcgcgatactaaaaactaccgcacctacgaaaaaccgaaccgccgacgctcgacgcgcgcgctctcgcgaaacccgcgaaatcacgtaacgcccgaacgcgacgcaactcacgtaacaaacgctaccgaccgcgatatcttcttcgtaccgacgtcgcaataaccgaacctcttacgtctaataacgccgctatctctaacgccaacccttaacgcccgcgccccgccaccgcaacgcccgacaatccgcgacccaaccgccgcccgcgcccccgctccccgcaccgtacccgaccgcctcgcgccataacgacccccgacaacgcccgacgacccctactactactactactattactactactcgataaaaaaatcgaaacgaaacctaaaaacgacgaaaccgaacgaaaccgaaatccctaaatcttaaaaacgaaaaactaccgaatcgttatcccgcgaatcgccccgcacccactactcctaatcccgaccgactctacccgcgaacgaatatttctctcgaaatcgtaaaatcgaaacgaaactcaataacaaatacttaaaaaaccaaaaaatctcatcccaaaacctaactcc

SEQ ID NO: 29349 - DNA, 1129 bp, Artificial Sequence
  chemically treated genomic DNA (Homo sapiens) CpG-island No: 29349
aagtcgttttttttgaagtgggagatggtcggggaggcgtagtttcgtcgtttttaagcggcggttttcgagcggcgattattttattattttttaatttagtttttttcggtttttcgtttttttttcgatttcgttttcgaaattattagtttaatttatttttttttattttagatattttgttaggcgatagttacgtcgattttggtgttcgcggggtttagtttaaagaagggagaagtcgtttgtttcgtgtagcgttcgttataacggtttttttaatcgtttttagcggtgataatcgtttagggagttgcgtagtatagttattggtttggggggatgggagggaacgagtaagaagtggggggcggagcgagaattgcgaaggcggtcggttttattttcgcgagacgggaaagtcggtttcgtatggcgttggcggtacgtagcgcgtttgcgcggtggtgggttgcgtagttgttgggggcgaggtagatcgagtagaggttgttttagttaaagagttgtagcgcgtatcgttttttttgtttacgttagaattatttagtttttagagcgtattattttgtcgtttcggggcgatggtaatggtagttttgttagtgtgtagaaggaatcgtgtcgtagcgttttggagaagtttttcggtgatttgtttttatcgtgaataaattttgtgagggtttcgttttggttaggtatcgacggcgcggaaagggttttacgtggttcgatcggtaaacgcggggcggattttttggtttattatgtttgtattgtgcggtgaaaaataggagtgtttttgggtcgcgaagatgaaagcgtttattggggtcgatttcggttttcgggttgggtgttcgttttttttttttggtttagagttgttggtcgttcgttagcgcgtttcgttttaatgtgtcgcgcgggattcgggttttttgggtgtatttatgtttattacgttatcgttttttttgtaaatttttttttttttttttttttggttttcgcgtttttatttttttcgtcgttagtgtttcggagattgattagtttgtggaggtcgacgttgggttttttttatagttttgcgttgttg

SEQ ID NO: 29350 - DNA, 1129 bp, Artificial Sequence
  chemically treated genomic DNA (Homo sapiens) CpG-island No: 29350
caacaacgcaaaactataaaaaaaacccaacgtcgacctccacaaactaatcaatctccgaaacactaacgacgaaaaaaataaaaacgcgaaaaccaaaaaaaaaaaaaaaaaaaaatttacaaaaaaaacgataacgtaataaacataaatacacccaaaaaacccgaatcccgcgcgacacattaaaacgaaacgcgctaacgaacgaccaacaactctaaaccaaaaaaaaaaaacgaacacccaacccgaaaaccgaaatcgaccccaataaacgctttcatcttcgcgacccaaaaacactcctatttttcaccgcacaatacaaacataataaaccaaaaaatccgccccgcgtttaccgatcgaaccacgtaaaaccctttccgcgccgtcgatacctaaccaaaacgaaaccctcacaaaatttattcacgataaaaacaaatcaccgaaaaacttctccaaaacgctacgacacgattccttctacacactaacaaaactaccattaccatcgccccgaaacgacaaaataatacgctctaaaaactaaataattctaacgtaaacaaaaaaaacgatacgcgctacaactctttaactaaaacaacctctactcgatctacctcgcccccaacaactacgcaacccaccaccgcgcaaacgcgctacgtaccgccaacgccatacgaaaccgactttcccgtctcgcgaaaataaaaccgaccgccttcgcaattctcgctccgccccccacttcttactcgttccctcccatccccccaaaccaataactatactacgcaactccctaaacgattatcaccgctaaaaacgattaaaaaaaccgttataacgaacgctacacgaaacaaacgacttctcccttctttaaactaaaccccgcgaacaccaaaatcgacgtaactatcgcctaacaaaatatctaaaataaaaaaaaataaattaaactaataatttcgaaaacgaaatcgaaaaaaaaacgaaaaaccgaaaaaaactaaattaaaaaataataaaataatcgccgctcgaaaaccgccgcttaaaaacgacgaaactacgcctccccgaccatctcccacttcaaaaaaaacgactt

SEQ ID NO: 29351 - DNA, 1129 bp, Artificial Sequence
  chemically treated genomic DNA (Homo sapiens) CpG-island No: 29351
taataacgtaaaattataaaaaaaatttaacgtcggtttttataggttaattagttttcgaggtattgacggcgggagagatgaaaacgcgaaggttagaggagaaaaagaggaaggatttgtagagagaacggtaacgtggtggatatgaatatatttaagaaattcggatttcgcgcggtatattgggacgaagcgcgttggcgggcggttagtaattttgggttaggggaaggaggcggatatttagttcgagagtcgaaatcggttttagtggacgtttttattttcgcggtttagaaatatttttattttttatcgtataatgtaaatatggtggattagaaaattcgtttcgcgtttgtcggtcgaattacgtggggtttttttcgcgtcgtcgatgtttagttagggcggggtttttatagaatttgtttacggtgggggtagattatcggagaatttttttagagcgttacggtacggttttttttatatattggtagaattgttattgttatcgtttcgaggcggtagaatggtacgttttgaaaattggatggttttaacgtaagtaagaaaaacggtgcgcgttgtagttttttaattggaatagtttttgttcggtttatttcgtttttaatagttgcgtaatttattatcgcgtaggcgcgttgcgtgtcgttagcgttatgcgaaatcgattttttcgtttcgcgagagtggggtcggtcgttttcgtagttttcgtttcgttttttattttttgttcgtttttttttatttttttaagttagtagttgtgttgcgtagttttttaagcggttgttatcgttggagacggttgggagaatcgttgtggcgagcgttatacgaggtaaacgattttttttttttttgaattggatttcgcgagtattagagtcggcgtaattatcgtttgatagggtatttgaagtaaaagggggtaggttgggttggtggtttcgagagcggagtcgggagaaggacgaaaggtcgggaggggttgggttggggggtagtggggtggtcgtcgttcggaggtcgtcgtttggaagcggcggggttgcgttttttcgattattttttattttagggagggcggttt

SEQ ID NO: 29352 - DNA, 1129 bp, Artificial Sequence
  chemically treated genomic DNA (Homo sapiens) CpG-island No: 29352
aaaccgccctccctaaaataaaaaataatcgaaaaaacgcaaccccgccgcttccaaacgacgacctccgaacgacgaccaccccactaccccccaacccaacccctcccgacctttcgtccttctcccgactccgctctcgaaaccaccaacccaacctacccccttttacttcaaataccctatcaaacgataattacgccgactctaatactcgcgaaatccaattcaaaaaaaaaaaaaatcgtttacctcgtataacgctcgccacaacgattctcccaaccgtctccaacgataacaaccgcttaaaaaactacgcaacacaactactaacttaaaaaaataaaaaaaaacgaacaaaaaataaaaaacgaaacgaaaactacgaaaacgaccgaccccactctcgcgaaacgaaaaaatcgatttcgcataacgctaacgacacgcaacgcgcctacgcgataataaattacgcaactattaaaaacgaaataaaccgaacaaaaactattccaattaaaaaactacaacgcgcaccgtttttcttacttacgttaaaaccatccaattttcaaaacgtaccattctaccgcctcgaaacgataacaataacaattctaccaatatataaaaaaaaccgtaccgtaacgctctaaaaaaattctccgataatctacccccaccgtaaacaaattctataaaaaccccgccctaactaaacatcgacgacgcgaaaaaaaccccacgtaattcgaccgacaaacgcgaaacgaattttctaatccaccatatttacattatacgataaaaaataaaaatatttctaaaccgcgaaaataaaaacgtccactaaaaccgatttcgactctcgaactaaatatccgcctccttcccctaacccaaaattactaaccgcccgccaacgcgcttcgtcccaatataccgcgcgaaatccgaatttcttaaatatattcatatccaccacgttaccgttctctctacaaatccttcctctttttctcctctaaccttcgcgttttcatctctcccgccgtcaatacctcgaaaactaattaacctataaaaaccgacgttaaattttttttataattttacgttatta

SEQ ID NO: 29353 - DNA, 628 bp, Artificial Sequence
  chemically treated genomic DNA (Homo sapiens) CpG-island No: 29353
gggtcgttatcgttcgtttgggttcggttcgtagaaggtaggagttcggatcggtagagtcgaggttttatgtgagtcgcgcgggaggcgtagagggggttgtatcggacggaaggttgtatcggtggcgggcgtaagtagcggtcgttttttcggttgtgcggtcggagggttcgggcggtagtattttcgtttattcgggcggttttggttcgcggatttcgttttagttttatatttttttttcgtcgatattaggtcgcgttcgcgtgacggggtcgaaaacgtcggtatttttcggtcgtcgcgtcggtagtttcggggggtgattgtagttcggtcggcgtttcgtcgttcgtttcgtttagttcggggtcgcggtgacgggaggcggcggttaatttcggtcgattataagtcgacgagaattagttcggcgtcggtttttcgttttttttcgcgtcgtcgggtcggcgcggttaggcgggtttagatcgcggaagtatatttatttttatatcgcggtttttgtttttgaagtttttgatgcggtggttttttaagttggggttttcggttatggttgcgcgcggtttcggcggcggttatttttgcggttgcggcggcg

SEQ ID NO: 29354 - DNA, 628 bp, Artificial Sequence
  chemically treated genomic DNA (Homo sapiens) CpG-island No: 29354
cgccgccgcaaccgcaaaaataaccgccgccgaaaccgcgcgcaaccataaccgaaaaccccaacttaaaaaaccaccgcatcaaaaacttcaaaaacaaaaaccgcgatataaaaataaatatacttccgcgatctaaacccgcctaaccgcgccgacccgacgacgcgaaaaaaaacgaaaaaccgacgccgaactaattctcgtcgacttataatcgaccgaaattaaccgccgcctcccgtcaccgcgaccccgaactaaacgaaacgaacgacgaaacgccgaccgaactacaatcaccccccgaaactaccgacgcgacgaccgaaaaataccgacgttttcgaccccgtcacgcgaacgcgacctaatatcgacgaaaaaaaaatataaaactaaaacgaaatccgcgaaccaaaaccgcccgaataaacgaaaatactaccgcccgaaccctccgaccgcacaaccgaaaaaacgaccgctacttacgcccgccaccgatacaaccttccgtccgatacaaccccctctacgcctcccgcgcgactcacataaaacctcgactctaccgatccgaactcctaccttctacgaaccgaacccaaacgaacgataacgaccc

SEQ ID NO: 29355 - DNA, 628 bp, Artificial Sequence
  chemically treated genomic DNA (Homo sapiens) CpG-island No: 29355
cgtcgtcgtagtcgtaggagtagtcgtcgtcggagtcgcgcgtagttatggtcgagaattttagtttggagaattatcgtattaagagttttaagaataagggtcgcgatgtggaagtgagtgtgttttcgcggtttgggttcgtttggtcgcgtcggttcggcgacgcggggaggggcggggggtcggcgtcgggttggttttcgtcggtttgtggtcggtcggagttggtcgtcgtttttcgttatcgcggtttcgggttgggcggagcgggcggcgagacgtcggtcgggttgtagttatttttcggagttgtcggcgcggcgatcgggaaatgtcggcgttttcggtttcgttacgcgggcgcggtttggtgtcggcgaggaggggatgtggagttgaggcggggttcgcgggttagggtcgttcggatgaacggggatgttgtcgttcgggtttttcgatcgtatagtcgagggggcggtcgttgtttgcgttcgttatcggtgtaatttttcgttcggtgtagttttttttgcgtttttcgcgcggtttatatggagtttcggttttgtcggttcgggtttttattttttgcgagtcgggtttaggcgggcggtggcggttt

SEQ ID NO: 29356 - DNA, 628 bp, Artificial Sequence
  chemically treated genomic DNA (Homo sapiens) CpG-island No: 29356
aaaccgccaccgcccgcctaaacccgactcgcaaaaaataaaaacccgaaccgacaaaaccgaaactccatataaaccgcgcgaaaaacgcaaaaaaaactacaccgaacgaaaaattacaccgataacgaacgcaaacaacgaccgccccctcgactatacgatcgaaaaacccgaacgacaacatccccgttcatccgaacgaccctaacccgcgaaccccgcctcaactccacatcccctcctcgccgacaccaaaccgcgcccgcgtaacgaaaccgaaaacgccgacatttcccgatcgccgcgccgacaactccgaaaaataactacaacccgaccgacgtctcgccgcccgctccgcccaacccgaaaccgcgataacgaaaaacgacgaccaactccgaccgaccacaaaccgacgaaaaccaacccgacgccgaccccccgcccctccccgcgtcgccgaaccgacgcgaccaaacgaacccaaaccgcgaaaacacactcacttccacatcgcgacccttattcttaaaactcttaatacgataattctccaaactaaaattctcgaccataactacgcgcgactccgacgacgactactcctacgactacgacgacg

SEQ ID NO: 29357 - DNA, 511 bp, Artificial Sequence
  chemically treated genomic DNA (Homo sapiens) CpG-island No: 29357
ttcgttgcgcgttaatcgacgttttagtttttaacgagataaatatagttaagttcggttttttcggcgggtagttgtgcgcgtacgtgtagtcgtagttaagtgtcggaggtatttcgggatttgtagtttatacgttttttgagggacgagagggttgaggagtgggtaggggcgtaggagagattttgcgtatgtgtaaatatgtgtcgagatcgaggaggttattgggtaatgtagttttttgttttttgggttgggaatgacggaggcggggtaaggggcggatttttcgttttcgttagcgttaattatggatatggggcggggttggaggattaggtatttttgtacgttttgtttcgtcggaagtggaggtcgcgggttttgagcgggtgaggcgcgcgggaatatcggcgtcgggattcggatgggggcgggtgggggacgttgtagttggggttatttgaggggagtttatggggtttgaaaggtatttgttaggcggtat

SEQ ID NO: 29358 - DNA, 511 bp, Artificial Sequence
  chemically treated genomic DNA (Homo sapiens) CpG-island No: 29358
ataccgcctaacaaatacctttcaaaccccataaactcccctcaaataaccccaactacaacgtcccccacccgcccccatccgaatcccgacgccgatattcccgcgcgcctcacccgctcaaaacccgcgacctccacttccgacgaaacaaaacgtacaaaaatacctaatcctccaaccccgccccatatccataattaacgctaacgaaaacgaaaaatccgccccttaccccgcctccgtcattcccaacccaaaaaacaaaaaactacattacccaataacctcctcgatctcgacacatatttacacatacgcaaaatctctcctacgcccctacccactcctcaaccctctcgtccctcaaaaaacgtataaactacaaatcccgaaatacctccgacacttaactacgactacacgtacgcgcacaactacccgccgaaaaaaccgaacttaactatatttatctcgttaaaaactaaaacgtcgattaacgcgcaacgaa

SEQ ID NO: 29359 - DNA, 511 bp, Artificial Sequence
  chemically treated genomic DNA (Homo sapiens) CpG-island No: 29359
gtatcgtttgatagatgttttttaggttttatgggttttttttaaatggttttagttgtagcgttttttattcgtttttattcgaatttcggcgtcggtgttttcgcgcgttttattcgtttagagttcgcggtttttattttcggcggggtaggacgtgtagaggtgtttagttttttagtttcgttttatatttatgattgacgttggcgaggacgaggagttcgttttttgtttcgttttcgttatttttagtttaaaaaataaaggattgtattatttagtggttttttcggtttcgatatatatttgtatatgcgtagaattttttttacgtttttgtttattttttagttttttcgttttttaggaaacgtatggattataagtttcgaaatgttttcggtatttagttacgattgtacgtgcgcgtatagttgttcgtcggaagaatcgagtttggttgtgtttatttcgttggggattaaggcgtcggttggcgcgtaacggg

SEQ ID NO: 29360 - DNA, 511 bp, Artificial Sequence
  chemically treated genomic DNA (Homo sapiens) CpG-island No: 29360
cccgttacgcgccaaccgacgccttaatccccaacgaaataaacacaaccaaactcgattcttccgacgaacaactatacgcgcacgtacaatcgtaactaaataccgaaaacatttcgaaacttataatccatacgtttcctaaaaaacgaaaaaactaaaaaataaacaaaaacgtaaaaaaaattctacgcatatacaaatatatatcgaaaccgaaaaaaccactaaataatacaatcctttattttttaaactaaaaataacgaaaacgaaacaaaaaacgaactcctcgtcctcgccaacgtcaatcataaatataaaacgaaactaaaaaactaaacacctctacacgtcctaccccgccgaaaataaaaaccgcgaactctaaacgaataaaacgcgcgaaaacaccgacgccgaaattcgaataaaaacgaataaaaaacgctacaactaaaaccatttaaaaaaaacccataaaacctaaaaaacatctatcaaacgatac

SEQ ID NO: 29361 - DNA, 501 bp, Artificial Sequence
  chemically treated genomic DNA (Homo sapiens) CpG-island No: 29361
cgttggcgttgaacgttgagcgtaggcggggaggttcggtatttttcgattttagtagcgtttttaaaatcgaagtttagtcggttagagaggatatttacgtgtatacggttttgatgttcgttttgtcgtttaggttttgcgggtagttggttatgttgtcgtttagtttgagtaaatagttcgaaaagtttttgaagatcgtatcgtatttgttcgttgtttttacggtttgtattagatacgttgcggggaggagggaatatcggttagtagcgttacgatttcgttttgtcgtttattgtttttttttgcgagattttggtttcgcgcggttttatcgtatcgggcggttttttttagcgtttagtttcggggttcgttagtgttaaaggtgaatgaaagacgtgatttaggaatgttcgatttgtagttaacgttgcgtttagtgtaaattgtcggtgtgtgagtaggtgtgggtgggtgggaggtaggtgagtt

SEQ ID NO: 29362 - DNA, 501 bp, Artificial Sequence
  chemically treated genomic DNA (Homo sapiens) CpG-island No: 29362
aactcacctacctcccacccacccacacctactcacacaccgacaatttacactaaacgcaacgttaactacaaatcgaacattcctaaatcacgtctttcattcacctttaacactaacgaaccccgaaactaaacgctaaaaaaaaccgcccgatacgataaaaccgcgcgaaaccaaaatctcgcaaaaaaaaacaataaacgacaaaacgaaatcgtaacgctactaaccgatattccctcctccccgcaacgtatctaatacaaaccgtaaaaacaacgaacaaatacgatacgatcttcaaaaacttttcgaactatttactcaaactaaacgacaacataaccaactacccgcaaaacctaaacgacaaaacgaacatcaaaaccgtatacacgtaaatatcctctctaaccgactaaacttcgattttaaaaacgctactaaaatcgaaaaataccgaacctccccgcctacgctcaacgttcaacgccaacg

SEQ ID NO: 29363 - DNA, 501 bp, Artificial Sequence
  chemically treated genomic DNA (Homo sapiens) CpG-island No: 29363
gatttatttattttttatttatttatatttgtttatatatcgataatttgtattagacgtagcgttagttgtaggtcgggtatttttgggttacgttttttatttatttttaatattggcgagtttcgaggttgggcgttgggagaggtcgttcgatgcgatgaggtcgcgcggagttagggtttcgtaggaaagggtagtgggcggtagggcggggtcgtggcgttgttgatcggtgttttttttttttcgtagcgtatttggtgtaggtcgtgagagtagcgggtaagtgcgatgcggtttttaagggtttttcggattgtttgtttaagttgggcgatagtatggttaattattcgtagggtttggacgataagacgaatattaagatcgtgtgtacgtaagtgttttttttggtcggttggatttcggttttgggggcgttattgaggtcggagagtgtcgagttttttcgtttgcgtttagcgtttagcgttagcg

SEQ ID NO: 29364 - DNA, 501 bp, Artificial Sequence
  chemically treated genomic DNA (Homo sapiens) CpG-island No: 29364
cgctaacgctaaacgctaaacgcaaacgaaaaaactcgacactctccgacctcaataacgcccccaaaaccgaaatccaaccgaccaaaaaaaacacttacgtacacacgatcttaatattcgtcttatcgtccaaaccctacgaataattaaccatactatcgcccaacttaaacaaacaatccgaaaaacccttaaaaaccgcatcgcacttacccgctactctcacgacctacaccaaatacgctacgaaaaaaaaaaaacaccgatcaacaacgccacgaccccgccctaccgcccactaccctttcctacgaaaccctaactccgcgcgacctcatcgcatcgaacgacctctcccaacgcccaacctcgaaactcgccaatattaaaaataaataaaaaacgtaacccaaaaatacccgacctacaactaacgctacgtctaatacaaattatcgatatataaacaaatataaataaataaaaaataaataaatc

SEQ ID NO: 29365 - DNA, 531 bp, Artificial Sequence
  chemically treated genomic DNA (Homo sapiens) CpG-island No: 29365
ttaggttgcgggcgcgcggttgtggttattttttttcgttttgaggtcgacgaattcggttggaagttgagtgtttagcggtttaaagtagttcgggcgtcgggagggcgttagagaagtatagcgttagggcggggaagaaagggtgaattttagaatcgaaattcgtattggcgtttacgattttgggcgtcggtttggttttcggtagttttttggcggttgcgtttgtgtgtgaatgtgtttcgggaggatcggatattttaatttttcggtttttaacgcgggcgtttgttcgcgagcgtcgggttagacgtcgaagaggaaggtgatcgaattcgtagtagttttcgagagcgtattcgtttgtaaattgttgtaggaagagcgaggcgggttttgcgttttttaattcggaacgggaagtattggggaagggatcgaggttaatttcgattttcgttggggtagatacgtaaatttttttaaattttcgagtttattttatagcgaatattaaatatttttgcg

SEQ ID NO: 29366 - DNA, 531 bp, Artificial Sequence
  chemically treated genomic DNA (Homo sapiens) CpG-island No: 29366
cgcaaaaatatttaatattcgctataaaataaactcgaaaatttaaaaaaatttacgtatctaccccaacgaaaatcgaaattaacctcgatcccttccccaatacttcccgttccgaattaaaaaacgcaaaacccgcctcgctcttcctacaacaatttacaaacgaatacgctctcgaaaactactacgaattcgatcaccttcctcttcgacgtctaacccgacgctcgcgaacaaacgcccgcgttaaaaaccgaaaaattaaaatatccgatcctcccgaaacacattcacacacaaacgcaaccgccaaaaaactaccgaaaaccaaaccgacgcccaaaatcgtaaacgccaatacgaatttcgattctaaaattcaccctttcttccccgccctaacgctatacttctctaacgccctcccgacgcccgaactactttaaaccgctaaacactcaacttccaaccgaattcgtcgacctcaaaacgaaaaaaaataaccacaaccgcgcgcccgcaacctaa

SEQ ID NO: 29367 - DNA, 531 bp, Artificial Sequence
  chemically treated genomic DNA (Homo sapiens) CpG-island No: 29367
cgtaagggtatttaatgttcgttgtaaggtgaattcggaggtttgagaaggtttacgtatttgttttagcggaggtcgaagttaatttcggttttttttttagtgtttttcgtttcggattaaaaagcgtaaggttcgtttcgttttttttgtagtaatttgtaaacgggtacgttttcggaagttgttacgggttcggttattttttttttcggcgtttggttcggcgttcgcggataggcgttcgcgttgggggtcgggggattgaggtgttcggttttttcgggatatatttatatataagcgtagtcgttagaaagttgtcgaggattaggtcggcgtttagggtcgtgggcgttagtgcggatttcgattttgagatttattttttttttttcgttttaacgttgtgtttttttggcgttttttcggcgttcgggttgttttgggtcgttaggtatttagtttttagtcgggttcgtcggttttagggcggaaagagatggttatagtcgcgcgttcgtagtttgg

SEQ ID NO: 29368 - DNA, 531 bp, Artificial Sequence
  chemically treated genomic DNA (Homo sapiens) CpG-island No: 29368
ccaaactacgaacgcgcgactataaccatctctttccgccctaaaaccgacgaacccgactaaaaactaaatacctaacgacccaaaacaacccgaacgccgaaaaaacgccaaaaaaacacaacgttaaaacgaaaaaaaaaaaataaatctcaaaatcgaaatccgcactaacgcccacgaccctaaacgccgacctaatcctcgacaactttctaacgactacgcttatatataaatatatcccgaaaaaaccgaacacctcaatcccccgacccccaacgcgaacgcctatccgcgaacgccgaaccaaacgccgaaaaaaaaaataaccgaacccgtaacaacttccgaaaacgtacccgtttacaaattactacaaaaaaaacgaaacgaaccttacgctttttaatccgaaacgaaaaacactaaaaaaaaaaccgaaattaacttcgacctccgctaaaacaaatacgtaaaccttctcaaacctccgaattcaccttacaacgaacattaaatacccttacg

SEQ ID NO: 29369 - DNA, 512 bp, Artificial Sequence
  chemically treated genomic DNA (Homo sapiens) CpG-island No: 29369
cggcgtgttttttcggtgcgtcgtttcgaggttcgagcgttttcgcgtgcgtggttgacggtttggagggcgttttttttgtcgcggtttttttgtagcggggggataaagagggcggcgggcggttggcggttttgagcgtagttcggtcggtagtgtagggtttgcgaagttcgcgggtcggcgtaggggtgggagtcgggttcggggtttagagagatttttcggggtcggggttgcggtttcgcgggtttttttatcggtcgggtttttcggtaattattagagagcgggggcgttcggggaggttcggcgttttataaggtttacgcgtattcgcgggtcgcggggtcgtcgtcggtcgtttaggcgcggagtttttcgggggttattcggtcgtcgggttcgcgggacgtacggggtcgttaggggaggataataagttttaggttttgtttttgcgtttcgttcggtttttttcgcggggttgcgtagtttattcggttattttg

SEQ ID NO: 29370 - DNA, 512 bp, Artificial Sequence
  chemically treated genomic DNA (Homo sapiens) CpG-island No: 29370
caaaataaccgaataaactacgcaaccccgcgaaaaaaaccgaacgaaacgcaaaaacaaaacctaaaacttattatcctcccctaacgaccccgtacgtcccgcgaacccgacgaccgaataacccccgaaaaactccgcgcctaaacgaccgacgacgaccccgcgacccgcgaatacgcgtaaaccttataaaacgccgaacctccccgaacgcccccgctctctaataattaccgaaaaacccgaccgataaaaaaacccgcgaaaccgcaaccccgaccccgaaaaatctctctaaaccccgaacccgactcccacccctacgccgacccgcgaacttcgcaaaccctacactaccgaccgaactacgctcaaaaccgccaaccgcccgccgccctctttatccccccgctacaaaaaaaccgcgacaaaaaaaacgccctccaaaccgtcaaccacgcacgcgaaaacgctcgaacctcgaaacgacgcaccgaaaaaacacgccg

SEQ ID NO: 29371 - DNA, 512 bp, Artificial Sequence
  chemically treated genomic DNA (Homo sapiens) CpG-island No: 29371
taggatggtcgagtgggttgcgtagtttcgcgggggaggtcgggcggggcgtagggatagggtttgaggtttgttgtttttttttggcggtttcgtgcgtttcgcgggttcggcggtcgggtgattttcgagaggtttcgcgtttgggcggtcggcggcgatttcgcggttcgcgaatacgcgtggattttgtggaacgtcgggttttttcgggcgttttcgttttttggtagttgtcgggagattcggtcggtggggaagttcgcggagtcgtagtttcggtttcggaaggtttttttgggtttcgggttcgatttttatttttgcgtcggttcgcgggtttcgtaggttttgtattgtcgatcgggttgcgtttaaggtcgttagtcgttcgtcgttttttttgttttttcgttgtaggaaggtcgcggtagagggggcgttttttaagtcgttagttacgtacgcggaggcgttcgggtttcggggcggcgtatcgggagagtacgtcg

SEQ ID NO: 29372 - DNA, 512 bp, Artificial Sequence
  chemically treated genomic DNA (Homo sapiens) CpG-island No: 29372
cgacgtactctcccgatacgccgccccgaaacccgaacgcctccgcgtacgtaactaacgacttaaaaaacgccccctctaccgcgaccttcctacaacgaaaaaacaaaaaaaacgacgaacgactaacgaccttaaacgcaacccgatcgacaatacaaaacctacgaaacccgcgaaccgacgcaaaaataaaaatcgaacccgaaacccaaaaaaaccttccgaaaccgaaactacgactccgcgaacttccccaccgaccgaatctcccgacaactaccaaaaaacgaaaacgcccgaaaaaacccgacgttccacaaaatccacgcgtattcgcgaaccgcgaaatcgccgccgaccgcccaaacgcgaaacctctcgaaaatcacccgaccgccgaacccgcgaaacgcacgaaaccgccaaaaaaaaacaacaaacctcaaaccctatccctacgccccgcccgacctcccccgcgaaactacgcaacccactcgaccatccta

SEQ ID NO: 29373 - DNA, 599 bp, Artificial Sequence
  chemically treated genomic DNA (Homo sapiens) CpG-island No: 29373
ttcgcgtggggggagttggttatttttaggttgtatgaagaggcggggtttcgcggggcggagttgggggtggtttgtgggttcgcgcgggtttcgggtagtttttgggttcggggagtagacgattcgttagttatattaggcgttcggtttttgcgttcgtttttttcgtgttttagagatttgcgttttttaggttcgagtttttgtcggtttattttcgagttcgtgtggttcgcgaatttttaattttagtcgttgtagtttttttttaggttcggcgttttcgagtttcgcgggcgtcgcgtttgtttttttttggttacgttgtagtcgcggtgtcggcgagttttttcgggttgttttcgcgggcgttagagggagggcgggcgttcgcgtggtgacggcgacgtttgtagtttaaggagcgttttattcgttgtcgtcggaggggtcggtgattttttggttatttcgcgtcggaggtttagatggtttaggcgaagattaacgttaaagttaacgaggggcgtttttgtcgttttttttttatggttgatcgttttagtcgtttgttggagagtttggattagttggag

SEQ ID NO: 29374 - DNA, 599 bp, Artificial Sequence
  chemically treated genomic DNA (Homo sapiens) CpG-island No: 29374
ctccaactaatccaaactctccaacaaacgactaaaacgatcaaccataaaaaaaaaacgacaaaaacgcccctcgttaactttaacgttaatcttcgcctaaaccatctaaacctccgacgcgaaataaccaaaaaatcaccgacccctccgacgacaacgaataaaacgctccttaaactacaaacgtcgccgtcaccacgcgaacgcccgccctccctctaacgcccgcgaaaacaacccgaaaaaactcgccgacaccgcgactacaacgtaaccaaaaaaaaacaaacgcgacgcccgcgaaactcgaaaacgccgaacctaaaaaaaaactacaacgactaaaattaaaaattcgcgaaccacacgaactcgaaaataaaccgacaaaaactcgaacctaaaaaacgcaaatctctaaaacacgaaaaaaacgaacgcaaaaaccgaacgcctaatataactaacgaatcgtctactccccgaacccaaaaactacccgaaacccgcgcgaacccacaaaccacccccaactccgccccgcgaaaccccgcctcttcatacaacctaaaaataaccaactccccccacgcgaa

SEQ ID NO: 29375 - DNA, 599 bp, Artificial Sequence
  chemically treated genomic DNA (Homo sapiens) CpG-island No: 29375
ttttagttggtttaggttttttagtaggcggttggagcggttagttatggaggaggagcggtagaagcgtttttcgttggttttagcgttgattttcgtttgagttatttaagttttcgacgcggggtagttaagaggttatcggttttttcggcggtagcgagtggagcgttttttgggttgtaggcgtcgtcgttattacgcgggcgttcgttttttttttgacgttcgcgggggtaattcgggaggattcgtcgatatcgcggttgtagcgtagttaaagaagggtaggcgcggcgttcgcggggttcggggacgtcgggtttgggagggggttgtagcggttggagttagaggttcgcgagttatacgggttcgaggatgggtcgataggggttcgggtttggggagcgtaagtttttgaggtacgggaggggcggacgtagagatcgagcgtttaatgtggttagcggatcgtttgtttttcggatttaggaattattcgaagttcgcgcggatttatagattatttttagtttcgtttcgcgaggtttcgtttttttatgtaatttaaaagtaattaattttttttacgcgaa

SEQ ID NO: 29376 - DNA, 599 bp, Artificial Sequence
  chemically treated genomic DNA (Homo sapiens) CpG-island No: 29376
ttcgcgtaaaaaaaattaattacttttaaattacataaaaaaacgaaacctcgcgaaacgaaactaaaaataatctataaatccgcgcgaacttcgaataattcctaaatccgaaaaacaaacgatccgctaaccacattaaacgctcgatctctacgtccgcccctcccgtacctcaaaaacttacgctccccaaacccgaacccctatcgacccatcctcgaacccgtataactcgcgaacctctaactccaaccgctacaaccccctcccaaacccgacgtccccgaaccccgcgaacgccgcgcctacccttctttaactacgctacaaccgcgatatcgacgaatcctcccgaattacccccgcgaacgtcaaaaaaaaaacgaacgcccgcgtaataacgacgacgcctacaacccaaaaaacgctccactcgctaccgccgaaaaaaccgataacctcttaactaccccgcgtcgaaaacttaaataactcaaacgaaaatcaacgctaaaaccaacgaaaaacgcttctaccgctcctcctccataactaaccgctccaaccgcctactaaaaaacctaaaccaactaaaa

SEQ ID NO: 29377 - DNA, 1416 bp, Artificial Sequence
  chemically treated genomic DNA (Homo sapiens) CpG-island No: 29377
  unsure (45, 50..51, 55, 99, 129, 133, 216, 326, 334..335, 382, 398)
  unsure (460, 520, 536, 556, 928, 1012, 1129, 1235, 1291, 1320, 1398)
  unsure (1410)
gacgtttttttttcggaagtagcggggtacgaagagaataaatantaganntttntgtgtgagagaagaacgagagagaggaggaggaggaggcgtttngagagagaggagaaaacgttatcggcgcgnaatnttaacgttacgcgttagacgatagatagagaaagaaggaagaagagagagcgtacgagaagaacgatacgagtaaggcgcgtnatagaacgggcgtagcgagaggagaggaggaaatacgagagaagttatcggagttagagaaaacgagtagagtcgaggagcgagagatacgtaaagattcgcgtacgagncgagagtnnaaggcggagataataaggcgcgaattagtttagcgtaaaatcgagtncgacgtcgacgaaggnatagaggtaacgaggcgaggcgtagaaagtacgagaacgtagagggcgggagcgaggtaagnacggagtaagagaaggttaacgagttcgcgggcgacgaaaggagcgtttagtcggttagnagtcgatataggaaanggcgagaaagaaataaaaanacgaaaaacgaaatcgcgcgggatcgcggcgaaagaaagtttttcggtcgcgaacgagatttcgcggagacgcgttacgtatcgcgtcgagagaagaacgagcgtattacgtcgtcgttttcgtgttatatttagcgacgacgaatattttacgatcggcgcgcgtttttcgagatacgtttttttaagtaagtatagtcgcggtcgttcgcgagtcgacgacgaatcgcgagagcgagacgtcgttacgttattacgattgacgttttttagtcgttcgaggaagtagtttataagttagagagaaacggacggcgcgaggagcgtaaatcgaggtatacgcgatagagacgtagaatcgacggcgaggtntcggggagggatagatcggaaagggagagcgttcggtgaacggcgcggaatattagtatcgcggcggagagggaaaattgtttnacggcgtcgtaaaaaaaatgtaggtcgcggaacgcgttcgcgttcgtcgaaataggatagagaaagatatttttaagaataataaatcgtagttcgagattacgcggcggcgatagnagggattttacgcgtaatacgaaatcgcgcgcgtacgtcgcgtcgagaagagacggcgtagcgcgcggagttaggaagttttatacgtatagacgagtagaaggtncgacggagcgcgcgtatagataaaatacgacgataatataaagttagggtaaatanagtcgaacggacgcgcgcgtacgagaatnatgagacggcgaagtagcgtaagagagagagaagtagagaatagattaaagttaggagatagtgtagagaggaataantagagtttaagnacgagt

SEQ ID NO: 29378 - DNA, 1416 bp, Artificial Sequence
  chemically treated genomic DNA (Homo sapiens) CpG-island No: 29378
  unsure (7, 19, 97, 126, 182, 288, 405, 489, 861, 881, 897, 957, 1019)
  unsure (1035, 1082..1083, 1091, 1201, 1284, 1288, 1318, 1362, 1366..1367)
  unsure (1372)
actcgtncttaaactctanttattcctctctacactatctcctaactttaatctattctctacttctctctctcttacgctacttcgccgtctcatnattctcgtacgcgcgcgtccgttcgactntatttaccctaactttatattatcgtcgtattttatctatacgcgcgctccgtcgnaccttctactcgtctatacgtataaaacttcctaactccgcgcgctacgccgtctcttctcgacgcgacgtacgcgcgcgatttcgtattacgcgtaaaatccctnctatcgccgccgcgtaatctcgaactacgatttattattcttaaaaatatctttctctatcctatttcgacgaacgcgaacgcgttccgcgacctacattttttttacgacgccgtnaaacaattttccctctccgccgcgatactaatattccgcgccgttcaccgaacgctctccctttccgatctatccctccccganacctcgccgtcgattctacgtctctatcgcgtatacctcgatttacgctcctcgcgccgtccgtttctctctaacttataaactacttcctcgaacgactaaaaaacgtcaatcgtaataacgtaacgacgtctcgctctcgcgattcgtcgtcgactcgcgaacgaccgcgactatacttacttaaaaaaacgtatctcgaaaaacgcgcgccgatcgtaaaatattcgtcgtcgctaaatataacacgaaaacgacgacgtaatacgctcgttcttctctcgacgcgatacgtaacgcgtctccgcgaaatctcgttcgcgaccgaaaaactttctttcgccgcgatcccgcgcgatttcgtttttcgtntttttatttctttctcgccntttcctatatcgactnctaaccgactaaacgctcctttcgtcgcccgcgaactcgttaaccttctcttactccgtncttacctcgctcccgccctctacgttctcgtactttctacgcctcgcctcgttacctctatnccttcgtcgacgtcgnactcgattttacgctaaactaattcgcgccttattatctccgccttnnactctcgnctcgtacgcgaatctttacgtatctctcgctcctcgactctactcgttttctctaactccgataacttctctcgtatttcctcctctcctctcgctacgcccgttctatnacgcgccttactcgtatcgttcttctcgtacgctctctcttcttccttctttctctatctatcgtctaacgcgtaacgttaanattncgcgccgataacgttttctcctctctctcnaaacgcctcctcctcctcctctctctcgttcttctctcacacanaaanntctantatttattctcttcgtaccccgctacttccgaaaaaaaaacgtc

SEQ ID NO: 29379 - DNA, 1416 bp, Artificial Sequence
  chemically treated genomic DNA (Homo sapiens) CpG-island No: 29379
  unsure (7, 19, 97, 126, 182, 288, 405, 489, 861, 881, 897, 957, 1019)
  unsure (1035, 1082..1083, 1091, 1201, 1284, 1288, 1318, 1362, 1366..1367)
  unsure (1372)
gttcgtntttgggttttanttgtttttttttgtattgttttttggttttggtttgttttttgttttttttttttttgcgttgtttcgtcgttttatnattttcgtgcgcgcgcgttcgttcggttntgtttgttttggttttatattatcgtcgtgttttgtttatgcgcgcgtttcgtcgngttttttgttcgtttgtgcgtgtgaggttttttggtttcgcgcgttgcgtcgttttttttcggcgcggcgtgcgcgcgcggtttcgtgttgcgcgtggggtttttnttgtcgtcgtcgcgtggtttcgggttgcggtttgttatttttgggggtatttttttttattttatttcggcgggcgcgggcgcgtttcgcggtttgtattttttttgcggcgtcgtnaggtaatttttttttttcgtcgcggtattggtgtttcgcgtcgtttatcgggcgtttttttttttcgatttattttttttcggngtttcgtcgtcgattttgcgtttttatcgcgtatatttcggtttgcgtttttcgcgtcgttcgtttttttttggtttatgggttgttttttcgggcggttggggggcgttagtcgtggtggcgtggcggcgtttcgttttcgcgattcgtcgtcggttcgcgggcgatcgcggttatgtttatttgagagggcgtatttcgggaggcgcgcgtcggtcgtgggatattcgtcgtcgttgggtatagtacggaggcggcggcgtggtgcgttcgtttttttttcggcgcggtgcgtggcgcgttttcgcggggtttcgttcgcggtcggggggttttttttcgtcgcggtttcgcgcggtttcgtttttcgtntttttgtttttttttcgttnttttttgtgtcggttnttggtcggttgggcgtttttttcgtcgttcgcgggttcgttggtttttttttgtttcgtntttgtttcgttttcgttttttgcgttttcgtgttttttgcgtttcgtttcgttgtttttgtnttttcgtcggcgtcgngttcggttttgcgttgggttggttcgcgttttgttgttttcgttttnngttttcgnttcgtgcgcgggtttttgcgtgtttttcgtttttcggttttgttcgttttttttggtttcggtggtttttttcgtgttttttttttttttttcgttgcgttcgttttgtngcgcgttttgttcgtgtcgtttttttcgtgcgttttttttttttttttttttttttgtttgtcgtttggcgcgtggcgttggngttncgcgtcggtggcgttttttttttttttttngggcgtttttttttttttttttttttcgttttttttttatatanaagnntttgntgtttgtttttttcgtgtttcgttgttttcggagggagaacgtt

SEQ ID NO: 29380 - DNA, 1416 bp, Artificial Sequence
  chemically treated genomic DNA (Homo sapiens) CpG-island No: 29380
  unsure (45, 50..51, 55, 99, 129, 133, 216, 326, 334..335, 382, 398)
  unsure (460, 520, 536, 556, 928, 1012, 1129, 1235, 1291, 1320, 1398)
  unsure (1410)
aacgttctccctccgaaaacaacgaaacacgaaaaaaacaaacancaaanncttntatataaaaaaaaaacgaaaaaaaaaaaaaaaaaaaaacgcccnaaaaaaaaaaaaaaaacgccaccgacgcgnaacnccaacgccacgcgccaaacgacaaacaaaaaaaaaaaaaaaaaaaaaaaacgcacgaaaaaaacgacacgaacaaaacgcgcnacaaaacgaacgcaacgaaaaaaaaaaaaaaaacacgaaaaaaaccaccgaaaccaaaaaaaacgaacaaaaccgaaaaacgaaaaacacgcaaaaacccgcgcacgaancgaaaacnnaaaacgaaaacaacaaaacgcgaaccaacccaacgcaaaaccgaacncgacgccgacgaaaanacaaaaacaacgaaacgaaacgcaaaaaacacgaaaacgcaaaaaacgaaaacgaaacaaanacgaaacaaaaaaaaaccaacgaacccgcgaacgacgaaaaaaacgcccaaccgaccaanaaccgacacaaaaaanaacgaaaaaaaaacaaaaanacgaaaaacgaaaccgcgcgaaaccgcgacgaaaaaaaaccccccgaccgcgaacgaaaccccgcgaaaacgcgccacgcaccgcgccgaaaaaaaaacgaacgcaccacgccgccgcctccgtactatacccaacgacgacgaatatcccacgaccgacgcgcgcctcccgaaatacgccctctcaaataaacataaccgcgatcgcccgcgaaccgacgacgaatcgcgaaaacgaaacgccgccacgccaccacgactaacgccccccaaccgcccgaaaaaacaacccataaaccaaaaaaaaacgaacgacgcgaaaaacgcaaaccgaaatatacgcgataaaaacgcaaaatcgacgacgaaacnccgaaaaaaaataaatcgaaaaaaaaaaacgcccgataaacgacgcgaaacaccaataccgcgacgaaaaaaaaaaattacctnacgacgccgcaaaaaaaatacaaaccgcgaaacgcgcccgcgcccgccgaaataaaataaaaaaaaatacccccaaaaataacaaaccgcaacccgaaaccacgcgacgacgacaanaaaaaccccacgcgcaacacgaaaccgcgcgcgcacgccgcgccgaaaaaaaacgacgcaacgcgcgaaaccaaaaaacctcacacgcacaaacgaacaaaaaacncgacgaaacgcgcgcataaacaaaacacgacgataatataaaaccaaaacaaacanaaccgaacgaacgcgcgcgcacgaaaatnataaaacgacgaaacaacgcaaaaaaaaaaaaaacaaaaaacaaaccaaaaccaaaaaacaatacaaaaaaaaacaantaaaacccaaanacgaac

SEQ ID NO: 29381 - DNA, 545 bp, Artificial Sequence
  chemically treated genomic DNA (Homo sapiens) CpG-island No: 29381
gttatataaggttcgcgtcggtttaatttcggatttggtgttatttatttgggaagcgttcggacggcggagtttggcggcggcggtggtggtggttgtcgtagattgtggttaaaaaaaagaaggcggcggcggcggcggcggcggaggcggaggtagttgcgaggtatgggagcgtcgaagcgtttaggcgtaggtcgaagttgtcgcgttttttgggtacggcgggagtgttgagtagaaaggggagcgtcgggggttcgtagtcggtttcggaggcgcgggtcgggtttttgtttggttacgttgagcgttagttagttttagcgaataattttagttacgataataatttattttttttttagataagcgagatttgggttgttgcgttcgttttattgtttagatatttgttaggggtttcggagtcggtagagttatcgagttttcgttttgagtcgtcgtttttttttttttcgatttcgttttttggagcgggaggttaggaaagtagcgggagaggggaaggggttagaaggaga

SEQ ID NO: 29382 - DNA, 545 bp, Artificial Sequence
  chemically treated genomic DNA (Homo sapiens) CpG-island No: 29382
tctccttctaaccccttcccctctcccgctactttcctaacctcccgctccaaaaaacgaaatcgaaaaaaaaaaaaacgacgactcaaaacgaaaactcgataactctaccgactccgaaacccctaacaaatatctaaacaataaaacgaacgcaacaacccaaatctcgcttatctaaaaaaaaaataaattattatcgtaactaaaattattcgctaaaactaactaacgctcaacgtaaccaaacaaaaacccgacccgcgcctccgaaaccgactacgaacccccgacgctcccctttctactcaacactcccgccgtacccaaaaaacgcgacaacttcgacctacgcctaaacgcttcgacgctcccatacctcgcaactacctccgcctccgccgccgccgccgccgccgccttcttttttttaaccacaatctacgacaaccaccaccaccgccgccgccaaactccgccgtccgaacgcttcccaaataaataacaccaaatccgaaattaaaccgacgcgaaccttatataac

SEQ ID NO: 29383 - DNA, 545 bp, Artificial Sequence
  chemically treated genomic DNA (Homo sapiens) CpG-island No: 29383
tttttttttagtttttttttttttttcgttgtttttttggtttttcgttttagggagcgaggtcggggagagggagggcgacgatttagagcggggattcggtggttttgtcgatttcggagtttttggtaagtgtttaaataataggacggacgtagtagtttaagtttcgtttgtttggaaggaaggtgggttgttgtcgtaattggagttgttcgttggggttgattggcgtttagcgtagttaaataaaaattcggttcgcgttttcggagtcggttgcgggttttcggcgtttttttttttgtttagtattttcgtcgtgtttagaaagcgcggtagtttcggtttgcgtttgggcgtttcggcgtttttatgtttcgtagttgttttcgttttcgtcgtcgtcgtcgtcgtcgtttttttttttttaattatagtttgcggtagttattattatcgtcgtcgttaagtttcgtcgttcgggcgttttttaaataaataatattaagttcgaagttgagtcggcgcgggttttatatagt

SEQ ID NO: 29384 - DNA, 545 bp, Artificial Sequence
  chemically treated genomic DNA (Homo sapiens) CpG-island No: 29384
actatataaaacccgcgccgactcaacttcgaacttaatattatttatttaaaaaacgcccgaacgacgaaacttaacgacgacgataataataactaccgcaaactataattaaaaaaaaaaaaacgacgacgacgacgacgacgaaaacgaaaacaactacgaaacataaaaacgccgaaacgcccaaacgcaaaccgaaactaccgcgctttctaaacacgacgaaaatactaaacaaaaaaaaaaacgccgaaaacccgcaaccgactccgaaaacgcgaaccgaatttttatttaactacgctaaacgccaatcaaccccaacgaacaactccaattacgacaacaacccaccttccttccaaacaaacgaaacttaaactactacgtccgtcctattatttaaacacttaccaaaaactccgaaatcgacaaaaccaccgaatccccgctctaaatcgtcgccctccctctccccgacctcgctccctaaaacgaaaaaccaaaaaaacaacgaaaaaaaaaaaaaaactaaaaaaaaa

SEQ ID NO: 29385 - DNA, 523 bp, Artificial Sequence
  chemically treated genomic DNA (Homo sapiens) CpG-island No: 29385
gcggcggttcgattgtttttttgttttttttgcgtgatttcggggtaggttttggtgtagagcgtcgttaaggacgtcgagcgggaggcgggattgtttagatattttttagcgaagtgtatgtgtgtttgtaaattatcgttggttgtcgggagatcgcgaggatcggtttaggttgcggcggagtcgagggcgagggagaggtcgcgtgagtgagtagagtttagagtcgtgcgtttttagaattgcgcgttcgtttcgtgtattttcgcgcgttatgtttagttgtttcgcgcgttttgttacgggttcgttgggttttcgcgttttttagttttcggagtttattttgatcggggttataatatttattgagatttttttttttgttttgtattttcgttattggtatcggatttgtagaagcgtgcgtgggattagaggatcgttttttttataataatcggtttttgtattttagtagtcgttggaagttttagtttttttatcgttaagtttattt

SEQ ID NO: 29386 - DNA, 523 bp, Artificial Sequence
  chemically treated genomic DNA (Homo sapiens) CpG-island No: 29386
aaataaacttaacgataaaaaaactaaaacttccaacgactactaaaatacaaaaaccgattattataaaaaaaacgatcctctaatcccacgcacgcttctacaaatccgataccaataacgaaaatacaaaacaaaaaaaaaaatctcaataaatattataaccccgatcaaaataaactccgaaaactaaaaaacgcgaaaacccaacgaacccgtaacaaaacgcgcgaaacaactaaacataacgcgcgaaaatacacgaaacgaacgcgcaattctaaaaacgcacgactctaaactctactcactcacgcgacctctccctcgccctcgactccgccgcaacctaaaccgatcctcgcgatctcccgacaaccaacgataatttacaaacacacatacacttcgctaaaaaatatctaaacaatcccgcctcccgctcgacgtccttaacgacgctctacaccaaaacctaccccgaaatcacgcaaaaaaaacaaaaaaacaatcgaaccgccgc

SEQ ID NO: 29387 - DNA, 523 bp, Artificial Sequence
  chemically treated genomic DNA (Homo sapiens) CpG-island No: 29387
ggatgaatttggcggtaaaagagttggggtttttaacggttgttaagatgtaggggtcggttgttgtggggagggcggttttttgattttacgtacgtttttgtaaattcgatgttagtggcgaaggtataagatagaagaggggattttaataggtattatggtttcgattaaagtgggtttcggaagttagaaggcgcggaagtttagcgggttcgtagtagagcgcgcggggtaattgggtatggcgcgcgggggtgtacggggcggacgcgtagttttgggggcgtacggttttggattttgtttatttacgcggtttttttttcgttttcgatttcgtcgtagtttggatcggttttcgcggtttttcgatagttaacgatggtttataaatatatatgtatttcgttgaaggatgtttgggtaatttcgtttttcgttcggcgtttttggcgacgttttgtattaggatttgtttcgaggttacgtagaaaagataaaagggtagtcgggtcgtcgt

SEQ ID NO: 29388 - DNA, 523 bp, Artificial Sequence
  chemically treated genomic DNA (Homo sapiens) CpG-island No: 29388
acgacgacccgactacccttttatcttttctacgtaacctcgaaacaaatcctaatacaaaacgtcgccaaaaacgccgaacgaaaaacgaaattacccaaacatccttcaacgaaatacatatatatttataaaccatcgttaactatcgaaaaaccgcgaaaaccgatccaaactacgacgaaatcgaaaacgaaaaaaaaaccgcgtaaataaacaaaatccaaaaccgtacgcccccaaaactacgcgtccgccccgtacacccccgcgcgccatacccaattaccccgcgcgctctactacgaacccgctaaacttccgcgccttctaacttccgaaacccactttaatcgaaaccataatacctattaaaatcccctcttctatcttataccttcgccactaacatcgaatttacaaaaacgtacgtaaaatcaaaaaaccgccctccccacaacaaccgacccctacatcttaacaaccgttaaaaaccccaactcttttaccgccaaattcatcc

SEQ ID NO: 29389 - DNA, 740 bp, Artificial Sequence
  chemically treated genomic DNA (Homo sapiens) CpG-island No: 29389
tttttatttcgatttttcgtttaattttcgttttagttagttttaggagttatatgcgtatgcgttttttcgcgtttttttttaattttttacgttttatttttttttttttttttttttagtttcggtttcgtcgttacgattggttagtcgattattcggtttcggttaataagcgtcgttttttcgttttcgtgttattgggtagaagaaaataaaaataaatagagcgagaagggttagagatttttcgaggcggcggtagagatagaagagcggggtcggggtcggttgattaggaatttgggcgagtagcggcgggggttcgaggggttagtattagtaggcgcggtttatacgttcgggaagattgcgtttttttttttattttttttcggaggtagtcgtaagatgggagggggcgggggcggaggcgtgggggtcgcggttttgttaggttcgggtttgcggtgcgggggttcggttgtttttttgtagtttcgtaggtttagtcgcgttttttttaacgtttcggattgcgggtattcggtttggttttttttttttgagtttagtttggagcgtgtcggcgcgggttcgttttttttcggagttatttttttattgagaggggcgcgcgaggcgttcgtttttgaaggttttttttagtttttttttttttttggcggaggttgaattcgggggtcgggattggaaggcgtgttttcggttggattgaa

SEQ ID NO: 29390 - DNA, 740 bp, Artificial Sequence
  chemically treated genomic DNA (Homo sapiens) CpG-island No: 29390
ttcaatccaaccgaaaacacgccttccaatcccgacccccgaattcaacctccgccaaaaaaaaaaaaaaactaaaaaaaaccttcaaaaacgaacgcctcgcgcgcccctctcaataaaaaaataactccgaaaaaaaacgaacccgcgccgacacgctccaaactaaactcaaaaaaaaaaaaccaaaccgaatacccgcaatccgaaacgttaaaaaaaacgcgactaaacctacgaaactacaaaaaaacaaccgaacccccgcaccgcaaacccgaacctaacaaaaccgcgacccccacgcctccgcccccgccccctcccatcttacgactacctccgaaaaaaaataaaaaaaaaaacgcaatcttcccgaacgtataaaccgcgcctactaatactaacccctcgaacccccgccgctactcgcccaaattcctaatcaaccgaccccgaccccgctcttctatctctaccgccgcctcgaaaaatctctaacccttctcgctctatttatttttattttcttctacccaataacacgaaaacgaaaaaacgacgcttattaaccgaaaccgaataatcgactaaccaatcgtaacgacgaaaccgaaactaaaaaaaaaaaaaaaaaaaaataaaacgtaaaaaattaaaaaaaaacgcgaaaaaacgcatacgcatataactcctaaaactaactaaaacgaaaattaaacgaaaaatcgaaataaaaa

SEQ ID NO: 29391 - DNA, 740 bp, Artificial Sequence
  chemically treated genomic DNA (Homo sapiens) CpG-island No: 29391
tttagtttagtcggaaatacgttttttaatttcggttttcgaatttaattttcgttagagggggaggagggttgagggggatttttaagggcgagcgtttcgcgcgttttttttagtggggagatggtttcgggagggggcgggttcgcgtcgatacgttttaggttgggtttagaaagagggaattaggtcggatgttcgtagttcggggcgttggggagggcgcggttggatttgcggggttataagaaggtagtcggattttcgtatcgtaggttcggatttgataggatcgcgatttttacgttttcgttttcgtttttttttattttgcggttgttttcgaggagggatgggggagagggcgtagttttttcgagcgtgtgagtcgcgtttattggtattgatttttcgggttttcgtcgttgttcgtttaggtttttggttagtcggtttcgatttcgtttttttgtttttgtcgtcgtttcggagagtttttggtttttttcgttttgtttgtttttgtttttttttatttagtaatacgggggcgagagggcggcgtttattggtcgaggtcgggtggtcggttggttaatcgtggcggcggagtcggagttgaggaggaaaagggagaggagtgaaacgtggaaagttggggaggggcgcgggagggcgtatgcgtatgtggtttttgggattggttggagcgggagttgagcgggaagtcggggtggggg

SEQ ID NO: 29392 - DNA, 740 bp, Artificial Sequence
  chemically treated genomic DNA (Homo sapiens) CpG-island No: 29392
cccccaccccgacttcccgctcaactcccgctccaaccaatcccaaaaaccacatacgcatacgccctcccgcgcccctccccaactttccacgtttcactcctctcccttttcctcctcaactccgactccgccgccacgattaaccaaccgaccacccgacctcgaccaataaacgccgccctctcgcccccgtattactaaataaaaaaaaacaaaaacaaacaaaacgaaaaaaaccaaaaactctccgaaacgacgacaaaaacaaaaaaacgaaatcgaaaccgactaaccaaaaacctaaacgaacaacgacgaaaacccgaaaaatcaataccaataaacgcgactcacacgctcgaaaaaactacgccctctcccccatccctcctcgaaaacaaccgcaaaataaaaaaaaacgaaaacgaaaacgtaaaaatcgcgatcctatcaaatccgaacctacgatacgaaaatccgactaccttcttataaccccgcaaatccaaccgcgccctccccaacgccccgaactacgaacatccgacctaattccctctttctaaacccaacctaaaacgtatcgacgcgaacccgccccctcccgaaaccatctccccactaaaaaaaacgcgcgaaacgctcgcccttaaaaatccccctcaaccctcctccccctctaacgaaaattaaattcgaaaaccgaaattaaaaaacgtatttccgactaaactaaa

SEQ ID NO: 29393 - DNA, 633 bp, Artificial Sequence
  chemically treated genomic DNA (Homo sapiens) CpG-island No: 29393
gtttcgtattttgtgatttgtacgtgcgttggtgggttttcgggggcggggcgtcgcgttggtttcgtttattaggtgcgttttttgtttcgttttttgtagacgcgcgtacgtttacgttggattttgatacgatgtacgcgcgtttgcgtttgttcgtcgatcgtttgacggtgcgttgcggtttgttgggtagtttggggttcgtgttcgtgttgcggttcgacgcgttttggtaagtgttggttcgtgattgtttcgttatcggtcgttattattgggaggttgacgtgtaggaggcgggcgtcggttggtgggtgggcgcggtttacgttttttttcggcgtcgcggggtttcggtcgtcgttcgtttgggttgtaatcgttagttttggtgttttaagcgttacgattttgagtattgggttttttacgacggttagcgtagtcgtttgcggtttcgcgacgatttcgatcggttcggcgtttttttggattacgaggtcggcgttttcgttttttacgacgtgacgggcggtatgagttatttgtatatttttcgcgttacgttttaggagtcgttttattcggttttgcggttttgggagggggttattagtatttttcggttgt

SEQ ID NO: 29394 - DNA, 633 bp, Artificial Sequence
  chemically treated genomic DNA (Homo sapiens) CpG-island No: 29394
acaaccgaaaaatactaataaccccctcccaaaaccgcaaaaccgaataaaacgactcctaaaacgtaacgcgaaaaatatacaaataactcataccgcccgtcacgtcgtaaaaaacgaaaacgccgacctcgtaatccaaaaaaacgccgaaccgatcgaaatcgtcgcgaaaccgcaaacgactacgctaaccgtcgtaaaaaacccaatactcaaaatcgtaacgcttaaaacaccaaaactaacgattacaacccaaacgaacgacgaccgaaaccccgcgacgccgaaaaaaaacgtaaaccgcgcccacccaccaaccgacgcccgcctcctacacgtcaacctcccaataataacgaccgataacgaaacaatcacgaaccaacacttaccaaaacgcgtcgaaccgcaacacgaacacgaaccccaaactacccaacaaaccgcaacgcaccgtcaaacgatcgacgaacaaacgcaaacgcgcgtacatcgtatcaaaatccaacgtaaacgtacgcgcgtctacaaaaaacgaaacaaaaaacgcacctaataaacgaaaccaacgcgacgccccgcccccgaaaacccaccaacgcacgtacaaatcacaaaatacgaaac

SEQ ID NO: 29395 - DNA, 633 bp, Artificial Sequence
  chemically treated genomic DNA (Homo sapiens) CpG-island No: 29395
gtagtcgggggatgttgatggtttttttttagagtcgtagggtcgggtagagcggtttttggaacgtggcgcggaaggtatgtaggtggtttatgtcgttcgttacgtcgtagaaggcgaggacgtcggtttcgtagtttaggaagacgtcgagtcggtcgaggtcgtcgcggggtcgtaggcggttgcgttggtcgtcgtggaaggtttagtatttaaggtcgtagcgtttgaggtattaggattggcggttgtagtttaggcgggcggcggtcgaggtttcgcggcgtcgaagggaggcgtaggtcgcgtttatttattagtcggcgttcgttttttgtacgttaattttttagtagtggcggtcggtggcgaagtagttacgagttagtatttgttagagcgcgtcgaatcgtagtacgggtacgggttttaggttgtttagtaggtcgtagcgtatcgttaggcgatcggcggataggcgtaggcgcgcgtgtatcgtgttaggatttagcgtgggcgtgcgcgcgtttgtagggggcgagataagggacgtatttggtgggcggggttagcgcggcgtttcgttttcgggaatttattaacgtacgtgtaaattataaaatgcgaagt

SEQ ID NO: 29396 - DNA, 633 bp, Artificial Sequence
  chemically treated genomic DNA (Homo sapiens) CpG-island No: 29396
acttcgcattttataatttacacgtacgttaataaattcccgaaaacgaaacgccgcgctaaccccgcccaccaaatacgtcccttatctcgccccctacaaacgcgcgcacgcccacgctaaatcctaacacgatacacgcgcgcctacgcctatccgccgatcgcctaacgatacgctacgacctactaaacaacctaaaacccgtacccgtactacgattcgacgcgctctaacaaatactaactcgtaactacttcgccaccgaccgccactactaaaaaattaacgtacaaaaaacgaacgccgactaataaataaacgcgacctacgcctcccttcgacgccgcgaaacctcgaccgccgcccgcctaaactacaaccgccaatcctaatacctcaaacgctacgaccttaaatactaaaccttccacgacgaccaacgcaaccgcctacgaccccgcgacgacctcgaccgactcgacgtcttcctaaactacgaaaccgacgtcctcgccttctacgacgtaacgaacgacataaaccacctacataccttccgcgccacgttccaaaaaccgctctacccgaccctacgactctaaaaaaaaaccatcaacatcccccgactac

SEQ ID NO: 29397 - DNA, 605 bp, Artificial Sequence
  chemically treated genomic DNA (Homo sapiens) CpG-island No: 29397
gtttcgtttttcgttcgtttcgtttcgtttcgtttcgtaggtttcgttcgtcgttgttcggggaatcgcggatttcgtagttgtaggaggcgttcggttcggcggagtagttttagtcgttatcgtcgttttcgtagttttcgtcgttattgttatcgtcgtcgtcgttattgcgttttggtttcggttttcgcgttttttcggtcggttatgtagtttcgtcgcgtttaggcgttcggtgcgtagttgttgttcgcgttggttttgttgttgttgttgttcggagcggggtttcgaggtagttttttggttaattcggtgttcgtcgcgtttttgtttgcgttcgggtcgtgcgtcgcgtagttttgtcggaatgggggtgtgtgtatttcgcgttttgagtcggattcgtagtattcggttttcgtcggcgagtttggttatagttgtatttgtttcgtcgggattttcggcgttaattgttaggtgagtggaagcggcgggcgcggtgcggggcgttggttcgggattagtagttttttttcgtcggttttgttgttgttgttcgataatgggtacgtttgatataggtttttttattttgg

SEQ ID NO: 29398 - DNA, 605 bp, Artificial Sequence
  chemically treated genomic DNA (Homo sapiens) CpG-island No: 29398
ccaaaataaaaaaacctatatcaaacgtacccattatcgaacaacaacaacaaaaccgacgaaaaaaaactactaatcccgaaccaacgccccgcaccgcgcccgccgcttccactcacctaacaattaacgccgaaaatcccgacgaaacaaatacaactataaccaaactcgccgacgaaaaccgaatactacgaatccgactcaaaacgcgaaatacacacacccccattccgacaaaactacgcgacgcacgacccgaacgcaaacaaaaacgcgacgaacaccgaattaaccaaaaaactacctcgaaaccccgctccgaacaacaacaacaacaaaaccaacgcgaacaacaactacgcaccgaacgcctaaacgcgacgaaactacataaccgaccgaaaaaacgcgaaaaccgaaaccaaaacgcaataacgacgacgacgataacaataacgacgaaaactacgaaaacgacgataacgactaaaactactccgccgaaccgaacgcctcctacaactacgaaatccgcgattccccgaacaacgacgaacgaaacctacgaaacgaaacgaaacgaaacgaacgaaaaacgaaac

SEQ ID NO: 29399 - DNA, 605 bp, Artificial Sequence
  chemically treated genomic DNA (Homo sapiens) CpG-island No: 29399
ttaaagtgggaaagtttgtgttaggcgtgtttattgtcgggtagtagtagtagggtcggcgggaagaggttgttggtttcggattagcgtttcgtatcgcgttcgtcgtttttatttatttggtagttggcgtcggagatttcggcggggtaggtgtagttgtagttaggttcgtcggcgggggtcgggtgttgcgggttcggtttagggcgcgaggtgtatatatttttatttcggtagggttgcgcggcgtacggttcgggcgtagataggggcgcggcgggtatcgggttggttagggagttgtttcggggtttcgtttcgagtagtagtagtagtagggttagcgcgggtagtagttgcgtatcgggcgtttgggcgcggcggggttgtatggtcggtcgggagggcgcgggagtcggagttaggacgtagtgacggcggcggcggtggtagtggcgacgagagttgcgagagcgacggtggcggttagggttgtttcgtcgggtcgggcgttttttgtagttgcgggattcgcggtttttcgggtaacggcgggcggggtttgcggggcggggcggggcggggcgagcggggggcggggt

SEQ ID NO: 29400 - DNA, 605 bp, Artificial Sequence
  chemically treated genomic DNA (Homo sapiens) CpG-island No: 29400
accccgccccccgctcgccccgccccgccccgccccgcaaaccccgcccgccgttacccgaaaaaccgcgaatcccgcaactacaaaaaacgcccgacccgacgaaacaaccctaaccgccaccgtcgctctcgcaactctcgtcgccactaccaccgccgccgccgtcactacgtcctaactccgactcccgcgccctcccgaccgaccatacaaccccgccgcgcccaaacgcccgatacgcaactactacccgcgctaaccctactactactactactcgaaacgaaaccccgaaacaactccctaaccaacccgatacccgccgcgcccctatctacgcccgaaccgtacgccgcgcaaccctaccgaaataaaaatatatacacctcgcgccctaaaccgaacccgcaacacccgacccccgccgacgaacctaactacaactacacctaccccgccgaaatctccgacgccaactaccaaataaataaaaacgacgaacgcgatacgaaacgctaatccgaaaccaacaacctcttcccgccgaccctactactactacccgacaataaacacgcctaacacaaactttcccactttaa

SEQ ID NO: 29401 - DNA, 794 bp, Artificial Sequence
  chemically treated genomic DNA (Homo sapiens) CpG-island No: 29401
tcgtcgtcgttttgttttttgtttgtttttttttagcgtttcgcgtgggattttcggcggtagtttatattttttttgattgtcggtgttcgttagggtattttgcgcgcgttcgtcggtttcgtttcggtttcgtttcgtttcgtcggtttcgtttttcgtttttttttcgtttttcggagtcgacgagtggcggcggcggttttaggtttcgggttttttagataagagggcgggtggaggaggaagcgttcgagtttagagttttgtttcggcgttttcgagtatcgttcgttttagtcgattagtttcgtcggttattgggtttcgtcgagacgagaggagggaaaggtttcggcggtcgcgaggaggcggcgggggcgcgggcggaggcggcgcgggcggtcgcggttgtcgttttgttgtgcggttcgggtcgaggaaggagaagtgggaggaggggggagttcggcgtttcgtttttttcgcggtttatggcgacgattttcggtatattcgggatttttcggtcgtggcggtcgaggcgtcggttgttcgggttttagtttcggtcgttgtggtgatttcgtcgcgtttcgtcgtcgttttcgtgtcgttcgtcgttttcgtcgttttcgtcgtcggggatatgtttaatttcggaggtcggaggaacgggttcgttaagttgcgtttgataggtgagggggggcggcgggtcgggttgggtagtcgcggggtgggcgagttggcggggggtgtttgtggtttgggaagggttagggtcgcgatta

SEQ ID NO: 29402 - DNA, 794 bp, Artificial Sequence
  chemically treated genomic DNA (Homo sapiens) CpG-island No: 29402
taatcgcgaccctaacccttcccaaaccacaaacaccccccgccaactcgcccaccccgcgactacccaacccgacccgccgccccccctcacctatcaaacgcaacttaacgaacccgttcctccgacctccgaaattaaacatatccccgacgacgaaaacgacgaaaacgacgaacgacacgaaaacgacgacgaaacgcgacgaaatcaccacaacgaccgaaactaaaacccgaacaaccgacgcctcgaccgccacgaccgaaaaatcccgaatataccgaaaatcgtcgccataaaccgcgaaaaaaacgaaacgccgaactcccccctcctcccacttctccttcctcgacccgaaccgcacaacaaaacgacaaccgcgaccgcccgcgccgcctccgcccgcgcccccgccgcctcctcgcgaccgccgaaacctttccctcctctcgtctcgacgaaacccaataaccgacgaaactaatcgactaaaacgaacgatactcgaaaacgccgaaacaaaactctaaactcgaacgcttcctcctccacccgccctcttatctaaaaaacccgaaacctaaaaccgccgccgccactcgtcgactccgaaaaacgaaaaaaaaacgaaaaacgaaaccgacgaaacgaaacgaaaccgaaacgaaaccgacgaacgcgcgcaaaataccctaacgaacaccgacaatcaaaaaaaatataaactaccgccgaaaatcccacgcgaaacgctaaaaaaaaacaaacaaaaaacaaaacgacgacga

SEQ ID NO: 29403 - DNA, 794 bp, Artificial Sequence
  chemically treated genomic DNA (Homo sapiens) CpG-island No: 29403
tgatcgcgattttggttttttttaagttataggtatttttcgttagttcgtttatttcgcggttgtttagttcggttcgtcgtttttttttatttgttaggcgtagtttgacgggttcgttttttcggttttcggggttagatatgttttcggcggcgggggcggcgggggcggcgggcggtacgggggcgacggcgaggcgcggcggagttattatagcggtcggggttggggttcgagtagtcggcgtttcggtcgttacggtcggagggtttcggatgtgtcgagagtcgtcgttatgagtcgcggagggagcgggacgtcgagtttttttttttttttattttttttttttcggttcgggtcgtataataaagcggtagtcgcggtcgttcgcgtcgttttcgttcgcgttttcgtcgttttttcgcggtcgtcgaggttttttttttttttcgtttcggcgaggtttagtagtcgacggggttggtcggttgaagcgggcggtgttcgggggcgtcggagtagaattttgggttcgggcgtttttttttttattcgtttttttgtttgagggattcgggatttggggtcgtcgtcgttattcgtcggtttcggggggcggggaggagacgggaggcggggtcggcggggcggggcggggtcggggcggggtcggcgggcgcgcgtagggtgttttggcgggtatcggtagttagggagggtgtgagttgtcgtcgagggttttacgcggaacgttgggagggagtaggtagggagtaaagcggcggcgg

SEQ ID NO: 29404 - DNA, 794 bp, Artificial Sequence
  chemically treated genomic DNA (Homo sapiens) CpG-island No: 29404
ccgccgccgctttactccctacctactccctcccaacgttccgcgtaaaaccctcgacgacaactcacaccctccctaactaccgatacccgccaaaacaccctacgcgcgcccgccgaccccgccccgaccccgccccgccccgccgaccccgcctcccgtctcctccccgccccccgaaaccgacgaataacgacgacgaccccaaatcccgaatccctcaaacaaaaaaacgaataaaaaaaaaaacgcccgaacccaaaattctactccgacgcccccgaacaccgcccgcttcaaccgaccaaccccgtcgactactaaacctcgccgaaacgaaaaaaaaaaaaaacctcgacgaccgcgaaaaaacgacgaaaacgcgaacgaaaacgacgcgaacgaccgcgactaccgctttattatacgacccgaaccgaaaaaaaaaaaataaaaaaaaaaaaaaactcgacgtcccgctccctccgcgactcataacgacgactctcgacacatccgaaaccctccgaccgtaacgaccgaaacgccgactactcgaaccccaaccccgaccgctataataactccgccgcgcctcgccgtcgcccccgtaccgcccgccgcccccgccgcccccgccgccgaaaacatatctaaccccgaaaaccgaaaaaacgaacccgtcaaactacgcctaacaaataaaaaaaaacgacgaaccgaactaaacaaccgcgaaataaacgaactaacgaaaaatacctataacttaaaaaaaaccaaaatcgcgatca

SEQ ID NO: 29405 - DNA, 751 bp, Artificial Sequence
  chemically treated genomic DNA (Homo sapiens) CpG-island No: 29405
gtcgcggtagtttttagattcggcgttatggttcgcgtttttttcgtgggggtttagtcgttgtagggttagttttcgtttatcgtcgtcggtttcgtcgttgggtttcgcgtcgttgtcgttttcgttcgggttttcgaagatgtcgagcgttttttcggcgtcgcggtgttgtcggtaggttatttagtagtagggttttacgtcggtttcgtcgatgttttagaaggtgagttttttttcgaagagcggttcgtatacgttcgcggggtagtgtagtttgtcggtgcggtagtagttgagtacgtaggcgaagacgttcgggtgtttgtcgaagaagaattcgtagttttcgtcgtcgttgttgtcgttgttatttatatcgtcgttatcggtttcgggtcggttttcgtcgtcggggtcggttagttaggcgaggcgggttttcggtagggtgcgtagggtgttgcggtaggttttatgtcgcgtgtcgtttacgttgatgatgatttttttcgacgtttcgtttttggttatttttttttttagatatgttttggacggaggtttgtttttcgatttgcgttcgcggtaggaggagatatatatcgagttgattataagaagcgttgcggggtttcggtttggggcggtcgttgttttttaaatatttttttcgaggaggtagcgttagacgggggagggggaggagacgaagaggaggtaggaggcggtggcggttttttttgcg

SEQ ID NO: 29406 - DNA, 751 bp, Artificial Sequence
  chemically treated genomic DNA (Homo sapiens) CpG-island No: 29406
cgcaaaaaaaaccgccaccgcctcctacctcctcttcgtctcctccccctcccccgtctaacgctacctcctcgaaaaaaatatttaaaaaacaacgaccgccccaaaccgaaaccccgcaacgcttcttataatcaactcgatatatatctcctcctaccgcgaacgcaaatcgaaaaacaaacctccgtccaaaacatatctaaaaaaaaaaataaccaaaaacgaaacgtcgaaaaaaatcatcatcaacgtaaacgacacgcgacataaaacctaccgcaacaccctacgcaccctaccgaaaacccgcctcgcctaactaaccgaccccgacgacgaaaaccgacccgaaaccgataacgacgatataaataacaacgacaacaacgacgacgaaaactacgaattcttcttcgacaaacacccgaacgtcttcgcctacgtactcaactactaccgcaccgacaaactacactaccccgcgaacgtatacgaaccgctcttcgaaaaaaaactcaccttctaaaacatcgacgaaaccgacgtaaaaccctactactaaataacctaccgacaacaccgcgacgccgaaaaaacgctcgacatcttcgaaaacccgaacgaaaacgacaacgacgcgaaacccaacgacgaaaccgacgacgataaacgaaaactaaccctacaacgactaaacccccacgaaaaaaacgcgaaccataacgccgaatctaaaaactaccgcgac

SEQ ID NO: 29407 - DNA, 751 bp, Artificial Sequence
  chemically treated genomic DNA (Homo sapiens) CpG-island No: 29407
cgtagagggggtcgttatcgttttttgtttttttttcgttttttttttttttttcgtttgacgttgttttttcgggaagggtgtttggagggtagcggtcgttttaagtcggagtttcgtagcgttttttatgattagttcggtgtgtgtttttttttatcgcgggcgtaagtcggggaataagttttcgtttaaaatatgtttgaaggaggagatggttaagggcgaggcgtcggagaagattattattaacgtgggcggtacgcgatatgagatttatcgtagtattttgcgtattttatcgggaattcgtttcgtttggttggtcgatttcgacggcgggggtcggttcgagatcgatggcggcggtgtgggtagtagcggtagtagcggcggcgggggttgcgagttttttttcgataggtattcgggcgttttcgtttacgtgtttaattattatcgtatcggtaagttgtattgtttcgcggacgtgtgcgggtcgtttttcgaagaggagtttattttttggggtatcgacgagatcgacgtggaattttgttgttggatgatttatcggtagtatcgcgacgtcgaggaggcgttcgatattttcgagagttcggacggaggcggtagcggcgcggggtttagcgacgaggtcggcgacgatgagcgggagttggttttgtagcgattgggtttttacgagggaggcgcgggttatggcgtcgggtttgggggttgtcgcggt

SEQ ID NO: 29408 - DNA, 751 bp, Artificial Sequence
  chemically treated genomic DNA (Homo sapiens) CpG-island No: 29408
accgcgacaacccccaaacccgacgccataacccgcgcctccctcgtaaaaacccaatcgctacaaaaccaactcccgctcatcgtcgccgacctcgtcgctaaaccccgcgccgctaccgcctccgtccgaactctcgaaaatatcgaacgcctcctcgacgtcgcgatactaccgataaatcatccaacaacaaaattccacgtcgatctcgtcgataccccaaaaaataaactcctcttcgaaaaacgacccgcacacgtccgcgaaacaatacaacttaccgatacgataataattaaacacgtaaacgaaaacgcccgaatacctatcgaaaaaaaactcgcaacccccgccgccgctactaccgctactacccacaccgccgccatcgatctcgaaccgacccccgccgtcgaaatcgaccaaccaaacgaaacgaattcccgataaaatacgcaaaatactacgataaatctcatatcgcgtaccgcccacgttaataataatcttctccgacgcctcgcccttaaccatctcctccttcaaacatattttaaacgaaaacttattccccgacttacgcccgcgataaaaaaaaacacacaccgaactaatcataaaaaacgctacgaaactccgacttaaaacgaccgctaccctccaaacacccttcccgaaaaaacaacgtcaaacgaaaaaaaaaaaaaaaacgaaaaaaaaacaaaaaacgataacgaccccctctacg

SEQ ID NO: 29409 - DNA, 1059 bp, Artificial Sequence
  chemically treated genomic DNA (Homo sapiens) CpG-island No: 29409
tatacgcggtttttcgttacgacgggatatataaacgttttgggtcggggatacgttttcgtttttatttcgattaaagacgaggaagcgtatagtttacgcgtatcgcgaaggttcggggcgttcgcgtttatacgggttatttttcggttttaagatcgtattaagtttcggaatagtcggttttttcgtagcggcggtagcgtagtagtaataagtttttcgagcggttgtcggggttaggtcgatatttttacggtagtcggagtttcgtgggttcgggttgtttgcggttaatacgaggcggcggcggcggtatgtggttttttttttttatttataaattttagcgtcgggcgaggaaggtaggcggggtagagtagagagcggcggtcgggcgggcgggggttgcgtagggcgaggcggtagttggaaaataagcgcgttcgtaggagcgagtttcgggttttgcgttcgcggttgggagttgcgtcggatcgggcgtagcgttgcgggggtcgcgttggggcgggggtgttttagacggggcgttttgcgcggcgtcgagtttggggggcggggtcgttttggggagtcgggttttgggtattggcgaaggtgtatcgggggcggcggtcgagcggttaaggatatttgtaggtttttcgggtcgcgcggagagggagttttagcgtaacgtttcggcgtttggtttttgcgatttggcggcgttgggagttacgttatttacgcgtttgtttattttcgggcggggcgtcggttttggttcgcgcgcggtagggggcgggcgcgaggtggtataggggagggggcgtttcggcgtcggtgggttggggttttaggggtttatggttttttttcggcgttggtagcggtcgttacgttttagtggcgttttttttttcggggtttcgtttcgtttagacgcgtttttcgcggggcggggtgggcggggcgcggcgtagcgcggagtcgattcgatttattgtaggttttggcgatcgagcgtagttttttttttcggagtcgagttttaat

SEQ ID NO: 29410 - DNA, 1059 bp, Artificial Sequence
  chemically treated genomic DNA (Homo sapiens) CpG-island No: 29410
attaaaactcgactccgaaaaaaaaaactacgctcgatcgccaaaacctacaataaatcgaatcgactccgcgctacgccgcgccccgcccaccccgccccgcgaaaaacgcgtctaaacgaaacgaaaccccgaaaaaaaaaacgccactaaaacgtaacgaccgctaccaacgccgaaaaaaaaccataaacccctaaaaccccaacccaccgacgccgaaacgccccctcccctataccacctcgcgcccgccccctaccgcgcgcgaaccaaaaccgacgccccgcccgaaaataaacaaacgcgtaaataacgtaactcccaacgccgccaaatcgcaaaaaccaaacgccgaaacgttacgctaaaactccctctccgcgcgacccgaaaaacctacaaatatccttaaccgctcgaccgccgcccccgatacaccttcgccaatacccaaaacccgactccccaaaacgaccccgccccccaaactcgacgccgcgcaaaacgccccgtctaaaacacccccgccccaacgcgacccccgcaacgctacgcccgatccgacgcaactcccaaccgcgaacgcaaaacccgaaactcgctcctacgaacgcgcttattttccaactaccgcctcgccctacgcaacccccgcccgcccgaccgccgctctctactctaccccgcctaccttcctcgcccgacgctaaaatttataaataaaaaaaaaaaaccacataccgccgccgccgcctcgtattaaccgcaaacaacccgaacccacgaaactccgactaccgtaaaaatatcgacctaaccccgacaaccgctcgaaaaacttattactactacgctaccgccgctacgaaaaaaccgactattccgaaacttaatacgatcttaaaaccgaaaaataacccgtataaacgcgaacgccccgaaccttcgcgatacgcgtaaactatacgcttcctcgtctttaatcgaaataaaaacgaaaacgtatccccgacccaaaacgtttatatatcccgtcgtaacgaaaaaccgcgtata

SEQ ID NO: 29411 - DNA, 1059 bp, Artificial Sequence
  chemically treated genomic DNA (Homo sapiens) CpG-island No: 29411
gttggggttcggtttcggggagaaagattgcgttcggtcgttagggtttgtagtgagtcggatcggtttcgcgttgcgtcgcgtttcgtttatttcgtttcgcgaagggcgcgtttgggcgaggcggggtttcggaggaaaaggcgttattggggcgtggcggtcgttgttagcgtcggagggagattatgagtttttagggttttagtttatcggcgtcgaggcgtttttttttttatgttatttcgcgttcgttttttgtcgcgcgcgagttaaggtcggcgtttcgttcggagatgggtagacgcgtagatggcgtggtttttagcgtcgttagatcgtaggaattaggcgtcggggcgttgcgttgaggtttttttttcgcgcggttcgggaagtttgtaggtgtttttggtcgttcggtcgtcgttttcggtatattttcgttagtgtttagagttcggttttttagagcggtttcgttttttaggttcggcgtcgcgtaggacgtttcgtttgaggtattttcgttttagcgcggttttcgtagcgttgcgttcggttcggcgtagtttttagtcgcggacgtaggattcgaggttcgtttttgcgggcgcgtttgttttttagttgtcgtttcgttttgcgtagttttcgttcgttcggtcgtcgttttttgttttgtttcgtttgtttttttcgttcggcgttgggatttatgaatggggggaagaggttatatgtcgtcgtcgtcgtttcgtgttgatcgtaagtagttcgggtttacggagtttcggttgtcgtgagagtgtcggtttggtttcggtagtcgttcggaggatttgttgttgttgcgttgtcgtcgttgcggggaagtcggttatttcggggtttggtgcggttttggagtcggagggtggttcgtgtgagcgcgagcgtttcggattttcgcggtgcgcgtggattgtgcgttttttcgtttttggtcggggtgaaggcgggggcgtgttttcggtttagagcgtttgtgtgtttcgtcgtagcgggggatcgcgtgtg

SEQ ID NO: 29412 - DNA, 1059 bp, Artificial Sequence
  chemically treated genomic DNA (Homo sapiens) CpG-island No: 29412
cacacgcgatcccccgctacgacgaaacacacaaacgctctaaaccgaaaacacgcccccgccttcaccccgaccaaaaacgaaaaaacgcacaatccacgcgcaccgcgaaaatccgaaacgctcgcgctcacacgaaccaccctccgactccaaaaccgcaccaaaccccgaaataaccgacttccccgcaacgacgacaacgcaacaacaacaaatcctccgaacgactaccgaaaccaaaccgacactctcacgacaaccgaaactccgtaaacccgaactacttacgatcaacacgaaacgacgacgacgacatataacctcttccccccattcataaatcccaacgccgaacgaaaaaaacaaacgaaacaaaacaaaaaacgacgaccgaacgaacgaaaactacgcaaaacgaaacgacaactaaaaaacaaacgcgcccgcaaaaacgaacctcgaatcctacgtccgcgactaaaaactacgccgaaccgaacgcaacgctacgaaaaccgcgctaaaacgaaaatacctcaaacgaaacgtcctacgcgacgccgaacctaaaaaacgaaaccgctctaaaaaaccgaactctaaacactaacgaaaatataccgaaaacgacgaccgaacgaccaaaaacacctacaaacttcccgaaccgcgcgaaaaaaaaacctcaacgcaacgccccgacgcctaattcctacgatctaacgacgctaaaaaccacgccatctacgcgtctacccatctccgaacgaaacgccgaccttaactcgcgcgcgacaaaaaacgaacgcgaaataacataaaaaaaaaaacgcctcgacgccgataaactaaaaccctaaaaactcataatctccctccgacgctaacaacgaccgccacgccccaataacgccttttcctccgaaaccccgcctcgcccaaacgcgcccttcgcgaaacgaaataaacgaaacgcgacgcaacgcgaaaccgatccgactcactacaaaccctaacgaccgaacgcaatctttctccccgaaaccgaaccccaac

SEQ ID NO: 29413 - DNA, 527 bp, Artificial Sequence
  chemically treated genomic DNA (Homo sapiens) CpG-island No: 29413
atagttacgtcggtaatttttaatttgtcgcgggttcgcgcggggcggttttttagagttttagtttttttttttagagcgggttcgtcgtcgtcggtgggttgagggagggcggttcggcgtcgggcgggtcgggcggggcggcgtttgatttagcgggcgggttatgggttgtttagtcggttcgatcggtcgggaggggtacgagtcgcgggggcgttgcggggtcgggcggttcggggggtgacgggaagggaggtcggttcggcgtcgtttagtttcgggtttcgggcgggaagtgggcgagcgcgacggtgcggggcgcgcgggcgacgggttagcgggatgggagtagggtttttcggcggttcgtagtttcgggagtcgcgttgaagtcgggggcgggattagcgcggagtcgatatgtgtttgcgtttcggtgagcgattgggggcgcgcgggaggtttcgaattattttaatttttttataggagcggagtattgagttcggaattcgagtttttag

SEQ ID NO: 29414 - DNA, 527 bp, Artificial Sequence
  chemically treated genomic DNA (Homo sapiens) CpG-island No: 29414
ctaaaaactcgaattccgaactcaatactccgctcctataaaaaaattaaaataattcgaaacctcccgcgcgcccccaatcgctcaccgaaacgcaaacacatatcgactccgcgctaatcccgcccccgacttcaacgcgactcccgaaactacgaaccgccgaaaaaccctactcccatcccgctaacccgtcgcccgcgcgccccgcaccgtcgcgctcgcccacttcccgcccgaaacccgaaactaaacgacgccgaaccgacctcccttcccgtcaccccccgaaccgcccgaccccgcaacgcccccgcgactcgtacccctcccgaccgatcgaaccgactaaacaacccataacccgcccgctaaatcaaacgccgccccgcccgacccgcccgacgccgaaccgccctccctcaacccaccgacgacgacgaacccgctctaaaaaaaaaaactaaaactctaaaaaaccgccccgcgcgaacccgcgacaaattaaaaattaccgacgtaactat

SEQ ID NO: 29415 - DNA, 527 bp, Artificial Sequence
  chemically treated genomic DNA (Homo sapiens) CpG-island No: 29415
ttgggggttcgggtttcgggtttagtgtttcgtttttgtgggagggttggggtggttcggggtttttcgcgcgtttttagtcgtttatcgaggcgtagatatatgtcggtttcgcgttggtttcgttttcggttttagcgcggttttcgaggttgcgggtcgtcgggggattttgtttttatttcgttggttcgtcgttcgcgcgtttcgtatcgtcgcgttcgtttatttttcgttcggagttcggggttgggcggcgtcggatcggttttttttttcgttatttttcgggtcgttcggtttcgtagcgttttcgcggttcgtgtttttttcggtcggtcggatcggttgagtagtttatggttcgttcgttgagttaggcgtcgtttcgttcggttcgttcggcgtcgagtcgtttttttttagtttatcggcggcggcgggttcgttttagaaagggaaattgaggttttgaggagtcgtttcgcgcgggttcgcggtaagttgggggttgtcggcgtagttgt

SEQ ID NO: 29416 - DNA, 527 bp, Artificial Sequence
  chemically treated genomic DNA (Homo sapiens) CpG-island No: 29416
acaactacgccgacaacccccaacttaccgcgaacccgcgcgaaacgactcctcaaaacctcaatttccctttctaaaacgaacccgccgccgccgataaactaaaaaaaaacgactcgacgccgaacgaaccgaacgaaacgacgcctaactcaacgaacgaaccataaactactcaaccgatccgaccgaccgaaaaaaacacgaaccgcgaaaacgctacgaaaccgaacgacccgaaaaataacgaaaaaaaaaaccgatccgacgccgcccaaccccgaactccgaacgaaaaataaacgaacgcgacgatacgaaacgcgcgaacgacgaaccaacgaaataaaaacaaaatcccccgacgacccgcaacctcgaaaaccgcgctaaaaccgaaaacgaaaccaacgcgaaaccgacatatatctacgcctcgataaacgactaaaaacgcgcgaaaaaccccgaaccaccccaaccctcccacaaaaacgaaacactaaacccgaaacccgaacccccaa

SEQ ID NO: 29417 - DNA, 533 bp, Artificial Sequence
  chemically treated genomic DNA (Homo sapiens) CpG-island No: 29417
tttttgcgttcggtttagtttaagtttttttcgtcgcgcgcggtttcgggagcgttgggtaggtagttcgggtgggagcgtttacgtttttcgcggatacggacggacggatggacgggcggtcgcgtaggttcgcgtttcgttttcgtttcgtttgtcgcgtttttcggggcgttcgtattaaagcgtatatgtaagttatgaattattaattgaaaggagttaattatcggttttaaaaacgagtgtttgcgttcgtagcgtttcgggttattcgtttatttacggagcgatttatttcgttcggttggggagggggtttcgggagggagagagacggagaaacggagttcgagatcgggagagagtcggagaggtagggattggagagtttgggatacgaaggagaggcggggagagatcgagatttagcgagacgcgcggagggtcggacgggagttaaggcggtttagttttttttttttttcgagtaggcgaggagaggtggggttttaggatttttaaggttttgt

SEQ ID NO: 29418 - DNA, 533 bp, Artificial Sequence
  chemically treated genomic DNA (Homo sapiens) CpG-island No: 29418
acaaaaccttaaaaatcctaaaaccccacctctcctcgcctactcgaaaaaaaaaaaaaactaaaccgccttaactcccgtccgaccctccgcgcgtctcgctaaatctcgatctctccccgcctctccttcgtatcccaaactctccaatccctacctctccgactctctcccgatctcgaactccgtttctccgtctctctccctcccgaaaccccctccccaaccgaacgaaataaatcgctccgtaaataaacgaataacccgaaacgctacgaacgcaaacactcgtttttaaaaccgataattaactcctttcaattaataattcataacttacatatacgctttaatacgaacgccccgaaaaacgcgacaaacgaaacgaaaacgaaacgcgaacctacgcgaccgcccgtccatccgtccgtccgtatccgcgaaaaacgtaaacgctcccacccgaactacctacccaacgctcccgaaaccgcgcgcgacgaaaaaaacttaaactaaaccgaacgcaaaaa

SEQ ID NO: 29419 - DNA, 533 bp, Artificial Sequence
  chemically treated genomic DNA (Homo sapiens) CpG-island No: 29419
atagggttttggaggttttgagattttattttttttcgtttgttcgggggagaagaggaattgagtcgttttggttttcgttcggtttttcgcgcgtttcgttgaatttcggttttttttcgtttttttttcgtgttttagattttttagtttttgttttttcggttttttttcggtttcgggtttcgttttttcgtttttttttttttcgaggttttttttttagtcgggcggggtagatcgtttcgtaaataggcggatggttcggggcgttgcgagcgtagatattcgtttttagagtcggtaattgattttttttagttgataatttatggtttgtatatgcgttttaatgcgggcgtttcgggaggcgcggtaggcggggcgggagcggggcgcgggtttgcgcggtcgttcgtttattcgttcgttcgtgttcgcgggagacgtgggcgtttttattcgggttgtttgtttagcgttttcgaggtcgcgcgcggcggaaggggtttgagttgggtcggacgtaaagg

SEQ ID NO: 29420 - DNA, 533 bp, Artificial Sequence
  chemically treated genomic DNA (Homo sapiens) CpG-island No: 29420
cctttacgtccgacccaactcaaaccccttccgccgcgcgcgacctcgaaaacgctaaacaaacaacccgaataaaaacgcccacgtctcccgcgaacacgaacgaacgaataaacgaacgaccgcgcaaacccgcgccccgctcccgccccgcctaccgcgcctcccgaaacgcccgcattaaaacgcatatacaaaccataaattatcaactaaaaaaaatcaattaccgactctaaaaacgaatatctacgctcgcaacgccccgaaccatccgcctatttacgaaacgatctaccccgcccgactaaaaaaaaaacctcgaaaaaaaaaaaaacgaaaaaacgaaacccgaaaccgaaaaaaaaccgaaaaaacaaaaactaaaaaatctaaaacacgaaaaaaaaacgaaaaaaaaccgaaattcaacgaaacgcgcgaaaaaccgaacgaaaaccaaaacgactcaattcctcttctcccccgaacaaacgaaaaaaaataaaatctcaaaacctccaaaaccctat

SEQ ID NO: 29421 - DNA, 552 bp, Artificial Sequence
  chemically treated genomic DNA (Homo sapiens) CpG-island No: 29421
attttttcgcggttgtttttgtaggcgggttttttatttattcggttgggagaagtttcggtcgttcgttcgggggagttttcgtttttttcgttcgagtaaattttttttaaattcgagagtcgtttagggcgaagtcgttttcgaggtttaattcgcgtttttcgcggatttgtataatcgggttagcggtcgcgttttttttcgttttcgtcgtcgtcgtcgtcgtcgcgcgcgattttttcgttgttatttagggaggtttagcgcgatttgcggtttaatttttcgggatcgttcggtcgtcgtttttcgaggggtcgttagattgttttttttataattgattgattttatttgtcggattgggattttaaagcgtcggcggcgcgggggcgtttgggaaggagcggggttcgaggagggcggggcggggcgggggtttggcgggtttcgtcgggagttgtagtttcgcggtcgtatcgttcggtttgggaggttagagtatgaaatgcgtaagtgataaggcggtgattacgttcgggtttggta

SEQ ID NO: 29422 - DNA, 552 bp, Artificial Sequence
  chemically treated genomic DNA (Homo sapiens) CpG-island No: 29422
taccaaacccgaacgtaatcaccgccttatcacttacgcatttcatactctaacctcccaaaccgaacgatacgaccgcgaaactacaactcccgacgaaacccgccaaacccccgccccgccccgccctcctcgaaccccgctccttcccaaacgcccccgcgccgccgacgctttaaaatcccaatccgacaaataaaatcaatcaattataaaaaaaacaatctaacgacccctcgaaaaacgacgaccgaacgatcccgaaaaattaaaccgcaaatcgcgctaaacctccctaaataacaacgaaaaaatcgcgcgcgacgacgacgacgacgacgaaaacgaaaaaaaacgcgaccgctaacccgattatacaaatccgcgaaaaacgcgaattaaacctcgaaaacgacttcgccctaaacgactctcgaatttaaaaaaaatttactcgaacgaaaaaaacgaaaactcccccgaacgaacgaccgaaacttctcccaaccgaataaataaaaaacccgcctacaaaaacaaccgcgaaaaaat

SEQ ID NO: 29423 - DNA, 552 bp, Artificial Sequence
  chemically treated genomic DNA (Homo sapiens) CpG-island No: 29423
tgttaggttcggacgtggttatcgttttgttatttgcgtattttatgttttggttttttaggtcgggcgatgcggtcgcggggttgtagttttcggcgaggttcgttaggttttcgtttcgtttcgtttttttcgggtttcgtttttttttaggcgttttcgcgtcgtcggcgttttgaagttttaattcggtaaatagagttaattaattatgaagggaataatttggcggtttttcggggagcggcggtcgagcgatttcgggggattaggtcgtaaatcgcgttgagtttttttaagtgatagcgagagaatcgcgcgcggcggcgacggcggcggcgggagcgggagggagcgcggtcgttaattcgattatgtagattcgcggggggcgcggattaggtttcgggggcggtttcgttttaagcggttttcggatttgggaaaagtttattcgggcggagggggcggagattttttcgggcgggcggtcgggattttttttagtcgggtgaatggaggattcgtttgtaggagtagtcgcgaaagagt

SEQ ID NO: 29424 - DNA, 552 bp, Artificial Sequence
  chemically treated genomic DNA (Homo sapiens) CpG-island No: 29424
actctttcgcgactactcctacaaacgaatcctccattcacccgactaaaaaaaatcccgaccgcccgcccgaaaaaatctccgccccctccgcccgaataaacttttcccaaatccgaaaaccgcttaaaacgaaaccgcccccgaaacctaatccgcgccccccgcgaatctacataatcgaattaacgaccgcgctccctcccgctcccgccgccgccgtcgccgccgcgcgcgattctctcgctatcacttaaaaaaactcaacgcgatttacgacctaatcccccgaaatcgctcgaccgccgctccccgaaaaaccgccaaattattcccttcataattaattaactctatttaccgaattaaaacttcaaaacgccgacgacgcgaaaacgcctaaaaaaaaacgaaacccgaaaaaaacgaaacgaaacgaaaacctaacgaacctcgccgaaaactacaaccccgcgaccgcatcgcccgacctaaaaaaccaaaacataaaatacgcaaataacaaaacgataaccacgtccgaacctaaca

SEQ ID NO: 29425 - DNA, 655 bp, Artificial Sequence
  chemically treated genomic DNA (Homo sapiens) CpG-island No: 29425
agcgtttacgagagttgggttgcgggcggtagcggtaggcgaagaatttagcgcggggaatttaggtttcggcggtgtacgattttttatagtttttattcgttttcgcgttcgcgtaataaaatttgttacggtcgcgtttcgatttagttgtgcgttcgcgggtttcggatttatcgttcgtttagtttggcgcggcgtttttattttagaaacgttgggtggatttcgcgtaattttttatttatagggtagtcggtagtcgcgtcgtcgcgtttcggtttagtttttggcgtcgtagatcgttcgtttcgcgtttttaaaagtatcgcgttcgtttagaagttcgggtagtttcgcgatttttatttacgttttttagtatcgtcgttgttttaatcgttatttagtttttcgtttgcgtttgcgtttgtagtttattggttttttaggatttcgatgggcgtgttaggataatttaaggcgtaggcgcggcggggttttaaagggattcggcggttttttttgtataacgggttcgagtaggttaggggtcgcgtaggcggaggaaaggagtaatttaggggaaggatcgagtgtagcggggacggggaaatttttttttttttttcgtttgttttttaaagtattagtt

SEQ ID NO: 29426 - DNA, 655 bp, Artificial Sequence
  chemically treated genomic DNA (Homo sapiens) CpG-island No: 29426
aactaatactttaaaaaacaaacgaaaaaaaaaaaaaaatttccccgtccccgctacactcgatccttcccctaaattactcctttcctccgcctacgcgacccctaacctactcgaacccgttatacaaaaaaaaccgccgaatccctttaaaaccccgccgcgcctacgccttaaattatcctaacacgcccatcgaaatcctaaaaaaccaataaactacaaacgcaaacgcaaacgaaaaactaaataacgattaaaacaacgacgatactaaaaaacgtaaataaaaatcgcgaaactacccgaacttctaaacgaacgcgatacttttaaaaacgcgaaacgaacgatctacgacgccaaaaactaaaccgaaacgcgacgacgcgactaccgactaccctataaataaaaaattacgcgaaatccacccaacgtttctaaaataaaaacgccgcgccaaactaaacgaacgataaatccgaaacccgcgaacgcacaactaaatcgaaacgcgaccgtaacaaattttattacgcgaacgcgaaaacgaataaaaactataaaaaatcgtacaccgccgaaacctaaattccccgcgctaaattcttcgcctaccgctaccgcccgcaacccaactctcgtaaacgct

SEQ ID NO: 29427 - DNA, 655 bp, Artificial Sequence
  chemically treated genomic DNA (Homo sapiens) CpG-island No: 29427
ggttggtgttttgaaagataggcggaggggagagagggattttttcgttttcgttgtattcggttttttttttgggttatttttttttttcgtttgcgcggtttttaatttgttcgaattcgttgtgtagaagaggtcgtcgggtttttttaaggtttcgtcgcgtttgcgttttgggttattttgatacgtttatcgggattttgaggagttagtgggttgtaggcgtaggcgtaggcgaggggttgggtggcggttgagatagcggcggtattgggaggcgtaggtgagggtcgcgaggttgttcgagtttttgagcgagcgcggtgtttttgggaacgcgggacgggcgatttgcggcgttaggagttgggtcgaggcgcggcggcgcggttgtcggttgttttgtgaatgggaagttacgcgaagtttatttagcgtttttgaggtgagggcgtcgcgttaggttgggcgggcggtgaattcgggattcgcgggcgtatagttgggtcgaggcgcggtcgtggtaagttttgttgcgcgagcgcgggggcgggtgggggttgtggggggtcgtgtatcgtcggggtttgagtttttcgcgttggatttttcgtttgtcgttgtcgttcgtagtttaattttcgtgggcgtt

SEQ ID NO: 29428 - DNA, 655 bp, Artificial Sequence
  chemically treated genomic DNA (Homo sapiens) CpG-island No: 29428
aacgcccacgaaaattaaactacgaacgacaacgacaaacgaaaaatccaacgcgaaaaactcaaaccccgacgatacacgaccccccacaacccccacccgcccccgcgctcgcgcaacaaaacttaccacgaccgcgcctcgacccaactatacgcccgcgaatcccgaattcaccgcccgcccaacctaacgcgacgccctcacctcaaaaacgctaaataaacttcgcgtaacttcccattcacaaaacaaccgacaaccgcgccgccgcgcctcgacccaactcctaacgccgcaaatcgcccgtcccgcgttcccaaaaacaccgcgctcgctcaaaaactcgaacaacctcgcgaccctcacctacgcctcccaataccgccgctatctcaaccgccacccaacccctcgcctacgcctacgcctacaacccactaactcctcaaaatcccgataaacgtatcaaaataacccaaaacgcaaacgcgacgaaaccttaaaaaaacccgacgacctcttctacacaacgaattcgaacaaattaaaaaccgcgcaaacgaaaaaaaaaaataacccaaaaaaaaaaccgaatacaacgaaaacgaaaaaatccctctctcccctccgcctatctttcaaaacaccaacc

SEQ ID NO: 29429 - DNA, 839 bp, Artificial Sequence
  chemically treated genomic DNA (Homo sapiens) CpG-island No: 29429
gcgttttatcgtcgattcgcgtcgaatgtatggtcgcgtcgttagtttgttcgtttggtgtagtaagatttttacgttgtttaagagtatggttacgttgttagtcgcgttgggcggtcggtttgcgtatttggcggagttgtcgatcgttgatacgggttagtcgttggcgtcgttgtttgaggcgttttgattgtcggggtcgttttgtttgggtcgttcgtattggtttaattggtgtcgcgaggttgtggcgcgcgagattttcgagtgcggcgttttcgtgtagtattatcgcgttatttacgagttgcgcgtattggacgcggcgttttcgcgttgttcgcgtcgtaagttttcgtagttcgttggcgtttcggttcgcgagtttattttgtaggaggattacgtggcggtcggttttggttagtttagcgtcgtcgtcgtttacggttcgttggtcgattgggagtttttggatattttgggttcgtttgaggtataggattgttaggcggcgttatttgagttcgagtagttggcgcgtcggtcgtttttttgtacggaattgcgcggcgtttaggattatttcgatttgcgtaaggagcgtatcgtttatttttttttggagtattggcgtttttgggtttttttcggatcgggtttttcgcggattaggcgcgtttaggtagattgttttttggcgtgacggtcgttcgtgttggtcggagttggaggttacggacgtttttcggttgtcggtgagtaagggcgaggtttatagttttaacgaacggttgcggtagttgttgaggtagcggtaggtagtgggtaagttg

SEQ ID NO: 29430 - DNA, 839 bp, Artificial Sequence
  chemically treated genomic DNA (Homo sapiens) CpG-island No: 29430
caacttacccactacctaccgctacctcaacaactaccgcaaccgttcgttaaaactataaacctcgcccttactcaccgacaaccgaaaaacgtccgtaacctccaactccgaccaacacgaacgaccgtcacgccaaaaaacaatctacctaaacgcgcctaatccgcgaaaaacccgatccgaaaaaaacccaaaaacgccaatactccaaaaaaaaataaacgatacgctccttacgcaaatcgaaataatcctaaacgccgcgcaattccgtacaaaaaaacgaccgacgcgccaactactcgaactcaaataacgccgcctaacaatcctatacctcaaacgaacccaaaatatccaaaaactcccaatcgaccaacgaaccgtaaacgacgacgacgctaaactaaccaaaaccgaccgccacgtaatcctcctacaaaataaactcgcgaaccgaaacgccaacgaactacgaaaacttacgacgcgaacaacgcgaaaacgccgcgtccaatacgcgcaactcgtaaataacgcgataatactacacgaaaacgccgcactcgaaaatctcgcgcgccacaacctcgcgacaccaattaaaccaatacgaacgacccaaacaaaacgaccccgacaatcaaaacgcctcaaacaacgacgccaacgactaacccgtatcaacgatcgacaactccgccaaatacgcaaaccgaccgcccaacgcgactaacaacgtaaccatactcttaaacaacgtaaaaatcttactacaccaaacgaacaaactaacgacgcgaccatacattcgacgcgaatcgacgataaaacgc

SEQ ID NO: 29431 - DNA, 839 bp, Artificial Sequence
  chemically treated genomic DNA (Homo sapiens) CpG-island No: 29431
tagtttgtttattgtttgtcgttgttttagtagttgtcgtagtcgttcgttggggttgtgggtttcgtttttgtttatcggtagtcggggggcgttcgtggtttttagtttcggttagtacgggcggtcgttacgttagggagtagtttgtttaggcgcgtttggttcgcggaaggttcggttcgaggaaggtttagaggcgttagtgttttaggaagaggtaaacgatgcgttttttgcgtaggtcgaggtagttttggacgtcgcgtagtttcgtgtagaggggcggtcggcgcgttagttgttcgggtttaagtagcgtcgtttggtaattttgtgttttaggcgggtttagggtgtttaggggtttttagtcggttagcgggtcgtgggcggcggcggcgttgggttggttagagtcggtcgttacgtagtttttttataggatgggttcgcggatcggggcgttagcggattgcgggggtttgcggcgcggatagcgcgggggcgtcgcgtttagtgcgcgtagttcgtaggtggcgcggtgatgttgtacggagacgtcgtattcgaggatttcgcgcgttatagtttcgcggtattagttgagttagtgcgagcggtttaggtaaagcggtttcggtagttagggcgttttaggtagcggcgttagcggttggttcgtgttagcggtcggtagtttcgttaggtgcgtaggtcggtcgtttagcgcggttagtagcgtggttatgtttttgagtagcgtggagattttgttgtattaggcgggtaggttggcggcgcggttatgtattcggcgcgggtcgacggtgaagcgt

SEQ ID NO: 29432 - DNA, 839 bp, Artificial Sequence
  chemically treated genomic DNA (Homo sapiens) CpG-island No: 29432
acgcttcaccgtcgacccgcgccgaatacataaccgcgccgccaacctacccgcctaatacaacaaaatctccacgctactcaaaaacataaccacgctactaaccgcgctaaacgaccgacctacgcacctaacgaaactaccgaccgctaacacgaaccaaccgctaacgccgctacctaaaacgccctaactaccgaaaccgctttacctaaaccgctcgcactaactcaactaataccgcgaaactataacgcgcgaaatcctcgaatacgacgtctccgtacaacatcaccgcgccacctacgaactacgcgcactaaacgcgacgcccccgcgctatccgcgccgcaaacccccgcaatccgctaacgccccgatccgcgaacccatcctataaaaaaactacgtaacgaccgactctaaccaacccaacgccgccgccgcccacgacccgctaaccgactaaaaacccctaaacaccctaaacccgcctaaaacacaaaattaccaaacgacgctacttaaacccgaacaactaacgcgccgaccgcccctctacacgaaactacgcgacgtccaaaactacctcgacctacgcaaaaaacgcatcgtttacctcttcctaaaacactaacgcctctaaaccttcctcgaaccgaaccttccgcgaaccaaacgcgcctaaacaaactactccctaacgtaacgaccgcccgtactaaccgaaactaaaaaccacgaacgccccccgactaccgataaacaaaaacgaaacccacaaccccaacgaacgactacgacaactactaaaacaacgacaaacaataaacaaacta

SEQ ID NO: 29433 - DNA, 822 bp, Artificial Sequence
  chemically treated genomic DNA (Homo sapiens) CpG-island No: 29433
ggcggtacgtgtcgttaagttcgggtttggcgtacggcgtgtattggttttagtattttttgtcgtttttagacggcggcgtattttcgcgttacgaaagttttacgttcgatttttttatgttcggttatttttagttatcggagatgggtttgagtcgcgaggatcgtaagtttcgttatttattgtgttacgagatgttttatcggttggatagttattcgtgggagcgtattcgttttttttatcgcgtggtgttggaggaggtggaggtcggtcggcgcggttggagcgacggtttcgaggattttaggtataggtttttcggaaacggtttggaggttgggtcggttttcgaagaataggcgaagaaaaaggaagagaaggggaaagaataggagcggatcgaagaggtcgtttcggtttagaagggggattcgtttaaggggtagcgcgaggttttggtttttgtgtcgtagtcgtcgttatcgttcgttcgttcgtcggttcgtcgcgttttttcgtcgcgttttttcggattttagatttttcgggtttcgaagttttcgtcgaagattttttggaattagtgtttgagatgggcgaatttagtaacgaggatatttgtcgttatatcgatcgtagtttttttttttggaaggagaaggaggtagagttgtttgatatttgagtagcggaattcggaattcgtagtttattttcgagcgttttaacgtgggtttggacgtttgtttgacgttttttagaggcgtgaagtagcgggaagaatttaggattgtggttttgagtagttcggagggt

SEQ ID NO: 29434 - DNA, 822 bp, Artificial Sequence
  chemically treated genomic DNA (Homo sapiens) CpG-island No: 29434
accctccgaactactcaaaaccacaatcctaaattcttcccgctacttcacgcctctaaaaaacgtcaaacaaacgtccaaacccacgttaaaacgctcgaaaataaactacgaattccgaattccgctactcaaatatcaaacaactctacctccttctccttccaaaaaaaaaaactacgatcgatataacgacaaatatcctcgttactaaattcgcccatctcaaacactaattccaaaaaatcttcgacgaaaacttcgaaacccgaaaaatctaaaatccgaaaaaacgcgacgaaaaaacgcgacgaaccgacgaacgaacgaacgataacgacgactacgacacaaaaaccaaaacctcgcgctaccccttaaacgaatcccccttctaaaccgaaacgacctcttcgatccgctcctattctttccccttctcttcctttttcttcgcctattcttcgaaaaccgacccaacctccaaaccgtttccgaaaaacctatacctaaaatcctcgaaaccgtcgctccaaccgcgccgaccgacctccacctcctccaacaccacgcgataaaaaaaacgaatacgctcccacgaataactatccaaccgataaaacatctcgtaacacaataaataacgaaacttacgatcctcgcgactcaaacccatctccgataactaaaaataaccgaacataaaaaaatcgaacgtaaaactttcgtaacgcgaaaatacgccgccgtctaaaaacgacaaaaaatactaaaaccaatacacgccgtacgccaaacccgaacttaacgacacgtaccgcc

SEQ ID NO: 29435 - DNA, 822 bp, Artificial Sequence
  chemically treated genomic DNA (Homo sapiens) CpG-island No: 29435
gtttttcgggttgtttaaggttatagttttgggtttttttcgttgttttacgtttttggagggcgttagataggcgtttaggtttacgttaagacgttcgagggtgaattgcgaatttcgaatttcgttgtttagatgttaaatagttttgtttttttttttttttagaaggagaagttgcggtcgatgtagcggtagatgttttcgttgttgaattcgtttattttagatattagttttaaagggttttcggcgggggtttcggaattcggagagtttgagattcggggaggcgcggcggggaggcgcggcgggtcggcgggcgggcgggcggtggcggcggttgcggtataggggttagggtttcgcgttgttttttgggcgggttttttttttgaatcggagcggttttttcggttcgtttttgtttttttttttttttttttttttttttcgtttgtttttcgggggtcggtttagtttttaggtcgttttcgaagaatttgtgtttgaggttttcgaagtcgtcgttttagtcgcgtcggtcggtttttattttttttagtattacgcggtggaagaggcggatgcgtttttacgggtggttgtttagtcggtggaatatttcgtagtatagtaggtggcggaatttgcgattttcgcggtttaggtttattttcggtagttggaagtagtcgagtatgaagaggtcgagcgtgaggttttcgtagcgcgggggtgcgtcgtcgtttaggggcgataggaagtgttggggttagtatacgtcgtgcgttaggttcgggtttggcggtacgtgtcgtt

SEQ ID NO: 29436 - DNA, 822 bp, Artificial Sequence
  chemically treated genomic DNA (Homo sapiens) CpG-island No: 29436
aacgacacgtaccgccaaacccgaacctaacgcacgacgtatactaaccccaacacttcctatcgcccctaaacgacgacgcacccccgcgctacgaaaacctcacgctcgacctcttcatactcgactacttccaactaccgaaaataaacctaaaccgcgaaaatcgcaaattccgccacctactatactacgaaatattccaccgactaaacaaccacccgtaaaaacgcatccgcctcttccaccgcgtaatactaaaaaaaataaaaaccgaccgacgcgactaaaacgacgacttcgaaaacctcaaacacaaattcttcgaaaacgacctaaaaactaaaccgacccccgaaaaacaaacgaaaaaaaaaaaaaaaaaaaaaaaaaaacaaaaacgaaccgaaaaaaccgctccgattcaaaaaaaaaacccgcccaaaaaacaacgcgaaaccctaacccctataccgcaaccgccgccaccgcccgcccgcccgccgacccgccgcgcctccccgccgcgcctccccgaatctcaaactctccgaattccgaaacccccgccgaaaaccctttaaaactaatatctaaaataaacgaattcaacaacgaaaacatctaccgctacatcgaccgcaacttctccttctaaaaaaaaaaaaaaacaaaactatttaacatctaaacaacgaaattcgaaattcgcaattcaccctcgaacgtcttaacgtaaacctaaacgcctatctaacgccctccaaaaacgtaaaacaacgaaaaaaacccaaaactataaccttaaacaacccgaaaaac

SEQ ID NO: 29437 - DNA, 588 bp, Artificial Sequence
  chemically treated genomic DNA (Homo sapiens) CpG-island No: 29437
gaattacgtgacgtaatcggacgattaatcgttttttatttttgttcgcggtttagtttttggttttttttttcgttttcgtttttttcgtttagtttcgttttttgtttgcggagagttcgcgtttgcgcgttgtgttttgcgcgttttttttttcgcgcgcgtttttcgtggaagagtaggggtagcgtgggaggcgttaagggagcgcgaatttgaggaggaagaaacggggttagcgcgtaggtttagaacggttcgagtcgcggtagtcggcgacgttttagagcggaagagggaagtgaattaggcgtcgggtagtgggttgttgggttgggtttgttgaggtagaggtagcgttaagaagaggtttttgtcgttggtcgggattgggatgtcgaagaatatagtgtcgtcggttcgttttcggaaggtggacgtggatgaatatgacgagaataagttcgtggacgaagaagatgggggcgacggttaggtcgggttcgacgagggcgaggtggatttttgtttgcggtaatatttttgtatttatcgttttttttattttagtttagtttagttcgtttt

SEQ ID NO: 29438 - DNA, 588 bp, Artificial Sequence
  chemically treated genomic DNA (Homo sapiens) CpG-island No: 29438
aaaacgaactaaactaaactaaaataaaaaaaacgataaatacaaaaatattaccgcaaacaaaaatccacctcgccctcgtcgaacccgacctaaccgtcgcccccatcttcttcgtccacgaacttattctcgtcatattcatccacgtccaccttccgaaaacgaaccgacgacactatattcttcgacatcccaatcccgaccaacgacaaaaacctcttcttaacgctacctctacctcaacaaacccaacccaacaacccactacccgacgcctaattcacttccctcttccgctctaaaacgtcgccgactaccgcgactcgaaccgttctaaacctacgcgctaaccccgtttcttcctcctcaaattcgcgctcccttaacgcctcccacgctacccctactcttccacgaaaaacgcgcgcgaaaaaaaaaacgcgcaaaacacaacgcgcaaacgcgaactctccgcaaacaaaaaacgaaactaaacgaaaaaaacgaaaacgaaaaaaaaaaccaaaaactaaaccgcgaacaaaaataaaaaacgattaatcgtccgattacgtcacgtaattc

SEQ ID NO: 29439 - DNA, 588 bp, Artificial Sequence
  chemically treated genomic DNA (Homo sapiens) CpG-island No: 29439
agggcgggttgggttgggttggggtggggagggcggtgaatgtaaggatattgtcgtaggtaggagtttatttcgttttcgtcgggttcggtttggtcgtcgtttttatttttttcgtttacgaatttgttttcgttatatttatttacgtttatttttcggaagcgggtcgacgatattgtgtttttcgatattttaatttcgattagcggtaaaggtttttttttggcgttgtttttattttagtaagtttagtttagtaatttattattcggcgtttgatttatttttttttttcgttttgaggcgtcgtcgattgtcgcggttcggatcgttttgggtttgcgcgttagtttcgtttttttttttttaggttcgcgtttttttggcgttttttacgttgtttttgtttttttacggagagcgcgcgcgagggaaggagcgcgtaggatatagcgcgtaggcgcgggtttttcgtaggtaaggggcggggttgggcgaaggaggcgggggcgagagggagggttaaaagttggatcgcgggtagaggtaagaagcgattggtcgttcgattgcgttacgtgattt

SEQ ID NO: 29440 - DNA, 588 bp, Artificial Sequence
  chemically treated genomic DNA (Homo sapiens) CpG-island No: 29440
aaatcacgtaacgcaatcgaacgaccaatcgcttcttacctctacccgcgatccaacttttaaccctccctctcgcccccgcctccttcgcccaaccccgccccttacctacgaaaaacccgcgcctacgcgctatatcctacgcgctccttccctcgcgcgcgctctccgtaaaaaaacaaaaacaacgtaaaaaacgccaaaaaaacgcgaacctaaaaaaaaaaaaacgaaactaacgcgcaaacccaaaacgatccgaaccgcgacaatcgacgacgcctcaaaacgaaaaaaaaaaataaatcaaacgccgaataataaattactaaactaaacttactaaaataaaaacaacgccaaaaaaaaacctttaccgctaatcgaaattaaaatatcgaaaaacacaatatcgtcgacccgcttccgaaaaataaacgtaaataaatataacgaaaacaaattcgtaaacgaaaaaaataaaaacgacgaccaaaccgaacccgacgaaaacgaaataaactcctacctacgacaatatccttacattcaccgccctccccaccccaacccaacccaacccgccct

SEQ ID NO: 29441 - DNA, 755 bp, Artificial Sequence
  chemically treated genomic DNA (Homo sapiens) CpG-island No: 29441
gtgttcgacgagaggacggttgatcgggcggcgcggttgcggagttttttgtttgagttggtagcgttgatcgcgtgtatttacgtgtagtgggattgtgtttcgttcgatttcgtagcgttttttttcgttgtcgcgttcgcgttgtttaacgcgttgtagttgcgcgttttcgtcgagtcggggggcgtcgtgcgcgttgcgttggtggtgcgtgggtagtacgcgttttttttcgtagtttttcgcgtcgacggtcgttggtattatgtgtgcgttacgtgggagtagcggggcgggcgttgggcgttgtttttcgatgggaggcggcgcgttggggcgcgggggttgggcgtcggttattcggtgtcgttcggcggtattttggtgttgggttaggattaggattttttgggcggtggtttttcggtgcgttacgtttttagcggtaattttatcgatttttatttgtgggcgcgggcgttgagtttcgtttagttgtatcgggtacgggtttgcgcgtcgtttttagagggtttgttttttcgttgggattcgggcgttttggacgttacgttttcgttgttgtttattgtgtgggtgcgttttttttgtttcggtacgattcgtttcgtttcggttttattttatggtttcgaatttttttttttcgattttggaattcgatttattttttgttaattaagttacgtttagttttggttacgttttttttaggtcgtagtgtttgtaag

SEQ ID NO: 29442 - DNA, 755 bp, Artificial Sequence
  chemically treated genomic DNA (Homo sapiens) CpG-island No: 29442
cttacaaacactacgacctaaaaaaaacgtaaccaaaactaaacgtaacttaattaacaaaaaataaatcgaattccaaaatcgaaaaaaaaaaattcgaaaccataaaataaaaccgaaacgaaacgaatcgtaccgaaacaaaaaaaacgcacccacacaataaacaacaacgaaaacgtaacgtccaaaacgcccgaatcccaacgaaaaaacaaaccctctaaaaacgacgcgcaaacccgtacccgatacaactaaacgaaactcaacgcccgcgcccacaaataaaaatcgataaaattaccgctaaaaacgtaacgcaccgaaaaaccaccgcccaaaaaatcctaatcctaacccaacaccaaaataccgccgaacgacaccgaataaccgacgcccaacccccgcgccccaacgcgccgcctcccatcgaaaaacaacgcccaacgcccgccccgctactcccacgtaacgcacacataataccaacgaccgtcgacgcgaaaaactacgaaaaaaaacgcgtactacccacgcaccaccaacgcaacgcgcacgacgccccccgactcgacgaaaacgcgcaactacaacgcgttaaacaacgcgaacgcgacaacgaaaaaaaacgctacgaaatcgaacgaaacacaatcccactacacgtaaatacacgcgatcaacgctaccaactcaaacaaaaaactccgcaaccgcgccgcccgatcaaccgtcctctcgtcgaacac

SEQ ID NO: 29443 - DNA, 755 bp, Artificial Sequence
  chemically treated genomic DNA (Homo sapiens) CpG-island No: 29443
tttgtaggtattgcggtttggagagggcgtggttagagttaggcgtggtttggttggtaaggggtgggtcgagttttagggtcggaagggaaggattcggggttatggggtggggtcggggcggggcgggtcgtatcgggatagagaaggcgtatttatatagtgggtagtagcgagggcgtgacgtttagggcgttcgggttttagcggaagagtaggttttttgagggcggcgcgtaggttcgtgttcggtgtagttgagcggggtttagcgttcgcgtttataggtggaagtcggtgaggttgtcgttgagggcgtgacgtatcgagaagttatcgtttagagagttttgattttggtttagtattaggatgtcgtcggacggtatcgggtggtcggcgtttagttttcgcgttttagcgcgtcgttttttatcggagaatagcgtttagcgttcgtttcgttgtttttacgtggcgtatatatggtgttagcggtcgtcggcgcggaaggttgcgaggaagggcgcgtgttgtttacgtattattagcgtagcgcgtacgacgtttttcggttcggcgaaggcgcgtagttgtagcgcgttgggtagcgcgggcgcggtaacggagaagagcgttgcggggtcgggcgaggtatagttttattgtacgtgagtatacgcggttagcgttgttagtttaggtagagggtttcgtagtcgcgtcgttcggttagtcgttttttcgtcgaatat

SEQ ID NO: 29444 - DNA, 755 bp, Artificial Sequence
  chemically treated genomic DNA (Homo sapiens) CpG-island No: 29444
atattcgacgaaaaaacgactaaccgaacgacgcgactacgaaaccctctacctaaactaacaacgctaaccgcgtatactcacgtacaataaaactatacctcgcccgaccccgcaacgctcttctccgttaccgcgcccgcgctacccaacgcgctacaactacgcgccttcgccgaaccgaaaaacgtcgtacgcgctacgctaataatacgtaaacaacacgcgcccttcctcgcaaccttccgcgccgacgaccgctaacaccatatatacgccacgtaaaaacaacgaaacgaacgctaaacgctattctccgataaaaaacgacgcgctaaaacgcgaaaactaaacgccgaccacccgataccgtccgacgacatcctaatactaaaccaaaatcaaaactctctaaacgataacttctcgatacgtcacgccctcaacgacaacctcaccgacttccacctataaacgcgaacgctaaaccccgctcaactacaccgaacacgaacctacgcgccgccctcaaaaaacctactcttccgctaaaacccgaacgccctaaacgtcacgccctcgctactacccactatataaatacgccttctctatcccgatacgacccgccccgccccgaccccaccccataaccccgaatccttcccttccgaccctaaaactcgacccaccccttaccaaccaaaccacgcctaactctaaccacgccctctccaaaccgcaatacctacaaa

SEQ ID NO: 29445 - DNA, 1233 bp, Artificial Sequence
  chemically treated genomic DNA (Homo sapiens) CpG-island No: 29445
ttcggttcggtaaggggcgcgttaaaggtgatattggaaggagtagggatagtttttggcggtagagatggagtcgagagcgatgtaggcggtttattttagtcggcgcgatttgtcggtatacgggaattcgagtggtcgtcgttagagtcggttagttgggggagcgcgggcgttttttttggattcgttcgtttttgggttgggttcggagtcgggtcggttggagcgagataggggcgggaggggtcgggttagcgggaggagggcggggtttttttttgttaggggatttgcgtcgcgtagtttagattcgcgcgggtttcgtttttttttttgcgtttttttcgggggcggggcgtttttttttggtttcggggcgcggtgggcgtgggttgcgggagtcgaacggttggcgtttcgggtttttcgtttcgaatttcgtagaagtttttttttcggcgttttagtttttaattttttttatcgttttttttattttcggagtcgttttttttttcggtttcgttttcgtcgggtttcgttttcgttttcgtttttttttttgtgtttttcgcgtcgcgcgttttttggtttttagggggttgttcgggcggggcggcgtagcgcggcggcgcggggaagggggaggagagtcgttcgttagtcgagtatttttagcgagttagcgagttagcgggtcgcgttgcgcgggggaggaggattcgtttttcgttcgattttagcggagttttttgtttttagttagaagtttgtatgtcgggatcgtgatagttgcgggcggggaggacggcggggtcgcggggttagcggcgtggtggagaatagaggcggttgtttgttatgtagtttacggcgtggcggttgcgggtcggggattggcggcggcgggcgaggcggcgtttatagtattcgggatttagttgtcggagggataaattaattttttgagcgcgggatttgaggttggcgcggtcgggagttatttgtagtttgcggtgaggcgattttggttttcggggcgcgcggtatggcgcggggaagcgggtcgtgttgagcgagttttttcgatagattcgcggtcgttgttgttgttcgttcgttcgtttgttttttcgaaggtttggcgcggggtttcgttcgttttgttttgtagttatagcgtagggttggtttgggagttataataatgttatgatgttttggagatag

SEQ ID NO: 29446 - DNA, 1233 bp, Artificial Sequence
  chemically treated genomic DNA (Homo sapiens) CpG-island No: 29446
ctatctccaaaacatcataacattattataactcccaaaccaaccctacgctataactacaaaacaaaacgaacgaaaccccgcgccaaaccttcgaaaaaacaaacgaacgaacgaacaacaacaacgaccgcgaatctatcgaaaaaactcgctcaacacgacccgcttccccgcgccataccgcgcgccccgaaaaccaaaatcgcctcaccgcaaactacaaataactcccgaccgcgccaacctcaaatcccgcgctcaaaaaattaatttatccctccgacaactaaatcccgaatactataaacgccgcctcgcccgccgccgccaatccccgacccgcaaccgccacgccgtaaactacataacaaacaaccgcctctattctccaccacgccgctaaccccgcgaccccgccgtcctccccgcccgcaactatcacgatcccgacatacaaacttctaactaaaaacaaaaaactccgctaaaatcgaacgaaaaacgaatcctcctcccccgcgcaacgcgacccgctaactcgctaactcgctaaaaatactcgactaacgaacgactctcctcccccttccccgcgccgccgcgctacgccgccccgcccgaacaaccccctaaaaaccaaaaaacgcgcgacgcgaaaaacacaaaaaaaaaaacgaaaacgaaaacgaaacccgacgaaaacgaaaccgaaaaaaaaaacgactccgaaaataaaaaaaacgataaaaaaaattaaaaactaaaacgccgaaaaaaaaacttctacgaaattcgaaacgaaaaacccgaaacgccaaccgttcgactcccgcaacccacgcccaccgcgccccgaaaccaaaaaaaaacgccccgcccccgaaaaaaacgcaaaaaaaaaaacgaaacccgcgcgaatctaaactacgcgacgcaaatcccctaacaaaaaaaaaccccgccctcctcccgctaacccgacccctcccgcccctatctcgctccaaccgacccgactccgaacccaacccaaaaacgaacgaatccaaaaaaaacgcccgcgctcccccaactaaccgactctaacgacgaccactcgaattcccgtataccgacaaatcgcgccgactaaaataaaccgcctacatcgctctcgactccatctctaccgccaaaaactatccctactccttccaatatcacctttaacgcgccccttaccgaaccgaa

SEQ ID NO: 29447 - DNA, 1233 bp, Artificial Sequence
  chemically treated genomic DNA (Homo sapiens) CpG-island No: 29447
ttgtttttaaaatattatggtattgttgtggtttttaggttaattttgcgttgtagttgtaaaataaggcgagcggagtttcgcgttaggttttcggaaaggtaggcgggcgggcgggtagtagtagcggtcgcgggtttgtcggaggggttcgtttagtacggttcgttttttcgcgttatgtcgcgcgtttcgagggttagggtcgttttatcgtaggttgtaggtggttttcggtcgcgttagttttaggtttcgcgtttaggaagttagtttgttttttcggtagttgagtttcgagtgttgtgggcgtcgtttcgttcgtcgtcgttagttttcggttcgtagtcgttacgtcgtgggttgtatgataagtagtcgtttttattttttattacgtcgttggtttcgcggtttcgtcgtttttttcgttcgtagttgttacggtttcggtatgtaaatttttggttgggaataaaaggtttcgttagggtcgggcggggggcgagtttttttttttcgcgtagcgcgattcgttagttcgttagttcgttggaagtgttcggttggcgggcggtttttttttttttttttcgcgtcgtcgcgttgcgtcgtttcgttcgggtagttttttggaagttagggagcgcgcgacgcggagagtataggaaggaggacgagggcgggggcggggttcggcgggggcggggtcggggagaggagcgatttcgagagtggagggagcggtggagaggattggaggttgaggcgtcgaaggaggggtttttgcgggattcggagcgagagattcgggacgttagtcgttcggttttcgtagtttacgtttatcgcgtttcggggttagaggggaacgtttcgttttcggagagggcgtaaggagaggaacggaattcgcgcgagtttgggttgcgcggcgtaaattttttgataaaggaaagtttcgtttttttttcgttggttcggtttttttcgtttttgtttcgttttaatcggttcggtttcgagtttagtttaaaggcgaacgaatttagaaagggcgttcgcgtttttttagttagtcggttttggcgacggttattcgagttttcgtgtgtcggtaggtcgcgtcggttggggtaggtcgtttgtatcgttttcggttttatttttgtcgttaaaggttgtttttgttttttttagtgttatttttagcgcgttttttgtcggatcgaa

SEQ ID NO: 29448 - DNA, 1233 bp, Artificial Sequence
  chemically treated genomic DNA (Homo sapiens) CpG-island No: 29448
ttcgatccgacaaaaaacgcgctaaaaataacactaaaaaaaacaaaaacaacctttaacgacaaaaataaaaccgaaaacgatacaaacgacctaccccaaccgacgcgacctaccgacacacgaaaactcgaataaccgtcgccaaaaccgactaactaaaaaaacgcgaacgccctttctaaattcgttcgcctttaaactaaactcgaaaccgaaccgattaaaacgaaacaaaaacgaaaaaaaccgaaccaacgaaaaaaaaacgaaactttcctttatcaaaaaatttacgccgcgcaacccaaactcgcgcgaattccgttcctctccttacgccctctccgaaaacgaaacgttcccctctaaccccgaaacgcgataaacgtaaactacgaaaaccgaacgactaacgtcccgaatctctcgctccgaatcccgcaaaaacccctccttcgacgcctcaacctccaatcctctccaccgctccctccactctcgaaatcgctcctctccccgaccccgcccccgccgaaccccgcccccgccctcgtcctccttcctatactctccgcgtcgcgcgctccctaacttccaaaaaactacccgaacgaaacgacgcaacgcgacgacgcgaaaaaaaaaaaaaaaaaccgcccgccaaccgaacacttccaacgaactaacgaactaacgaatcgcgctacgcgaaaaaaaaaaactcgccccccgcccgaccctaacgaaaccttttattcccaaccaaaaatttacataccgaaaccgtaacaactacgaacgaaaaaaacgacgaaaccgcgaaaccaacgacgtaataaaaaataaaaacgactacttatcatacaacccacgacgtaacgactacgaaccgaaaactaacgacgacgaacgaaacgacgcccacaacactcgaaactcaactaccgaaaaaacaaactaacttcctaaacgcgaaacctaaaactaacgcgaccgaaaaccacctacaacctacgataaaacgaccctaaccctcgaaacgcgcgacataacgcgaaaaaacgaaccgtactaaacgaacccctccgacaaacccgcgaccgctactactacccgcccgcccgcctacctttccgaaaacctaacgcgaaactccgctcgccttattttacaactacaacgcaaaattaacctaaaaaccacaacaataccataatattttaaaaacaa

SEQ ID NO: 29449 - DNA, 622 bp, Artificial Sequence
  chemically treated genomic DNA (Homo sapiens) CpG-island No: 29449
atcgcgcgggagcggaggtcgagtcgggtatttaaagcgcgcgttgtagggaggagataggttaaagtagtcgattttcgattgttcgtcgtagttttattagagggagtcgcgtagttgcgtttggagagtgagaggttgggggaagggtattttaaggtcggagtcgggattacgtttagcgttcgttcgcggggagatcggtagcggttttttgtttggttttttgataagggggcgggattttcgtagaaagtaagattgggtttattcgcgatgagaacggcgtggagggggaattaaggttggaattggagagggaggggtttgcggttagtcggacgcggcgttggaaattcggcggaggatttagaagtagcgggagcgatttgtgggcggggcgaacggtttgtcggtcgacggtagggtttgaagagtttagggtggggttcgcggtgtcgcggagggcgtggaagtgtgttagggttagcgtgtcggttttacggaagtcgagtttgaggcgagatttcgttttttgtatttttattgatttatattttttttatttaggtttttatattaggacgagaaggagttttcgagttatcgtgggagttgtggg

SEQ ID NO: 29450 - DNA, 622 bp, Artificial Sequence
  chemically treated genomic DNA (Homo sapiens) CpG-island No: 29450
cccacaactcccacgataactcgaaaactccttctcgtcctaatataaaaacctaaataaaaaaaatataaatcaataaaaatacaaaaaacgaaatctcgcctcaaactcgacttccgtaaaaccgacacgctaaccctaacacacttccacgccctccgcgacaccgcgaaccccaccctaaactcttcaaaccctaccgtcgaccgacaaaccgttcgccccgcccacaaatcgctcccgctacttctaaatcctccgccgaatttccaacgccgcgtccgactaaccgcaaacccctccctctccaattccaaccttaattccccctccacgccgttctcatcgcgaataaacccaatcttactttctacgaaaatcccgcccccttatcaaaaaaccaaacaaaaaaccgctaccgatctccccgcgaacgaacgctaaacgtaatcccgactccgaccttaaaatacccttcccccaacctctcactctccaaacgcaactacgcgactccctctaataaaactacgacgaacaatcgaaaatcgactactttaacctatctcctccctacaacgcgcgctttaaatacccgactcgacctccgctcccgcgcgat

SEQ ID NO: 29451 - DNA, 622 bp, Artificial Sequence
  chemically treated genomic DNA (Homo sapiens) CpG-island No: 29451
tttatagtttttacggtaattcgagggttttttttcgttttgatgtgggagtttgagtaaaggaaatatgagttagtgaaaatataaaaggcgagatttcgttttaggttcggttttcgtagggtcggtacgttggttttgatatatttttacgtttttcgcgatatcgcgagttttattttaggttttttaggttttatcgtcggtcggtaggtcgttcgtttcgtttatagatcgttttcgttatttttaggtttttcgtcggatttttagcgtcgcgttcgattgatcgtagatttttttttttttagttttagttttaattttttttttacgtcgtttttatcgcggataggtttaattttgttttttgcggaagtttcgtttttttgttaagagattaaatagaagatcgttgtcggttttttcgcgagcgagcgttaagcgtagtttcgatttcgattttaggatgttttttttttaattttttattttttaggcgtagttgcgcggttttttttggtggagttgcggcgggtaatcggaaatcggttattttggtttgttttttttttgtagcgcgcgttttgagtgttcggttcggttttcgttttcgcgcggt

SEQ ID NO: 29452 - DNA, 622 bp, Artificial Sequence
  chemically treated genomic DNA (Homo sapiens) CpG-island No: 29452
accgcgcgaaaacgaaaaccgaaccgaacactcaaaacgcgcgctacaaaaaaaaaacaaaccaaaataaccgatttccgattacccgccgcaactccaccaaaaaaaaccgcgcaactacgcctaaaaaataaaaaattaaaaaaaaaacatcctaaaatcgaaatcgaaactacgcttaacgctcgctcgcgaaaaaaccgacaacgatcttctatttaatctcttaacaaaaaaacgaaacttccgcaaaaaacaaaattaaacctatccgcgataaaaacgacgtaaaaaaaaaattaaaactaaaactaaaaaaaaaaaaatctacgatcaatcgaacgcgacgctaaaaatccgacgaaaaacctaaaaataacgaaaacgatctataaacgaaacgaacgacctaccgaccgacgataaaacctaaaaaacctaaaataaaactcgcgatatcgcgaaaaacgtaaaaatatatcaaaaccaacgtaccgaccctacgaaaaccgaacctaaaacgaaatctcgccttttatattttcactaactcatatttcctttactcaaactcccacatcaaaacgaaaaaaaaccctcgaattaccgtaaaaactataaa

SEQ ID NO: 29453 - DNA, 675 bp, Artificial Sequence
  chemically treated genomic DNA (Homo sapiens) CpG-island No: 29453
cgtttttcgtcgaggattttttttgttcgtttttatttatcgtcggtgtgtttggtttttagtcgcgagttggggttgtcgtgaggaggcggcggaggagacgagatttggggtttcgtagtcgggttattatatttttcgcgcgagtcggttcgggtttcggttttcgtttttcggagtcgttttcgcgttcgtttcgtagggggagtttttttagtttttttttcgttttattatttagttttttttcgtcgtcgtcgtcgtcgttttagtttcgcgcgttttcgtttcggttttttgttgtcgttcggggttatcgtcgggttttttgtttcgtagtcgtcgttgtcgttagattcgacgaacggaatgtcgagcggtcgttttttaattcggtcggtttcgtttcgtcggaattatttattcgtttcgcgttatgatatttattgaggcggaagtgtagttgaatggattttttacgacgatcgtatagtattgattgtagtaggagtcggtgggtttcgagtaggtgggttttcgtagggagttagcgtggatcgagtgcggggtttggatttttcgtttttttcgtattgtagattttgcggtgatttaaaggtgtttggcggtggtacgggatttaattgtaaaatgttattttagttagtgtgatat

SEQ ID NO: 29454 - DNA, 675 bp, Artificial Sequence
  chemically treated genomic DNA (Homo sapiens) CpG-island No: 29454
atatcacactaactaaaataacattttacaattaaatcccgtaccaccgccaaacacctttaaatcaccgcaaaatctacaatacgaaaaaaacgaaaaatccaaaccccgcactcgatccacgctaactccctacgaaaacccacctactcgaaacccaccgactcctactacaatcaatactatacgatcgtcgtaaaaaatccattcaactacacttccgcctcaataaatatcataacgcgaaacgaataaataattccgacgaaacgaaaccgaccgaattaaaaaacgaccgctcgacattccgttcgtcgaatctaacgacaacgacgactacgaaacaaaaaacccgacgataaccccgaacgacaacaaaaaaccgaaacgaaaacgcgcgaaactaaaacgacgacgacgacgacgaaaaaaaactaaataataaaacgaaaaaaaaactaaaaaaactccccctacgaaacgaacgcgaaaacgactccgaaaaacgaaaaccgaaacccgaaccgactcgcgcgaaaaatataataacccgactacgaaaccccaaatctcgtctcctccgccgcctcctcacgacaaccccaactcgcgactaaaaaccaaacacaccgacgataaataaaaacgaacaaaaaaaatcctcgacgaaaaacg

SEQ ID NO: 29455 - DNA, 675 bp, Artificial Sequence
  chemically treated genomic DNA (Homo sapiens) CpG-island No: 29455
atgttatattagttgggatgatattttatagttggatttcgtattatcgttaggtatttttaaattatcgtagagtttgtagtgcggagggggcgggaagtttaggtttcgtattcgatttacgttggttttttacggaggtttatttattcgaggtttatcgatttttattgtaattagtattatgcgatcgtcgtagagagtttatttagttgtattttcgttttagtaggtgttatggcgcggggcgggtgaatagtttcggcgaggcggggtcggtcgggttgagggacggtcgttcggtatttcgttcgtcgggtttggcgataacggcggttgcggagtaaggggttcggcggtagtttcggacggtagtaggaggtcgaggcgggagcgcgcggggttgaggcggcggcggcggcggcgggaaggggttgggtggtggagcgggagggaggttgaggaggttttttttgcgggacgggcgcggggacggtttcggggggcgggggtcggggttcgggtcggttcgcgcggggggtatgatgattcggttgcggggttttagatttcgtttttttcgtcgtttttttacggtagttttagttcgcggttgagaattagatatatcggcggtgagtggggacgggtaggaggggttttcggcggggagcg

SEQ ID NO: 29456 - DNA, 675 bp, Artificial Sequence
  chemically treated genomic DNA (Homo sapiens) CpG-island No: 29456
cgctccccgccgaaaacccctcctacccgtccccactcaccgccgatatatctaattctcaaccgcgaactaaaactaccgtaaaaaaacgacgaaaaaaacgaaatctaaaaccccgcaaccgaatcatcataccccccgcgcgaaccgacccgaaccccgacccccgccccccgaaaccgtccccgcgcccgtcccgcaaaaaaaacctcctcaacctccctcccgctccaccacccaaccccttcccgccgccgccgccgccgcctcaaccccgcgcgctcccgcctcgacctcctactaccgtccgaaactaccgccgaaccccttactccgcaaccgccgttatcgccaaacccgacgaacgaaataccgaacgaccgtccctcaacccgaccgaccccgcctcgccgaaactattcacccgccccgcgccataacacctactaaaacgaaaatacaactaaataaactctctacgacgatcgcataatactaattacaataaaaatcgataaacctcgaataaataaacctccgtaaaaaaccaacgtaaatcgaatacgaaacctaaacttcccgccccctccgcactacaaactctacgataatttaaaaatacctaacgataatacgaaatccaactataaaatatcatcccaactaatataacat

SEQ ID NO: 29457 - DNA, 813 bp, Artificial Sequence
  chemically treated genomic DNA (Homo sapiens) CpG-island No: 29457
  unsure (773..)
ggggtcgcggtggtgatggtgtttgtgtcgttttttgtggtttttatgtttgggttcggtcgcgtttatcgttagaggcgagaaggtgaagagggtcgaggtgtttggggtcgggagaggggtagcgatagcgggttcggcgggtgttagcgaaggtggcggcggaggcggtaggagaagaggtttaatagggtttgggatagttggggttgtattcgttggcggtagcggtttaggatgttggcggttgcgacgtcgtcggtgagggggagcgagagggggtttttggttcggtcgttttcgttttttttgagattttttattgttagatcggcgttgtcgtttaatttttcgcggggagattttagtatgaggttttttttttttttttttgttcggttttttttgcgtcgttatcgttcgtattacgcgtatcgtttcgatttgcgtagttattttatttataaatatatatttaaatggttcgatcgttttttcgttcgcgtatcgcgtaagcgtcgttcgcgtattgttcgttgggtattggagtttttttttcgttttttatttgtcggtcgtttttcgtttagagatgaatatgtcggaagcggtcgtttttagttttttttcgtaggtttttttaatcgagtttttattgtaagtattttatgtcgcgtaaagcgttatgggagttgtagtttcgtcgcgttttcgtcgcgttttcggttttgagtggagaaaaaaaggggggttttttttgggggggggggggnnaaaaaaaaaaaaaaaaaaaagggggggggggggggaaaa

SEQ ID NO: 29458 - DNA, 813 bp, Artificial Sequence
  chemically treated genomic DNA (Homo sapiens) CpG-island No: 29458
  unsure (40..)
ttttcccccccccccccccttttttttttttttttttttnncccccccccccccaaaaaaaacccccctttttttctccactcaaaaccgaaaacgcgacgaaaacgcgacgaaactacaactcccataacgctttacgcgacataaaatacttacaataaaaactcgattaaaaaaacctacgaaaaaaaactaaaaacgaccgcttccgacatattcatctctaaacgaaaaacgaccgacaaataaaaaacgaaaaaaaaactccaatacccaacgaacaatacgcgaacgacgcttacgcgatacgcgaacgaaaaaacgatcgaaccatttaaatatatatttataaataaaataactacgcaaatcgaaacgatacgcgtaatacgaacgataacgacgcaaaaaaaaccgaacaaaaaaaaaaaaaaaaaacctcatactaaaatctccccgcgaaaaattaaacgacaacgccgatctaacaataaaaaatctcaaaaaaaacgaaaacgaccgaaccaaaaaccccctctcgctccccctcaccgacgacgtcgcaaccgccaacatcctaaaccgctaccgccaacgaatacaaccccaactatcccaaaccctattaaacctcttctcctaccgcctccgccgccaccttcgctaacacccgccgaacccgctatcgctacccctctcccgaccccaaacacctcgaccctcttcaccttctcgcctctaacgataaacgcgaccgaacccaaacataaaaaccacaaaaaacgacacaaacaccatcaccaccgcgacccc

SEQ ID NO: 29459 - DNA, 813 bp, Artificial Sequence
  chemically treated genomic DNA (Homo sapiens) CpG-island No: 29459
  unsure (40..)
tttttttttttttttttttttttttttttttttttttttnntttttttttttttaaaaaaaatttttttttttttttttatttagagtcggggacgcggcgggggcgcggcggaattatagtttttatgacgttttgcgcggtatagggtgtttataatagaagttcggttggagaggtttgcggagaaaagttgggaacggtcgttttcggtatgtttatttttggacgaagaacggtcgataagtggagggcggaggagagattttaatgtttagcgggtagtgcgcgggcggcgtttgcgcgatgcgcggacgggggggcggtcgggttatttaaatgtgtgtttgtgggtgaaatggttgcgtaggtcggagcggtgcgcgtagtacgggcggtggcggcgtaggaggagtcggataaagaggggaaggagaaattttatgttggggttttttcgcggggagttaaacggtagcgtcgatttagtagtggggggttttaggagaagcgggggcggtcgagttaggagttttttttcgtttttttttatcggcggcgtcgtagtcgttaatattttgggtcgttgtcgttaacgaatgtagttttaattgttttaggttttgttgagtttttttttttgtcgttttcgtcgttattttcgttggtattcgtcgggttcgttgtcgttgtttttttttcggttttaagtatttcggttttttttattttttcgtttttgacggtgagcgcggtcgggtttaagtataagggttataaggagcggtataagtattattattatcgcggtttt

SEQ ID NO: 29460 - DNA, 813 bp, Artificial Sequence
  chemically treated genomic DNA (Homo sapiens) CpG-island No: 29460
  unsure (773..)
aaaaccgcgataataataatacttataccgctccttataacccttatacttaaacccgaccgcgctcaccgtcaaaaacgaaaaaataaaaaaaaccgaaatacttaaaaccgaaaaaaaaacaacgacaacgaacccgacgaataccaacgaaaataacgacgaaaacgacaaaaaaaaaaactcaacaaaacctaaaacaattaaaactacattcgttaacgacaacgacccaaaatattaacgactacgacgccgccgataaaaaaaaacgaaaaaaaactcctaactcgaccgcccccgcttctcctaaaaccccccactactaaatcgacgctaccgtttaactccccgcgaaaaaaccccaacataaaatttctccttcccctctttatccgactcctcctacgccgccaccgcccgtactacgcgcaccgctccgacctacgcaaccatttcacccacaaacacacatttaaataacccgaccgcccccccgtccgcgcatcgcgcaaacgccgcccgcgcactacccgctaaacattaaaatctctcctccgccctccacttatcgaccgttcttcgtccaaaaataaacataccgaaaacgaccgttcccaacttttctccgcaaacctctccaaccgaacttctattataaacaccctataccgcgcaaaacgtcataaaaactataattccgccgcgcccccgccgcgtccccgactctaaataaaaaaaaaaaaaaaaattttttttaaaaaaaaaaaaannaaaaaaaaaaaaaaaaaaaaaaaaaaaaaaaaaaaaaaa

SEQ ID NO: 29461 - DNA, 906 bp, Artificial Sequence
  chemically treated genomic DNA (Homo sapiens) CpG-island No: 29461
ggtttcgggggtgtggcgggcgttattcgttgttcgggtatatatttcgtagatttaattttagttcgttggttagattatggagggtcgttgggtgtagttatagagcgcggggtttcggcgatttcgtttcgtttcgcgttattcggcgttttgcggcgcgcgatgagtatttattattagcggagtcgcgagggagaggtcgcggttttttttcgttgtttgcggttatcggtcggtatttagagtttttcgtttggcgttaaatttaaaaacgtaatacgagtagtaggttggtttcggaaacgaaacgaaattcggtttttgggttttttttcgggcgttgtcggttttttagcgcgtcgcgttattcggaatagatttttttttcgttattttcggcggggttgggagattgaggttcgcggcgttgagtttgcggcgtttcggaagaggcgggcggtatggtcgttggcgtggattgcggggacggggttggcgttcggtagtacgtgtttttggttttaggtaaatacgcgcgttcgggcggcggggtcggtttaagaattggcggagcggttcgcgatttcgggcgcgtcgttttttatttcggtggtttttattattcggttcggcgcgggatgggattttttttgggatagttggtttcgtattttggttatacgttatagtaagtcgcggtttttaaattcggaagcgtcgaaaaggatcgagcgtgtttttcgggttttgattttcggtggttcgggtgggagggtggaagtcgatttagtttgaggggagttacgcgggttcgcggttatcggtgcgttgcgggtttcggaggtttttgtttttggtgttttttatttggtagttggttttgtttttgtgattttattgggt

SEQ ID NO: 29462 - DNA, 906 bp, Artificial Sequence
  chemically treated genomic DNA (Homo sapiens) CpG-island No: 29462
acccaataaaatcacaaaaacaaaaccaactaccaaataaaaaacaccaaaaacaaaaacctccgaaacccgcaacgcaccgataaccgcgaacccgcgtaactcccctcaaactaaatcgacttccaccctcccacccgaaccaccgaaaatcaaaacccgaaaaacacgctcgatccttttcgacgcttccgaatttaaaaaccgcgacttactataacgtataaccaaaatacgaaaccaactatcccaaaaaaaatcccatcccgcgccgaaccgaataataaaaaccaccgaaataaaaaacgacgcgcccgaaatcgcgaaccgctccgccaattcttaaaccgaccccgccgcccgaacgcgcgtatttacctaaaaccaaaaacacgtactaccgaacgccaaccccgtccccgcaatccacgccaacgaccataccgcccgcctcttccgaaacgccgcaaactcaacgccgcgaacctcaatctcccaaccccgccgaaaataacgaaaaaaaaatctattccgaataacgcgacgcgctaaaaaaccgacaacgcccgaaaaaaaacccaaaaaccgaatttcgtttcgtttccgaaaccaacctactactcgtattacgtttttaaatttaacgccaaacgaaaaactctaaataccgaccgataaccgcaaacaacgaaaaaaaaccgcgacctctccctcgcgactccgctaataataaatactcatcgcgcgccgcaaaacgccgaataacgcgaaacgaaacgaaatcgccgaaaccccgcgctctataactacacccaacgaccctccataatctaaccaacgaactaaaattaaatctacgaaatatatacccgaacaacgaataacgcccgccacacccccgaaacc

SEQ ID NO: 29463 - DNA, 906 bp, Artificial Sequence
  chemically treated genomic DNA (Homo sapiens) CpG-island No: 29463
atttagtaggattatagaagtagggttagttgttaggtaggggatattaagggtagaaattttcggggttcgtagcgtatcggtgatcgcgaattcgcgtggttttttttaggttgagtcggtttttatttttttattcgagttatcggggattagggttcgggaaatacgttcggtttttttcggcgttttcgggtttgaaaatcgcggtttgttatgacgtgtgattaaaatgcggggttagttgttttagagagaattttatttcgcgtcgggtcgggtagtgggagttatcggggtggggggcggcgcgttcggggtcgcgggtcgtttcgttagtttttgggtcgatttcgtcgttcgggcgcgcgtgtttatttgaaattaggaatacgtgttgtcgggcgttaatttcgttttcgtagtttacgttagcggttatgtcgttcgtttttttcggggcgtcgtaggtttagcgtcgcgggttttagttttttagtttcgtcgaaaatggcgggagaagggtttgtttcgggtggcgcggcgcgttgagggatcggtagcgttcgggaggaggtttagggatcgaatttcgtttcgttttcgagattagtttgttgttcgtgttacgtttttaaatttagcgttaggcgaggggttttgaatgtcggtcggtggtcgtaggtaacgggaaggggtcgcggtttttttttcgcggtttcgttagtggtaggtgtttatcgcgcgtcgtagggcgtcgagtgacgcggagcggggcggggtcgtcggggtttcgcgttttgtggttgtatttagcggttttttatggtttagttagcgggttaggattgggtttgcggggtgtgtgttcggataacgggtgacgttcgttatattttcggggtt

SEQ ID NO: 29464 - DNA, 906 bp, Artificial Sequence
  chemically treated genomic DNA (Homo sapiens) CpG-island No: 29464
aaccccgaaaatataacgaacgtcacccgttatccgaacacacaccccgcaaacccaatcctaacccgctaactaaaccataaaaaaccgctaaatacaaccacaaaacgcgaaaccccgacgaccccgccccgctccgcgtcactcgacgccctacgacgcgcgataaacacctaccactaacgaaaccgcgaaaaaaaaaccgcgaccccttcccgttacctacgaccaccgaccgacattcaaaacccctcgcctaacgctaaatttaaaaacgtaacacgaacaacaaactaatctcgaaaacgaaacgaaattcgatccctaaacctcctcccgaacgctaccgatccctcaacgcgccgcgccacccgaaacaaacccttctcccgccattttcgacgaaactaaaaaactaaaacccgcgacgctaaacctacgacgccccgaaaaaaacgaacgacataaccgctaacgtaaactacgaaaacgaaattaacgcccgacaacacgtattcctaatttcaaataaacacgcgcgcccgaacgacgaaatcgacccaaaaactaacgaaacgacccgcgaccccgaacgcgccgccccccaccccgataactcccactacccgacccgacgcgaaataaaattctctctaaaacaactaaccccgcattttaatcacacgtcataacaaaccgcgattttcaaacccgaaaacgccgaaaaaaaccgaacgtatttcccgaaccctaatccccgataactcgaataaaaaaataaaaaccgactcaacctaaaaaaaaccacgcgaattcgcgatcaccgatacgctacgaaccccgaaaatttctacccttaatatcccctacctaacaactaaccctacttctataatcctactaaat

SEQ ID NO: 29465 - DNA, 851 bp, Artificial Sequence
  chemically treated genomic DNA (Homo sapiens) CpG-island No: 29465
cggcgcggtttagttgtgaaggtcgcgtcggcggagagggtttatggtattttcgtcggtttcggaagttttttttttttttattttcgcgggttattttaggaattagcggttttcgattacgttcgcgcggattacggaatagcgacgcgtaagtaggtttttttcgttagcgtaattttttcgtagaaagtcgcgtattagttttaattacgttttattttttggtcgttggcgttattttcgttattcgggcgttttttagtagtttttagaaacgtcgtttttttaaatttagttatttatatatggcgggtttagtagttatcggtttcgttttttttcgtcgtcgtagtcgtaattgcgtttgcggttatagggcggatagttacgtttttgcggagggcgatcggaagtgtttacgtttttatttttttcgttacgttatcgtttttttaggtttagcgtgtagtaggaaggaggatttttttgtcgcggatttaagtcggaagtcgtttttttagtggagacgcgagtgggggaggagtagttcgaggggaacgtgggttgaacgttgtaattagggtggagattaagttggaataggagtttcgatcgattcggtattaagaaggggagtgttcgcggtaggtaagggagaagagggaggggttttttttcgttttcgaaattgggaaaagagatagagttgggatgatttatggggtagtcggcgcgttgaaaggatgggttgggttgggacggggtttaagtgggaaaggttgatgattaaggtatagagttggatttatagattcgtttgggcgtagagaggtgaacgttgaagagaa

SEQ ID NO: 29466 - DNA, 851 bp, Artificial Sequence
  chemically treated genomic DNA (Homo sapiens) CpG-island No: 29466
ttctcttcaacgttcacctctctacgcccaaacgaatctataaatccaactctataccttaatcatcaacctttcccacttaaaccccgtcccaacccaacccatcctttcaacgcgccgactaccccataaatcatcccaactctatctcttttcccaatttcgaaaacgaaaaaaaacccctccctcttctcccttacctaccgcgaacactccccttcttaataccgaatcgatcgaaactcctattccaacttaatctccaccctaattacaacgttcaacccacgttcccctcgaactactcctcccccactcgcgtctccactaaaaaaacgacttccgacttaaatccgcgacaaaaaaatcctccttcctactacacgctaaacctaaaaaaacgataacgtaacgaaaaaaataaaaacgtaaacacttccgatcgccctccgcaaaaacgtaactatccgccctataaccgcaaacgcaattacgactacgacgacgaaaaaaaacgaaaccgataactactaaacccgccatatataaataactaaatttaaaaaaacgacgtttctaaaaactactaaaaaacgcccgaataacgaaaataacgccaacgaccaaaaaataaaacgtaattaaaactaatacgcgactttctacgaaaaaattacgctaacgaaaaaaacctacttacgcgtcgctattccgtaatccgcgcgaacgtaatcgaaaaccgctaattcctaaaataacccgcgaaaataaaaaaaaaaaaaacttccgaaaccgacgaaaataccataaaccctctccgccgacgcgaccttcacaactaaaccgcgccg

SEQ ID NO: 29467 - DNA, 851 bp, Artificial Sequence
  chemically treated genomic DNA (Homo sapiens) CpG-island No: 29467
ttttttttagcgtttatttttttgcgtttaaacggatttgtaagtttaattttatattttaattattaattttttttatttgaatttcgttttagtttagtttatttttttagcgcgtcgattattttataggttattttagttttgtttttttttttaatttcgagagcggaaagaaatttttttttttttttttttatttgtcgcgggtatttttttttttggtatcgggtcgatcggaatttttgttttagtttgatttttattttagttgtaacgtttaatttacgtttttttcggattgttttttttttattcgcgtttttattaggaaggcggttttcggtttgagttcgcggtaaaagagtttttttttttgttgtacgttgggtttgaaaggacggtggcgtggcggggaaggtgaagacgtgagtattttcggtcgtttttcgtagaggcgtggttgttcgttttgtggtcgtagacgtagttgcgattgcggcgacgaggaggggcggggtcggtggttgttgagttcgttatgtgtgagtggttgggtttggggaggcgacgtttttggaagttgttggaaagcgttcgagtggcggaggtggcgttagcggttagggggtggggcgtgattaaaattagtgcgcggttttttgcggagggattacgttgacgaaagagatttgtttgcgcgtcgttgtttcgtggttcgcgcgagcgtggtcgggagtcgttggtttttggggtgattcgcggaggtgggagagggaagggttttcgaagtcggcgggggtgttatggatttttttcgtcggcgcggtttttatagttgggtcgcgtcg

SEQ ID NO: 29468 - DNA, 851 bp, Artificial Sequence
  chemically treated genomic DNA (Homo sapiens) CpG-island No: 29468
cgacgcgacccaactataaaaaccgcgccgacgaaaaaaatccataacacccccgccgacttcgaaaacccttccctctcccacctccgcgaatcaccccaaaaaccaacgactcccgaccacgctcgcgcgaaccacgaaacaacgacgcgcaaacaaatctctttcgtcaacgtaatccctccgcaaaaaaccgcgcactaattttaatcacgccccaccccctaaccgctaacgccacctccgccactcgaacgctttccaacaacttccaaaaacgtcgcctccccaaacccaaccactcacacataacgaactcaacaaccaccgaccccgcccctcctcgtcgccgcaatcgcaactacgtctacgaccacaaaacgaacaaccacgcctctacgaaaaacgaccgaaaatactcacgtcttcaccttccccgccacgccaccgtcctttcaaacccaacgtacaacaaaaaaaaaaactcttttaccgcgaactcaaaccgaaaaccgccttcctaataaaaacgcgaataaaaaaaaaacaatccgaaaaaaacgtaaattaaacgttacaactaaaataaaaatcaaactaaaacaaaaattccgatcgacccgataccaaaaaaaaaaatacccgcgacaaataaaaaaaaaaaaaaaaaaatttctttccgctctcgaaattaaaaaaaaaaacaaaactaaaataacctataaaataatcgacgcgctaaaaaaataaactaaactaaaacgaaattcaaataaaaaaaattaataattaaaatataaaattaaacttacaaatccgtttaaacgcaaaaaaataaacgctaaaaaaaa

SEQ ID NO: 29469 - DNA, 642 bp, Artificial Sequence
  chemically treated genomic DNA (Homo sapiens) CpG-island No: 29469
atcgtatatttcggggttatcggtttatgaacgaagcgggaggtcgaggtgcggcgggtttttagggagaagtttaaggttcgttttttcggcgcggaggaaagggttcgacgttcgagtttttttgcgaagtaggcgagtttttcgcgtattttcgggttggcggcgcggtgttaaggcgtttcggttttagggttttgcgggtagcgtagcgattttaggtttttttttttagaacgcgtttcgttgttagcgttttgttatttcggtcgttcgttcgcgggtttcggattacgtcgttcgcgtttttcgcgaatgtagtattttcgtttttttttagagtttattagttttcgcgtgtcggttagtttagattgtggttatgtttttcgttttcgaaaataggagagggttaggtatcgttatcggatattttttcggatttgatattcgagtcgatagtagtttttagcgtttgggagcgttcgggggaggaaaggcggagagatcgttcgttttagcgggtttcggttggaaagtttagcgaggagtttttatttaagttaaatggggcgggggttgggggtgggggacggggaattcgaggttttagaaataggtttcgaggtttcgcggattgat

SEQ ID NO: 29470 - DNA, 642 bp, Artificial Sequence
  chemically treated genomic DNA (Homo sapiens) CpG-island No: 29470
atcaatccgcgaaacctcgaaacctatttctaaaacctcgaattccccgtcccccacccccaacccccgccccatttaacttaaataaaaactcctcgctaaactttccaaccgaaacccgctaaaacgaacgatctctccgcctttcctcccccgaacgctcccaaacgctaaaaactactatcgactcgaatatcaaatccgaaaaaatatccgataacgatacctaaccctctcctattttcgaaaacgaaaaacataaccacaatctaaactaaccgacacgcgaaaactaataaactctaaaaaaaaacgaaaatactacattcgcgaaaaacgcgaacgacgtaatccgaaacccgcgaacgaacgaccgaaataacaaaacgctaacaacgaaacgcgttctaaaaaaaaaaacctaaaatcgctacgctacccgcaaaaccctaaaaccgaaacgccttaacaccgcgccgccaacccgaaaatacgcgaaaaactcgcctacttcgcaaaaaaactcgaacgtcgaaccctttcctccgcgccgaaaaaacgaaccttaaacttctccctaaaaacccgccgcacctcgacctcccgcttcgttcataaaccgataaccccgaaatatacgat

SEQ ID NO: 29471 - DNA, 642 bp, Artificial Sequence
  chemically treated genomic DNA (Homo sapiens) CpG-island No: 29471
gttagttcgcggggtttcggagtttgtttttggaatttcgggtttttcgttttttatttttaattttcgttttatttaatttaggtggagatttttcgttgggttttttaatcgaggttcgttggaacggacggttttttcgttttttttttttcgaacgtttttaggcgttaaaagttattatcggttcgggtgttaagttcgggaaggtgttcgatggcgatatttgatttttttttgttttcgaggacgaaggatatggttataatttaggttggtcggtacgcggggattggtgggttttggagagaggcggagatgttgtattcgcggggagcgcgggcggcgtggttcggggttcgcgggcgggcgatcggggtggtaggacgttggtagcgaagcgcgttttggagaggggagtttggagtcgttacgttgttcgtagagttttggagtcggggcgttttggtatcgcgtcgttagttcgagggtgcgcggggagttcgtttgtttcgtaggagaattcgggcgtcgagttttttttttcgcgtcggggagacgggttttaggtttttttttgagggttcgtcgtatttcggtttttcgtttcgtttataagtcggtagtttcggagtatgcggt

SEQ ID NO: 29472 - DNA, 642 bp, Artificial Sequence
  chemically treated genomic DNA (Homo sapiens) CpG-island No: 29472
accgcatactccgaaactaccgacttataaacgaaacgaaaaaccgaaatacgacgaaccctcaaaaaaaaacctaaaacccgtctccccgacgcgaaaaaaaaaactcgacgcccgaattctcctacgaaacaaacgaactccccgcgcaccctcgaactaacgacgcgataccaaaacgccccgactccaaaactctacgaacaacgtaacgactccaaactcccctctccaaaacgcgcttcgctaccaacgtcctaccaccccgatcgcccgcccgcgaaccccgaaccacgccgcccgcgctccccgcgaatacaacatctccgcctctctccaaaacccaccaatccccgcgtaccgaccaacctaaattataaccatatccttcgtcctcgaaaacaaaaaaaaatcaaatatcgccatcgaacaccttcccgaacttaacacccgaaccgataataacttttaacgcctaaaaacgttcgaaaaaaaaaaaacgaaaaaaccgtccgttccaacgaacctcgattaaaaaacccaacgaaaaatctccacctaaattaaataaaacgaaaattaaaaataaaaaacgaaaaacccgaaattccaaaaacaaactccgaaaccccgcgaactaac

SEQ ID NO: 29473 - DNA, 1557 bp, Artificial Sequence
  chemically treated genomic DNA (Homo sapiens) CpG-island No: 29473
  unsure (1255)
ttttagtttcgcgtatttcgggttaagaagggattgacgggacgtaggttgggatttttaatttttcggggtagattggcggggaagacggcgtgcgttcgtaggtagtttcgaggcgcgttgcgtagttttagcggtcgtcgggttaggtgcgttcgtttttcggggtttttagggcgcggggcgggagcgtacgcgcggggcgcggcggcgcggcggattcggggtttcggggcgtcgcgtcggacgtagttcggacggtcgattttcgtgcggttttagggtgtcgggtcggtcgcggttggcgggtgggcgcggggcgggtgcgggttgggatataaagattcggagcggagacgatcggcgcgggcggcgggcgttgcgtttcgagcggggtcgtttgtgattatagatttagtgtagcgggtagcggttcgagcgcgcgggcgtcgcgtcggcgcggttttatgtttcggagtacggagcggagtagggcgttttcgggcgcgtaggagtttttttagttcgcgcggttttcggtttttagggtaggaaagagggagttcggttttcgtcgcgggtttcggacgcgcgcgggtttttgtgtgcggggagggcgtcgggattcgttgcgtgcgtagtttttcgtttcggtcggcgtcgcggttttcgtcgaggagagttagcgcggtcgtcgcgttgttagagcgttataaacgcggggtttcgtttcgtcgcgcgaagtttattggttcgcggtttcgcggtcgcgcgttggttggacggtcggttcgttcgttcgttattttttttcgatattgggtgtcgcgaggcggggttcgggttgataggtgagtttcgtttttggttttcgcgggcggcgggagcggagtagaagtcgggtaggagaagcgtttagcgcgtgtatagggcgttttcggggcggcgagaggttttttgggcgcggtgtagacgtggaaatagcgacggtcgagtagcgggttatttgttttcgcgttcgggggcgttttttttttcggcggaattagagggcgcggttttttttcgagtagtgcggaaggtagtaggtttcgttcggcgtttttttttcgtagatgcggcgttgtttcgcgtgtaagatttgtatttcgcgcgtatttttagagttttcggtttttgcgcgtttttttcgacgtttttcggcgagggttttttatttgattttggtattaatcgtttacggtttagttttagntagtggggtcgggaattgtaagacgatttttgcgacgcggcgtcggaatttgtagttttaattagggtttgagtatcgtcgtttttcgttttttttgcgggcgttttttttttttcggtttttcggggaggtggcgtttttggagttttttcgcgtgtcgtcggtatagtacgacgcggggatcgttttattagtttttaggagatacgcgcgttttttaagtgattagagatttagagggtgtgagatggaaaagttaaggtatgtgttttttattcggcgtttgtaagattttagagtag

SEQ ID NO: 29474 - DNA, 1557 bp, Artificial Sequence
  chemically treated genomic DNA (Homo sapiens) CpG-island No: 29474
  unsure (303)
ctactctaaaatcttacaaacgccgaataaaaaacacataccttaacttttccatctcacaccctctaaatctctaatcacttaaaaaacgcgcgtatctcctaaaaactaataaaacgatccccgcgtcgtactataccgacgacacgcgaaaaaactccaaaaacgccacctccccgaaaaaccgaaaaaaaaaaaacgcccgcaaaaaaaacgaaaaacgacgatactcaaaccctaattaaaactacaaattccgacgccgcgtcgcaaaaatcgtcttacaattcccgaccccactanctaaaactaaaccgtaaacgattaataccaaaatcaaataaaaaaccctcgccgaaaaacgtcgaaaaaaacgcgcaaaaaccgaaaactctaaaaatacgcgcgaaatacaaatcttacacgcgaaacaacgccgcatctacgaaaaaaaaacgccgaacgaaacctactaccttccgcactactcgaaaaaaaaccgcgccctctaattccgccgaaaaaaaaaacgcccccgaacgcgaaaacaaataacccgctactcgaccgtcgctatttccacgtctacaccgcgcccaaaaaacctctcgccgccccgaaaacgccctatacacgcgctaaacgcttctcctacccgacttctactccgctcccgccgcccgcgaaaaccaaaaacgaaactcacctatcaacccgaaccccgcctcgcgacacccaatatcgaaaaaaaataacgaacgaacgaaccgaccgtccaaccaacgcgcgaccgcgaaaccgcgaaccaataaacttcgcgcgacgaaacgaaaccccgcgtttataacgctctaacaacgcgacgaccgcgctaactctcctcgacgaaaaccgcgacgccgaccgaaacgaaaaactacgcacgcaacgaatcccgacgccctccccgcacacaaaaacccgcgcgcgtccgaaacccgcgacgaaaaccgaactccctctttcctaccctaaaaaccgaaaaccgcgcgaactaaaaaaactcctacgcgcccgaaaacgccctactccgctccgtactccgaaacataaaaccgcgccgacgcgacgcccgcgcgctcgaaccgctacccgctacactaaatctataatcacaaacgaccccgctcgaaacgcaacgcccgccgcccgcgccgatcgtctccgctccgaatctttatatcccaacccgcacccgccccgcgcccacccgccaaccgcgaccgacccgacaccctaaaaccgcacgaaaatcgaccgtccgaactacgtccgacgcgacgccccgaaaccccgaatccgccgcgccgccgcgccccgcgcgtacgctcccgccccgcgccctaaaaaccccgaaaaacgaacgcacctaacccgacgaccgctaaaactacgcaacgcgcctcgaaactacctacgaacgcacgccgtcttccccgccaatctaccccgaaaaattaaaaatcccaacctacgtcccgtcaatcccttcttaacccgaaatacgcgaaactaaaa

SEQ ID NO: 29475 - DNA, 1557 bp, Artificial Sequence
  chemically treated genomic DNA (Homo sapiens) CpG-island No: 29475
  unsure (303)
ttgttttggggttttgtagacgtcgagtgagaagtatatgttttgatttttttattttatattttttaaatttttggttatttgggaagcgcgcgtgttttttagaggttagtgagacggttttcgcgtcgtgttgtgtcggcgatacgcgggaaagttttaggggcgttattttttcggggggtcgaagggaaggaaacgttcgtagagaaggcgggaggcgacgatgtttaggttttgattagaattgtaaatttcggcgtcgcgtcgtaggaatcgttttgtaattttcggttttattgnttgaaattgagtcgtaggcgattggtattaaaattaagtgagaagttttcgtcgagaggcgtcgggagaagcgcgtagaagtcgggagttttaagggtgcgcgcggagtgtaagttttgtacgcggggtagcgtcgtatttgcggagaagggacgtcgagcggagtttgttgtttttcgtattgttcgagggaaagtcgcgttttttgatttcgtcgagggggaaggcgttttcgggcgcggagataggtggttcgttattcggtcgtcgttgtttttacgtttgtatcgcgtttagaaggtttttcgtcgtttcgggggcgttttgtgtacgcgttgagcgttttttttgttcggtttttgtttcgttttcgtcgttcgcgggagttaggggcggggtttatttgttagttcgagtttcgtttcgcggtatttaatgtcgggaggggatggcggacggacggatcggtcgtttaattagcgcgcggtcgcggagtcgcgggttaatgggtttcgcgcggcggggcggggtttcgcgtttatagcgttttgatagcgcggcggtcgcgttgatttttttcggcggggatcgcggcgtcggtcggagcgaggagttgcgtacgtagcgggtttcggcgtttttttcgtatataaaggttcgcgcgcgttcggagttcgcggcggggatcgagtttttttttttttgttttgggggtcgggagtcgcgcggattgagaaggtttttgcgcgttcggaggcgttttatttcgtttcgtgtttcgggatatggaatcgcgtcgacgcggcgttcgcgcgttcgggtcgttgttcgttgtattggatttatagttataggcggtttcgttcggggcgtagcgttcgtcgttcgcgtcggtcgttttcgtttcgggtttttgtgttttagttcgtattcgtttcgcgtttattcgttagtcgcggtcggttcggtattttggagtcgtacgggagtcggtcgttcgagttgcgttcggcgcggcgtttcggaatttcgagttcgtcgcgtcgtcgcgtttcgcgcgtgcgttttcgtttcgcgttttgagggtttcggagagcgagcgtatttggttcggcgatcgttggagttgcgtagcgcgtttcggagttgtttgcgggcgtacgtcgtttttttcgttagtttgtttcggaggattgggggttttagtttgcgtttcgttagtttttttttggttcggagtgcgcggagttggga

SEQ ID NO: 29476 - DNA, 1557 bp, Artificial Sequence
  chemically treated genomic DNA (Homo sapiens) CpG-island No: 29476
  unsure (1255)
tcccaactccgcgcactccgaaccaaaaaaaaactaacgaaacgcaaactaaaacccccaatcctccgaaacaaactaacgaaaaaaacgacgtacgcccgcaaacaactccgaaacgcgctacgcaactccaacgatcgccgaaccaaatacgctcgctctccgaaaccctcaaaacgcgaaacgaaaacgcacgcgcgaaacgcgacgacgcgacgaactcgaaattccgaaacgccgcgccgaacgcaactcgaacgaccgactcccgtacgactccaaaataccgaaccgaccgcgactaacgaataaacgcgaaacgaatacgaactaaaacacaaaaacccgaaacgaaaacgaccgacgcgaacgacgaacgctacgccccgaacgaaaccgcctataactataaatccaatacaacgaacaacgacccgaacgcgcgaacgccgcgtcgacgcgattccatatcccgaaacacgaaacgaaataaaacgcctccgaacgcgcaaaaaccttctcaatccgcgcgactcccgacccccaaaacaaaaaaaaaaaaactcgatccccgccgcgaactccgaacgcgcgcgaacctttatatacgaaaaaaacgccgaaacccgctacgtacgcaactcctcgctccgaccgacgccgcgatccccgccgaaaaaaatcaacgcgaccgccgcgctatcaaaacgctataaacgcgaaaccccgccccgccgcgcgaaacccattaacccgcgactccgcgaccgcgcgctaattaaacgaccgatccgtccgtccgccatcccctcccgacattaaataccgcgaaacgaaactcgaactaacaaataaaccccgcccctaactcccgcgaacgacgaaaacgaaacaaaaaccgaacaaaaaaaacgctcaacgcgtacacaaaacgcccccgaaacgacgaaaaaccttctaaacgcgatacaaacgtaaaaacaacgacgaccgaataacgaaccacctatctccgcgcccgaaaacgccttccccctcgacgaaatcaaaaaacgcgactttccctcgaacaatacgaaaaacaacaaactccgctcgacgtcccttctccgcaaatacgacgctaccccgcgtacaaaacttacactccgcgcgcacccttaaaactcccgacttctacgcgcttctcccgacgcctctcgacgaaaacttctcacttaattttaataccaatcgcctacgactcaatttcaancaataaaaccgaaaattacaaaacgattcctacgacgcgacgccgaaatttacaattctaatcaaaacctaaacatcgtcgcctcccgccttctctacgaacgtttccttcccttcgaccccccgaaaaaataacgcccctaaaactttcccgcgtatcgccgacacaacacgacgcgaaaaccgtctcactaacctctaaaaaacacgcgcgcttcccaaataaccaaaaatttaaaaaatataaaataaaaaaatcaaaacatatacttctcactcgacgtctacaaaaccccaaaacaa

SEQ ID NO: 29477 - DNA, 1112 bp, Artificial Sequence
  chemically treated genomic DNA (Homo sapiens) CpG-island No: 29477
gaagcgttcgtttgttttcggtaaaaatcgttaggaggcggggtttacgtttcggtacgtttcgcgtagggtattgtgggaagggcggtcggtgtagtcgtagttgttattttaggggcgtttggcgttacgggtttttcgttggaggcggttttcgtggtagttgtagacgtcgggaaaaggtataaagttcgttggtcggtatttttttttttttcggtttcggtagaatcgttagttcgcgttcgaaggcggaggcgaggggaattggtcgcgtgaggggtttgaggcgagcggttagagcgtttttcggaaggatgggtcggtttcggagtcggagttcgtttcgttttaagtatattaagagtagtaagtataataagaagcgtagtcggtttcggtcgcgatttcgggataaggagcgcgtgcggaagcgttttaaatttcgggaaagtaaacggaatcggcggcgggagtcgcggtttcgttcgcgttttattaatacggtcgtgtttcggcgcgagcgggatcgggagcgcgtttcgttttcgttcgatcgtatcgatattttcgggcgtacggtgagtaagcgtagtagtttggacgagaagtagaagcgagaggaggaggagaagaaagcggagttcgagcggtagcgaaaaatgtgagtgttcgcgcggggagggatcggggcgtgcggagagtagggcgcggggcgagggcgtggggtcggggcgggacggtgcgggtcgggagaatggcggggacggttcggggttggggatcgggcgcgggaacgggtcggagaggcggcggcggggcgggtaggtttggcgtttggaaagtttggggtgggatagatttagaagttgttcgggatggaaaattcgagggtttgagtagaaagggtttaagagaaggcgattttggcgcgagagaggagtggtgtttcggaagtaggggtggagttcggagtgaggtcggagagttgcgttggtttgtgaggtcgggagcgagtcggtttgtagatgtggagggtggtgagcgtttgttggtcggtttgaggaggagagagaagggaattaatttttgagatgcgaattatagttggt

SEQ ID NO: 29478 - DNA, 1112 bp, Artificial Sequence
  chemically treated genomic DNA (Homo sapiens) CpG-island No: 29478
accaactataattcgcatctcaaaaattaattcccttctctctcctcctcaaaccgaccaacaaacgctcaccaccctccacatctacaaaccgactcgctcccgacctcacaaaccaacgcaactctccgacctcactccgaactccacccctacttccgaaacaccactcctctctcgcgccaaaatcgccttctcttaaaccctttctactcaaaccctcgaattttccatcccgaacaacttctaaatctatcccaccccaaactttccaaacgccaaacctacccgccccgccgccgcctctccgacccgttcccgcgcccgatccccaaccccgaaccgtccccgccattctcccgacccgcaccgtcccgccccgaccccacgccctcgccccgcgccctactctccgcacgccccgatccctccccgcgcgaacactcacatttttcgctaccgctcgaactccgctttcttctcctcctcctctcgcttctacttctcgtccaaactactacgcttactcaccgtacgcccgaaaatatcgatacgatcgaacgaaaacgaaacgcgctcccgatcccgctcgcgccgaaacacgaccgtattaataaaacgcgaacgaaaccgcgactcccgccgccgattccgtttactttcccgaaatttaaaacgcttccgcacgcgctccttatcccgaaatcgcgaccgaaaccgactacgcttcttattatacttactactcttaatatacttaaaacgaaacgaactccgactccgaaaccgacccatccttccgaaaaacgctctaaccgctcgcctcaaacccctcacgcgaccaattcccctcgcctccgccttcgaacgcgaactaacgattctaccgaaaccgaaaaaaaaaaaaataccgaccaacgaactttataccttttcccgacgtctacaactaccacgaaaaccgcctccaacgaaaaacccgtaacgccaaacgcccctaaaataacaactacgactacaccgaccgcccttcccacaataccctacgcgaaacgtaccgaaacgtaaaccccgcctcctaacgatttttaccgaaaacaaacgaacgcttc

SEQ ID NO: 29479 - DNA, 1112 bp, Artificial Sequence
  chemically treated genomic DNA (Homo sapiens) CpG-island No: 29479
gttagttgtgattcgtattttaaaggttaattttttttttttttttttttaagtcgattagtaaacgtttattattttttatatttgtaggtcggttcgttttcggttttataagttaacgtagtttttcgattttatttcgaattttatttttattttcgggatattatttttttttcgcgttaaaatcgtttttttttaaattttttttgtttaagttttcgaattttttatttcgaataatttttgggtttgttttattttaagttttttaaacgttaagtttgttcgtttcgtcgtcgttttttcgattcgttttcgcgttcggtttttagtttcggatcgttttcgttattttttcggttcgtatcgtttcgtttcggttttacgttttcgtttcgcgttttgtttttcgtacgtttcggttttttttcgcgcgggtatttatatttttcgttgtcgttcgaatttcgttttttttttttttttttttcgtttttgtttttcgtttaggttgttgcgtttgtttatcgtgcgttcgaagatgtcgatgcggtcgggcggggacgaggcgcgttttcggtttcgttcgcgtcgggatacggtcgtgttggtggagcgcgaacgggatcgcgattttcgtcgtcggtttcgtttattttttcgagatttggaacgttttcgtacgcgttttttgtttcgggatcgcgatcgggatcggttgcgttttttgttgtgtttgttgtttttggtgtgtttggagcgggacgagtttcggtttcgagatcggtttattttttcgggagacgttttaatcgttcgttttaggttttttacgcggttagtttttttcgttttcgttttcggacgcgggttggcggttttatcgaggtcggaggaaaaaaaggtgtcggttaacggattttatgttttttttcggcgtttatagttgttacgaaggtcgtttttaacgagaaattcgtagcgttaggcgtttttaagatggtagttgcggttgtatcggtcgttttttttataatgttttgcgcgaaacgtgtcgaagcgtgggtttcgttttttgacgatttttgtcgaaggtaggcgagcgtttt

SEQ ID NO: 29480 - DNA, 1112 bp, Artificial Sequence
  chemically treated genomic DNA (Homo sapiens) CpG-island No: 29480
aaaacgctcgcctaccttcgacaaaaatcgtcaaaaaacgaaacccacgcttcgacacgtttcgcgcaaaacattataaaaaaaacgaccgatacaaccgcaactaccatcttaaaaacgcctaacgctacgaatttctcgttaaaaacgaccttcgtaacaactataaacgccgaaaaaaaacataaaatccgttaaccgacacctttttttcctccgacctcgataaaaccgccaacccgcgtccgaaaacgaaaacgaaaaaaactaaccgcgtaaaaaacctaaaacgaacgattaaaacgtctcccgaaaaaataaaccgatctcgaaaccgaaactcgtcccgctccaaacacaccaaaaacaacaaacacaacaaaaaacgcaaccgatcccgatcgcgatcccgaaacaaaaaacgcgtacgaaaacgttccaaatctcgaaaaaataaacgaaaccgacgacgaaaatcgcgatcccgttcgcgctccaccaacacgaccgtatcccgacgcgaacgaaaccgaaaacgcgcctcgtccccgcccgaccgcatcgacatcttcgaacgcacgataaacaaacgcaacaacctaaacgaaaaacaaaaacgaaaaaaaaaaaaaaaaaaaacgaaattcgaacgacaacgaaaaatataaatacccgcgcgaaaaaaaaccgaaacgtacgaaaaacaaaacgcgaaacgaaaacgtaaaaccgaaacgaaacgatacgaaccgaaaaaataacgaaaacgatccgaaactaaaaaccgaacgcgaaaacgaatcgaaaaaacgacgacgaaacgaacaaacttaacgtttaaaaaacttaaaataaaacaaacccaaaaattattcgaaataaaaaattcgaaaacttaaacaaaaaaaatttaaaaaaaaacgattttaacgcgaaaaaaaaataatatcccgaaaataaaaataaaattcgaaataaaatcgaaaaactacgttaacttataaaaccgaaaacgaaccgacctacaaatataaaaaataataaacgtttactaatcgacttaaaaaaaaaaaaaaaaaaaattaacctttaaaatacgaatcacaactaac

SEQ ID NO: 29481 - DNA, 554 bp, Artificial Sequence
  chemically treated genomic DNA (Homo sapiens) CpG-island No: 29481
aagagggtttggagtatagacggtcggggtgggagggagacggagaggaatttagacggagtgagacgggggcgggggggttttagcggagagaagaatggggaggggtggaggtaacgataataaaaaaaggtagaaatatacgtattcggcgtcggttcggttcgtaggtggaaagttttttttgatgtataaattatttgttaaagaggtcgacggtcggggtcgtcgttttcgtcgttatcgtagtttaggcgttttcggcggagcggtgtaaataggtgtagtcgtggttaagttgtagtttcgtttttggggtcgggagcggtgcgttgggttcggttcggggtgtgttgttttttcgtcggtcgtcgttgcgcgttgtttttttttttttgcgttcggtttttagcggtttttaattcggaggttgtaatttttagtagggcggcgcgtcgcgtgcgttgggtatgtgttggttttaggtgttcgggggaagttaggcgttagtggcggggggggggaggcgtaggggggtttgtagggggcgatta

SEQ ID NO: 29482 - DNA, 554 bp, Artificial Sequence
  chemically treated genomic DNA (Homo sapiens) CpG-island No: 29482
taatcgccccctacaaacccccctacgcctccccccccccgccactaacgcctaacttcccccgaacacctaaaaccaacacatacccaacgcacgcgacgcgccgccctactaaaaattacaacctccgaattaaaaaccgctaaaaaccgaacgcaaaaaaaaaaaaacaacgcgcaacgacgaccgacgaaaaaacaacacaccccgaaccgaacccaacgcaccgctcccgaccccaaaaacgaaactacaacttaaccacgactacacctatttacaccgctccgccgaaaacgcctaaactacgataacgacgaaaacgacgaccccgaccgtcgacctctttaacaaataatttatacatcaaaaaaaactttccacctacgaaccgaaccgacgccgaatacgtatatttctacctttttttattatcgttacctccacccctccccattcttctctccgctaaaacccccccgcccccgtctcactccgtctaaattcctctccgtctccctcccaccccgaccgtctatactccaaaccctctt

SEQ ID NO: 29483 - DNA, 554 bp, Artificial Sequence
  chemically treated genomic DNA (Homo sapiens) CpG-island No: 29483
taatcgttttttgtaggtttttttgcgttttttttttttcgttattggcgtttggtttttttcgggtatttgggattagtatatgtttagcgtacgcggcgcgtcgttttgttagaagttgtagttttcgagttggaggtcgttgaggatcgagcgtaggaggaaggagatagcgcgtagcggcggtcggcgaggagatagtatatttcgggtcgggtttagcgtatcgttttcggttttaaaagcggagttgtaatttggttacgattgtatttgtttgtatcgtttcgtcgagggcgtttgggttgcggtggcggcgaagacggcgatttcgatcgtcggtttttttggtaagtggtttgtgtattaggagaaattttttatttgcgagtcgaatcggcgtcgagtgcgtgtgtttttgtttttttttgttgtcgttgtttttatttttttttattttttttttcgttaggattttttcgttttcgttttatttcgtttgaattttttttcgttttttttttatttcggtcgtttatgttttaggttttttt

SEQ ID NO: 29484 - DNA, 554 bp, Artificial Sequence
  chemically treated genomic DNA (Homo sapiens) CpG-island No: 29484
aaaaaaacctaaaacataaacgaccgaaataaaaaaaaaacgaaaaaaaattcaaacgaaataaaacgaaaacgaaaaaatcctaacgaaaaaaaaaataaaaaaaaataaaaacaacgacaacaaaaaaaaacaaaaacacacgcactcgacgccgattcgactcgcaaataaaaaatttctcctaatacacaaaccacttaccaaaaaaaccgacgatcgaaatcgccgtcttcgccgccaccgcaacccaaacgccctcgacgaaacgatacaaacaaatacaatcgtaaccaaattacaactccgcttttaaaaccgaaaacgatacgctaaacccgacccgaaatatactatctcctcgccgaccgccgctacgcgctatctccttcctcctacgctcgatcctcaacgacctccaactcgaaaactacaacttctaacaaaacgacgcgccgcgtacgctaaacatatactaatcccaaatacccgaaaaaaaccaaacgccaataacgaaaaaaaaaaaacgcaaaaaaacctacaaaaaacgatta

SEQ ID NO: 29485 - DNA, 566 bp, Artificial Sequence
  chemically treated genomic DNA (Homo sapiens) CpG-island No: 29485
gaggagcgcgggttcgcggagagggtcggagagtcggggtcgtcgagttcgggatgggttgttcgttgtttgttcggggtcgtgcgttcggagcggaggcgtacgcggggtcggcggcgcgcggggtttagtagttatacgtcgggttcgggttgttattaaatgagcgcgtcgcggttaatgggagtcggcggcggcggtgatttgtatggcgcgttggcgagtgacgtggggagggagtagatatattgggcgcgggcggcggagcggggaggaggggaggaaggagggggagtaaagtaggaaggaggggggaggaggttcgggagggggtgatagttatatcgttttttgagcgcgcgcgcgcggcggcggcggcggcggcgaatttcgagttcgtttttttcgtcgtttttcgttcgcgcgtttcgaatgattaacgattgggttgaaaagcgaagattaagaaaggatcgtcgtggggtggggggaggaaacgtagtttttggttaggtttaaacgggcgtagtggagatttagttttttttttgttttcgtcggttaat

SEQ ID NO: 29486 - DNA, 566 bp, Artificial Sequence
  chemically treated genomic DNA (Homo sapiens) CpG-island No: 29486
attaaccgacgaaaacaaaaaaaaaactaaatctccactacgcccgtttaaacctaaccaaaaactacgtttcctccccccaccccacgacgatcctttcttaatcttcgcttttcaacccaatcgttaatcattcgaaacgcgcgaacgaaaaacgacgaaaaaaacgaactcgaaattcgccgccgccgccgccgccgcgcgcgcgcgctcaaaaaacgatataactatcaccccctcccgaacctcctcccccctccttcctactttactccccctccttcctcccctcctccccgctccgccgcccgcgcccaatatatctactccctccccacgtcactcgccaacgcgccatacaaatcaccgccgccgccgactcccattaaccgcgacgcgctcatttaataacaacccgaacccgacgtataactactaaaccccgcgcgccgccgaccccgcgtacgcctccgctccgaacgcacgaccccgaacaaacaacgaacaacccatcccgaactcgacgaccccgactctccgaccctctccgcgaacccgcgctcctc

SEQ ID NO: 29487 - DNA, 566 bp, Artificial Sequence
  chemically treated genomic DNA (Homo sapiens) CpG-island No: 29487
gttggtcggcgggggtagaggaggagttgggtttttattgcgttcgtttaaatttggttaggggttgcgttttttttttttattttacgacgatttttttttagttttcgttttttaatttaatcgttaattattcggaacgcgcgggcggggagcggcgaggagggcgagttcggggttcgtcgtcgtcgtcgtcgtcgcgcgcgcgcgtttaggaagcggtgtggttgttattttttttcgggttttttttttttttttttttgttttgttttttttttttttttttttttttttcgtttcgtcgttcgcgtttagtgtatttattttttttttacgttattcgttagcgcgttatgtaaattatcgtcgtcgtcggtttttattggtcgcggcgcgtttatttaatggtagttcgggttcggcgtatggttgttgggtttcgcgcgtcgtcggtttcgcgtgcgttttcgtttcgagcgtacggtttcgggtaggtagcgggtagtttatttcgggttcggcggtttcggtttttcggtttttttcgcgagttcgcgtttttt

SEQ ID NO: 29488 - DNA, 566 bp, Artificial Sequence
  chemically treated genomic DNA (Homo sapiens) CpG-island No: 29488
aaaaaacgcgaactcgcgaaaaaaaccgaaaaaccgaaaccgccgaacccgaaataaactacccgctacctacccgaaaccgtacgctcgaaacgaaaacgcacgcgaaaccgacgacgcgcgaaacccaacaaccatacgccgaacccgaactaccattaaataaacgcgccgcgaccaataaaaaccgacgacgacgataatttacataacgcgctaacgaataacgtaaaaaaaaaataaatacactaaacgcgaacgacgaaacgaaaaaaaaaaaaaaaaaaaaaaaaaacaaaacaaaaaaaaaaaaaaaaaaaacccgaaaaaaaataacaaccacaccgcttcctaaacgcgcgcgcgcgacgacgacgacgacgacgaaccccgaactcgccctcctcgccgctccccgcccgcgcgttccgaataattaacgattaaattaaaaaacgaaaactaaaaaaaaatcgtcgtaaaataaaaaaaaaaaacgcaacccctaaccaaatttaaacgaacgcaataaaaacccaactcctcctctacccccgccgaccaac

SEQ ID NO: 29489 - DNA, 917 bp, Artificial Sequence
  chemically treated genomic DNA (Homo sapiens) CpG-island No: 29489
cgtcgtagcgttatttttagtgggcgttttcgtgatcgtcgtagcgttatttttagtgggcgttttcgtgatcgtcgtagcgttatttttagtgggcgttttcgtgatcgtcgtagcgttatttttagtgggcgttttcgtgatcgtcgtagcgttatttttagtgggcgttttcgtgatcgtcgtagcgttatttttagtgggcgttttcgtgatcgtcgtagcgttatttttagtgggcgttttcgtgatcgtcgtagcgttatttttcgtgggcgttttcgtgatcgtcgtagcgttatttttagtgggcgttttcgtgatcgtcgtagcgttatttttagtgggcgttttcgtgatcgtcgtagcgttatttttagtgggcgttttcgtgatcgtcgtagcgttatttttagtgggcgttttcgtgatcgtcgtagcgttatttttagtgggcgttttcgtgatcgtcgtagcgttatttttagtgggcgttttcgtgatcgtcgtagcgttatttttagtgggcgttttcgtgatcgtcgtagcgttatttttcgtgggcgttttcgtgatcgtcgtagcgttatttttcgtgggcgttttcgtgatcgtcgtagcgttatttttcgtgggcgttttcgtgatcgtcgtagcgttatttttcgtgggcgttttcgtgatcgtcgtagcgttatttttcgtgggcgttttcgtgatcgtcgtagcgttatttttagtgggcgttttcgtgattattatagcgttatttttagtaggtattttcgtgatttttgtagcgttatttttagtaggtatttttatgattatcgtagcgttatttttagtgggcgtttttttgattatcgtagtattatttttagtgggtattttcgtgatttttgtagtattatttt

SEQ ID NO: 29490 - DNA, 917 bp, Artificial Sequence
  chemically treated genomic DNA (Homo sapiens) CpG-island No: 29490
aaaataatactacaaaaatcacgaaaatacccactaaaaataatactacgataatcaaaaaaacgcccactaaaaataacgctacgataatcataaaaatacctactaaaaataacgctacaaaaatcacgaaaatacctactaaaaataacgctataataatcacgaaaacgcccactaaaaataacgctacgacgatcacgaaaacgcccacgaaaaataacgctacgacgatcacgaaaacgcccacgaaaaataacgctacgacgatcacgaaaacgcccacgaaaaataacgctacgacgatcacgaaaacgcccacgaaaaataacgctacgacgatcacgaaaacgcccacgaaaaataacgctacgacgatcacgaaaacgcccactaaaaataacgctacgacgatcacgaaaacgcccactaaaaataacgctacgacgatcacgaaaacgcccactaaaaataacgctacgacgatcacgaaaacgcccactaaaaataacgctacgacgatcacgaaaacgcccactaaaaataacgctacgacgatcacgaaaacgcccactaaaaataacgctacgacgatcacgaaaacgcccactaaaaataacgctacgacgatcacgaaaacgcccacgaaaaataacgctacgacgatcacgaaaacgcccactaaaaataacgctacgacgatcacgaaaacgcccactaaaaataacgctacgacgatcacgaaaacgcccactaaaaataacgctacgacgatcacgaaaacgcccactaaaaataacgctacgacgatcacgaaaacgcccactaaaaataacgctacgacgatcacgaaaacgcccactaaaaataacgctacgacgatcacgaaaacgcccactaaaaataacgctacgacg

SEQ ID NO: 29491 - DNA, 917 bp, Artificial Sequence
  chemically treated genomic DNA (Homo sapiens) CpG-island No: 29491
ggagtaatgttgtaagggttacggaagtgtttattgggagtaatgttgcggtggttaaggaagcgtttattgggagtaacgttgcggtggttatggaagtatttattgggagtaacgttgtaagggttacggaagtatttattgggagtaacgttgtggtggttacggaagcgtttattgggagtaacgttgcggcggttacggaagcgtttacggggagtaacgttgcggcggttacggaagcgtttacggggagtaacgttgcggcggttacggaagcgtttacggggagtaacgttgcggcggttacggaagcgtttacggggagtaacgttgcggcggttacggaagcgtttacggggagtaacgttgcggcggttacggaagcgtttattgggagtaacgttgcggcggttacggaagcgtttattgggagtaacgttgcggcggttacggaagcgtttattgggagtaacgttgcggcggttacggaagcgtttattgggagtaacgttgcggcggttacggaagcgtttattgggagtaacgttgcggcggttacggaagcgtttattgggagtaacgttgcggcggttacggaagcgtttattgggagtaacgttgcggcggttacggaagcgtttacggggagtaacgttgcggcggttacggaagcgtttattgggagtaacgttgcggcggttacggaagcgtttattgggagtaacgttgcggcggttacggaagcgtttattgggagtaacgttgcggcggttacggaagcgtttattgggagtaacgttgcggcggttacggaagcgtttattgggagtaacgttgcggcggttacggaagcgtttattgggagtaacgttgcggcggttacggaagcgtttattgggagtaacgttgcggcg

SEQ ID NO: 29492 - DNA, 917 bp, Artificial Sequence
  chemically treated genomic DNA (Homo sapiens) CpG-island No: 29492
cgccgcaacgttactcccaataaacgcttccgtaaccgccgcaacgttactcccaataaacgcttccgtaaccgccgcaacgttactcccaataaacgcttccgtaaccgccgcaacgttactcccaataaacgcttccgtaaccgccgcaacgttactcccaataaacgcttccgtaaccgccgcaacgttactcccaataaacgcttccgtaaccgccgcaacgttactcccaataaacgcttccgtaaccgccgcaacgttactccccgtaaacgcttccgtaaccgccgcaacgttactcccaataaacgcttccgtaaccgccgcaacgttactcccaataaacgcttccgtaaccgccgcaacgttactcccaataaacgcttccgtaaccgccgcaacgttactcccaataaacgcttccgtaaccgccgcaacgttactcccaataaacgcttccgtaaccgccgcaacgttactcccaataaacgcttccgtaaccgccgcaacgttactcccaataaacgcttccgtaaccgccgcaacgttactccccgtaaacgcttccgtaaccgccgcaacgttactccccgtaaacgcttccgtaaccgccgcaacgttactccccgtaaacgcttccgtaaccgccgcaacgttactccccgtaaacgcttccgtaaccgccgcaacgttactccccgtaaacgcttccgtaaccgccgcaacgttactcccaataaacgcttccgtaaccaccacaacgttactcccaataaatacttccgtaacccttacaacgttactcccaataaatacttccataaccaccgcaacgttactcccaataaacgcttccttaaccaccgcaacattactcccaataaacacttccgtaacccttacaacattactcc

SEQ ID NO: 29493 - DNA, 579 bp, Artificial Sequence
  chemically treated genomic DNA (Homo sapiens) CpG-island No: 29493
tttagttgcgcgttcgtcgggattacgtttttttcgttttcgggagtcgagcggcgtttgcggttggttcggacgtgtttttttcgggcgggggtggtcgggttttttcggggtttcgggtttttcgggcgtatttttttgtttgcgtttttttaagtcgtttttttttcggttttgttcgcggttgagtttcgtatatcgcgtcgttgtttttggggtttcggtatacggcgtttttttttcgttttcgttatttatttttatcgtttttttagtttttgtgtcgtttttatcgttttttgattttcgtatcgagttgcgttttcgtcgtcggttttttttagcgcggttcggttttttttttgtttttgaagttttttcgtcgaggttcgcgcgcggttttttttttcgttttttttcggtttttgggcgtttagtcggaggtcggggcgggatggggtacgagtttcggggcggttcgcgttttttttattagtttttttattgtttcggtttcgttttcgtagtttcggggcgggagggcgtaggggttttcgggcgttttgggagtttattttt

SEQ ID NO: 29494 - DNA, 579 bp, Artificial Sequence
  chemically treated genomic DNA (Homo sapiens) CpG-island No: 29494
aaaaataaactcccaaaacgcccgaaaacccctacgccctcccgccccgaaactacgaaaacgaaaccgaaacaataaaaaaactaataaaaaaaacgcgaaccgccccgaaactcgtaccccatcccgccccgacctccgactaaacgcccaaaaaccgaaaaaaaacgaaaaaaaaaaccgcgcgcgaacctcgacgaaaaaacttcaaaaacaaaaaaaaaaccgaaccgcgctaaaaaaaaccgacgacgaaaacgcaactcgatacgaaaatcaaaaaacgataaaaacgacacaaaaactaaaaaaacgataaaaataaataacgaaaacgaaaaaaaaacgccgtataccgaaaccccaaaaacaacgacgcgatatacgaaactcaaccgcgaacaaaaccgaaaaaaaaacgacttaaaaaaacgcaaacaaaaaaatacgcccgaaaaacccgaaaccccgaaaaaacccgaccacccccgcccgaaaaaaacacgtccgaaccaaccgcaaacgccgctcgactcccgaaaacgaaaaaaacgtaatcccgacgaacgcgcaactaaa

SEQ ID NO: 29495 - DNA, 579 bp, Artificial Sequence
  chemically treated genomic DNA (Homo sapiens) CpG-island No: 29495
ggagatgggtttttagggcgttcggggatttttgcgttttttcgtttcgaggttgcggggacggggtcgaggtaatgaggggattagtagggggagcgcgggtcgtttcgagattcgtgttttatttcgtttcgattttcgattgggcgtttaagggtcggagagggacggagaggggagtcgcgcgcgggtttcggcgggggagttttaaagataaagaggaggtcgggtcgcgttgagagaggtcggcggcggagacgtagttcggtgcgggagttagagggcggtggagacggtatagggattggagaggcggtgggagtggatggcgggggcggggagggaacgtcgtgtgtcgggattttaaggatagcggcgcggtgtgcggggtttagtcgcgggtagagtcggagaaagggcgatttggagaggcgtaggtaggggggtgcgttcgggaggttcgaggtttcgaggaggttcggttattttcgttcggaggggatacgttcggattagtcgtagacgtcgttcggttttcgggggcgggaggagcgtggtttcggcgggcgcgtagttgga

SEQ ID NO: 29496 - DNA, 579 bp, Artificial Sequence
  chemically treated genomic DNA (Homo sapiens) CpG-island No: 29496
tccaactacgcgcccgccgaaaccacgctcctcccgcccccgaaaaccgaacgacgtctacgactaatccgaacgtatcccctccgaacgaaaataaccgaacctcctcgaaacctcgaacctcccgaacgcacccccctacctacgcctctccaaatcgccctttctccgactctacccgcgactaaaccccgcacaccgcgccgctatccttaaaatcccgacacacgacgttccctccccgcccccgccatccactcccaccgcctctccaatccctataccgtctccaccgccctctaactcccgcaccgaactacgtctccgccgccgacctctctcaacgcgacccgacctcctctttatctttaaaactcccccgccgaaacccgcgcgcgactcccctctccgtccctctccgacccttaaacgcccaatcgaaaatcgaaacgaaataaaacacgaatctcgaaacgacccgcgctccccctactaatcccctcattacctcgaccccgtccccgcaacctcgaaacgaaaaaacgcaaaaatccccgaacgccctaaaaacccatctcc

SEQ ID NO: 29497 - DNA, 872 bp, Artificial Sequence
  chemically treated genomic DNA (Homo sapiens) CpG-island No: 29497
ggagggtaggagtggagagaggcgcggttttttggaacgcgcgggggaacgtggaaaggagggcgcgggagattcggagggttgtttcggcggggattagaagcgaggcgggtttagcgttttgggcgtcgtaggaaagtgattcgtagagcgaggcgcggcgtttcgggagttggagtttagttttacgattcgcgttgcggcgggtattacgcggggggcgcgcggggaggggagaggcggggtcggcggggattgtgtcgtcgtcgacgtcgcggttgcgggtcgtagaggcgggtagagagagtcgtcgtcgagcgggtggcggagtagtttttagtttttagtcggtttggttgcgcgtaatcgcgtcggtttcgggtataggggtaattgtcgattttttttattcgtcgcgcggggttggttttcgagtcgagtttcggttatcgtcgcgtcgtttggcgttcggtttcggcggattttttttcggtaggtaggggcgtcggcggggcgttgcgcgcggtttaagcgcggggaacgcggcggggtagttttttcgagtttggaggtacgcggggcgtagaggttgttttgtatcgtcgggttggggacgtcgggagggtgtttcgggtcggatttgcggcgttgggtttttatttagagttttcgtacggtgagggttggacgcgtttggggggcgtggagaggaggtttgtcggtttttttttgggaaaggaatcgcggggattttttaatcgttaggacgcgtaagtcgaggttgggagtagaagttttttgaattttggatttattttagaaggagggggcgaaattggttatttcgagggacgcggaagtttcgttgttag

SEQ ID NO: 29498 - DNA, 872 bp, Artificial Sequence
  chemically treated genomic DNA (Homo sapiens) CpG-island No: 29498
ctaacaacgaaacttccgcgtccctcgaaataaccaatttcgccccctccttctaaaataaatccaaaattcaaaaaacttctactcccaacctcgacttacgcgtcctaacgattaaaaaatccccgcgattcctttcccaaaaaaaaaccgacaaacctcctctccacgccccccaaacgcgtccaaccctcaccgtacgaaaactctaaataaaaacccaacgccgcaaatccgacccgaaacaccctcccgacgtccccaacccgacgatacaaaacaacctctacgccccgcgtacctccaaactcgaaaaaactaccccgccgcgttccccgcgcttaaaccgcgcgcaacgccccgccgacgcccctacctaccgaaaaaaaatccgccgaaaccgaacgccaaacgacgcgacgataaccgaaactcgactcgaaaaccaaccccgcgcgacgaataaaaaaaatcgacaattacccctatacccgaaaccgacgcgattacgcgcaaccaaaccgactaaaaactaaaaactactccgccacccgctcgacgacgactctctctacccgcctctacgacccgcaaccgcgacgtcgacgacgacacaatccccgccgaccccgcctctcccctccccgcgcgccccccgcgtaatacccgccgcaacgcgaatcgtaaaactaaactccaactcccgaaacgccgcgcctcgctctacgaatcactttcctacgacgcccaaaacgctaaacccgcctcgcttctaatccccgccgaaacaaccctccgaatctcccgcgccctcctttccacgttcccccgcgcgttccaaaaaaccgcgcctctctccactcctaccctcc

SEQ ID NO: 29499 - DNA, 872 bp, Artificial Sequence
  chemically treated genomic DNA (Homo sapiens) CpG-island No: 29499
ttagtaacggggttttcgcgtttttcgaaatggttagtttcgttttttttttttggggtaggtttagagtttagaaggtttttatttttagtttcggtttacgcgttttagcggttgggaagttttcgcgattttttttttaggaagggatcgataagttttttttttacgttttttagacgcgtttaatttttatcgtgcgggaattttgggtggggatttagcgtcgtaagttcgattcggggtattttttcggcgtttttagttcggcggtgtagaatagtttttgcgtttcgcgtatttttagattcggagaggttgtttcgtcgcgtttttcgcgtttggatcgcgcgtagcgtttcgtcgacgtttttatttgtcggagaagggttcgtcggagtcgggcgttaggcgacgcggcgatggtcgggattcggttcggaaattagtttcgcgcggcgggtgagaggggtcggtagttgtttttgtgttcggggtcggcgcggttgcgcgtagttaggtcggttggaggttggggattgtttcgttattcgttcggcggcggttttttttgttcgtttttgcgattcgtagtcgcggcgtcggcggcgatatagttttcgtcggtttcgtttttttttttttcgcgcgtttttcgcgtggtgttcgtcgtagcgcgggtcgtggggttgagttttagttttcggggcgtcgcgtttcgttttgcgggttatttttttgcggcgtttaggacgttgaattcgtttcgtttttaattttcgtcggggtagtttttcgggtttttcgcgtttttttttttacgttttttcgcgcgttttaggagatcgcgtttttttttatttttgtttttt

SEQ ID NO: 29500 - DNA, 872 bp, Artificial Sequence
  chemically treated genomic DNA (Homo sapiens) CpG-island No: 29500
aaaaaacaaaaataaaaaaaaacgcgatctcctaaaacgcgcgaaaaaacgtaaaaaaaaaaacgcgaaaaacccgaaaaactaccccgacgaaaattaaaaacgaaacgaattcaacgtcctaaacgccgcaaaaaaataacccgcaaaacgaaacgcgacgccccgaaaactaaaactcaaccccacgacccgcgctacgacgaacaccacgcgaaaaacgcgcgaaaaaaaaaaaaacgaaaccgacgaaaactatatcgccgccgacgccgcgactacgaatcgcaaaaacgaacaaaaaaaaccgccgccgaacgaataacgaaacaatccccaacctccaaccgacctaactacgcgcaaccgcgccgaccccgaacacaaaaacaactaccgacccctctcacccgccgcgcgaaactaatttccgaaccgaatcccgaccatcgccgcgtcgcctaacgcccgactccgacgaacccttctccgacaaataaaaacgtcgacgaaacgctacgcgcgatccaaacgcgaaaaacgcgacgaaacaacctctccgaatctaaaaatacgcgaaacgcaaaaactattctacaccgccgaactaaaaacgccgaaaaaataccccgaatcgaacttacgacgctaaatccccacccaaaattcccgcacgataaaaattaaacgcgtctaaaaaacgtaaaaaaaaaacttatcgatcccttcctaaaaaaaaaatcgcgaaaacttcccaaccgctaaaacgcgtaaaccgaaactaaaaataaaaaccttctaaactctaaacctaccccaaaaaaaaaaaacgaaactaaccatttcgaaaaacgcgaaaaccccgttactaa

SEQ ID NO: 29501 - DNA, 893 bp, Artificial Sequence
  chemically treated genomic DNA (Homo sapiens) CpG-island No: 29501
agatttgtattacggtggtcggaattagtaaacgttaatagtcggaggtcgttcgtttttcgggcgtttgtaggcggcgggtatcgggcgtcgatttttttttttggattagatttatatattttagtttacgttagtttcgtagttcgggcgagcgaagatagtcgcgaaggattaaggtttcggggcgagttgtggcgtcgtttcggtcgtttttcggggcgcggcgttgatttatatttagttgacgttcgtatttgaggcggttgttcgtagttagcgagagggcgcgtagcgaggcgggtagggtaaagttatttattgggaaagcgcggttgttcgggtcgcgtacgggtttttggcgtcgttgttcggtattagttttcgtttttcgcggttcgttgagggagcggagagtttgttcggtttcgtttcgttaggaatcgtcgtcgtcgtcgtcgtcgtcgcggattttttggtaaaaagtaaatttcggttaagattttattttttaatcgtttttgttgttttttcgggggtagcgttaaggtcgagcggtttaattcgtattcgggttaatcggaggtagtatagggcgggaggtgggcggattagaaggcggttttatttattcgagagttcgggaggcgggttagaagggattcgttattttcgggttagagtgagattatttcgttttcgtcgttcgttttttttattcgtttcgggttgttttcgtcgttcgtttgatttttttgcggaagtttcgttggttaggtgtttgcgcgtattttcggtcgtcgttaagagtggtatagttggggaaggagtgaatatttagaggaatcgcggggcgggggggggggaggttaggagaataggtggcgtaggga

SEQ ID NO: 29502 - DNA, 893 bp, Artificial Sequence
  chemically treated genomic DNA (Homo sapiens) CpG-island No: 29502
tccctacgccacctattctcctaacctcccccccccccgccccgcgattcctctaaatattcactccttccccaactataccactcttaacgacgaccgaaaatacgcgcaaacacctaaccaacgaaacttccgcaaaaaaatcaaacgaacgacgaaaacaacccgaaacgaataaaaaaaacgaacgacgaaaacgaaataatctcactctaacccgaaaataacgaatcccttctaacccgcctcccgaactctcgaataaataaaaccgccttctaatccgcccacctcccgccctatactacctccgattaacccgaatacgaattaaaccgctcgaccttaacgctacccccgaaaaaacaacaaaaacgattaaaaaataaaatcttaaccgaaatttactttttaccaaaaaatccgcgacgacgacgacgacgacgacgattcctaacgaaacgaaaccgaacaaactctccgctccctcaacgaaccgcgaaaaacgaaaactaataccgaacaacgacgccaaaaacccgtacgcgacccgaacaaccgcgctttcccaataaataactttaccctacccgcctcgctacgcgccctctcgctaactacgaacaaccgcctcaaatacgaacgtcaactaaatataaatcaacgccgcgccccgaaaaacgaccgaaacgacgccacaactcgccccgaaaccttaatccttcgcgactatcttcgctcgcccgaactacgaaactaacgtaaactaaaatatataaatctaatccaaaaaaaaaaatcgacgcccgatacccgccgcctacaaacgcccgaaaaacgaacgacctccgactattaacgtttactaattccgaccaccgtaatacaaatct

SEQ ID NO: 29503 - DNA, 893 bp, Artificial Sequence
  chemically treated genomic DNA (Homo sapiens) CpG-island No: 29503
tttttgcgttatttgtttttttggtttttttttttttcgtttcgcgatttttttggatgtttattttttttttagttgtgttatttttggcggcggtcgggggtgcgcgtagatatttagttagcggggttttcgtaggggaattaggcgggcggcggggatagttcggggcgagtgggggaggcgggcggcgagggcggagtggttttattttaattcgggagtgacgggttttttttggttcgtttttcgagttttcggataggtggagtcgttttttggttcgtttatttttcgttttgtgttattttcgattggttcgggtgcgggttgggtcgttcggttttggcgttgttttcgggaaggtagtaggggcggttgagaagtgaagttttggtcggagtttgttttttgttaggaaattcgcggcggcggcggcggcggcggcgatttttggcggagcggagtcgggtaggtttttcgtttttttagcgggtcgcggagagcgggagttggtgtcgagtagcggcgttaggagttcgtgcgcggttcgggtagtcgcgtttttttagtgagtaattttgttttgttcgtttcgttgcgcgttttttcgttggttgcgggtagtcgttttaggtgcgggcgttagttgggtgtgggttagcgtcgcgtttcgggaggcggtcggagcggcgttatagttcgtttcggagttttggtttttcgcggttgttttcgttcgttcgggttgcggggttggcgtggattagggtgtgtgggtttggtttaggagggagagtcggcgttcggtgttcgtcgtttgtaggcgttcgggaggcgggcggttttcggttgttagcgtttgttggtttcggttatcgtggtgtagattt

SEQ ID NO: 29504 - DNA, 893 bp, Artificial Sequence
  chemically treated genomic DNA (Homo sapiens) CpG-island No: 29504
aaatctacaccacgataaccgaaaccaacaaacgctaacaaccgaaaaccgcccgcctcccgaacgcctacaaacgacgaacaccgaacgccgactctccctcctaaaccaaacccacacaccctaatccacgccaaccccgcaacccgaacgaacgaaaacaaccgcgaaaaaccaaaactccgaaacgaactataacgccgctccgaccgcctcccgaaacgcgacgctaacccacacccaactaacgcccgcacctaaaacgactacccgcaaccaacgaaaaaacgcgcaacgaaacgaacaaaacaaaattactcactaaaaaaacgcgactacccgaaccgcgcacgaactcctaacgccgctactcgacaccaactcccgctctccgcgacccgctaaaaaaacgaaaaacctacccgactccgctccgccaaaaatcgccgccgccgccgccgccgccgcgaatttcctaacaaaaaacaaactccgaccaaaacttcacttctcaaccgcccctactaccttcccgaaaacaacgccaaaaccgaacgacccaacccgcacccgaaccaatcgaaaataacacaaaacgaaaaataaacgaaccaaaaaacgactccacctatccgaaaactcgaaaaacgaaccaaaaaaaacccgtcactcccgaattaaaataaaaccactccgccctcgccgcccgcctcccccactcgccccgaactatccccgccgcccgcctaattcccctacgaaaaccccgctaactaaatatctacgcgcacccccgaccgccgccaaaaataacacaactaaaaaaaaaataaacatccaaaaaaatcgcgaaacgaaaaaaaaaaaaaccaaaaaaacaaataacgcaaaaa

SEQ ID NO: 29505 - DNA, 1005 bp, Artificial Sequence
  chemically treated genomic DNA (Homo sapiens) CpG-island No: 29505
tttttttcgcgtttacgcgagtttttttttcgggagataacgggtcgatggatttttttttttttagtaagataagattttcgattgtttatcgcgttagggaacgtacgatagatatttagatagtatttatatttttgttcgtttttcggtttttatttatttgtttgtatcgtgttcgagaggtcgtgttcgggggttgcggtacggggaaatttttttaattttttggcgtttaggtttagtttttcggagttggtcgtttttttaagcgcgcgttttagatttcggtttaagggtaggttgaagttttcgttgttatcgtcgttattattcgtttcgtcgggggcgtcggttttttcgtggtgttgatggtggtggtggtggtggtggggatgatgaagtgggtgtagagtagttatcgaaagggtcgggacgaaaggttggggttcgtttttcggcgtcgttattttttttcgggtttttttatttcgtttcgtcgtttttgcgggggggttatagcgtttttcgcgaggggaaaacggtagttcgggttgagtgtcgtagtgttttatcgaaaggcgttggaaggaggggaggagggtgtgggtaggcgcgtagaatggggggcgggcggggaggcggtcgtggtagttcggttttgaaggttttttgttttcgggaagttaaggattgcggcggcggcggcggcggcggtagcgcgtatgtgttttttttcgtttttgcgtttttttttcggttgttttgttttttttcgtcgtttgtttttttttttttttttttttacgtagtttgtttcgtttgagttttttttcgcgtttattttgtcggtcgtcgtcgttttgtcgcgattcgtttcgtaatcgggtatacggcggggttggacgtttgtttcggggtaattgaggcgtcgaatttttttttgggcgtttttttgtcgtttaggaggttttaggggattggaggttgcggggataggggggt

SEQ ID NO: 29506 - DNA, 1005 bp, Artificial Sequence
  chemically treated genomic DNA (Homo sapiens) CpG-island No: 29506
acccccctatccccgcaacctccaatcccctaaaacctcctaaacgacaaaaaaacgcccaaaaaaaaattcgacgcctcaattaccccgaaacaaacgtccaaccccgccgtatacccgattacgaaacgaatcgcgacaaaacgacgacgaccgacaaaataaacgcgaaaaaaaactcaaacgaaacaaactacgtaaaaaaaaaaaaaaaaaaaaacaaacgacgaaaaaaaacaaaacaaccgaaaaaaaaacgcaaaaacgaaaaaaaacacatacgcgctaccgccgccgccgccgccgccgcaatccttaacttcccgaaaacaaaaaaccttcaaaaccgaactaccacgaccgcctccccgcccgccccccattctacgcgcctacccacaccctcctcccctccttccaacgcctttcgataaaacactacgacactcaacccgaactaccgttttcccctcgcgaaaaacgctataacccccccgcaaaaacgacgaaacgaaataaaaaaacccgaaaaaaaataacgacgccgaaaaacgaaccccaacctttcgtcccgaccctttcgataactactctacacccacttcatcatccccaccaccaccaccaccaccatcaacaccacgaaaaaaccgacgcccccgacgaaacgaataataacgacgataacaacgaaaacttcaacctacccttaaaccgaaatctaaaacgcgcgcttaaaaaaacgaccaactccgaaaaactaaacctaaacgccaaaaaattaaaaaaatttccccgtaccgcaacccccgaacacgacctctcgaacacgatacaaacaaataaataaaaaccgaaaaacgaacaaaaatataaatactatctaaatatctatcgtacgttccctaacgcgataaacaatcgaaaatcttatcttactaaaaaaaaaaaaatccatcgacccgttatctcccgaaaaaaaaactcgcgtaaacgcgaaaaaaa

SEQ ID NO: 29507 - DNA, 1005 bp, Artificial Sequence
  chemically treated genomic DNA (Homo sapiens) CpG-island No: 29507
atttttttattttcgtaatttttagttttttaaagttttttgggcggtaaaaggacgtttagagagaggttcggcgttttagttgtttcggagtagacgtttagtttcgtcgtgtattcgattgcggggcggatcgcggtaaggcggcggcggtcggtagaataggcgcggaggaaggtttaggcggggtagattgcgtgggggaaggaggaggagagagtagacggcggaggagggtagagtagtcggggggagggcgtaggggcgggaggagatatatgcgcgttgtcgtcgtcgtcgtcgtcgtcgtagtttttagtttttcggggataggaaatttttaagatcgagttgttacggtcgttttttcgttcgttttttattttacgcgtttgtttatattttttttttttttttttagcgtttttcggtggagtattgcggtatttagttcgagttgtcgtttttttttcgcggggaacgttgtgattttttcgtaggagcggcggggcggggtgggggggttcgggagaagatggcgacgtcgggaagcgaattttaatttttcgtttcggttttttcggtagttattttgtatttattttattatttttattattattattattattattagtattacggaggaatcggcgttttcggcggggcgggtggtggcggcggtggtagcgggggttttaatttgtttttgaatcggggtttggagcgcgcgtttgaggaggcggttaatttcggggggttgaatttgagcgttaggaaattgaaggaattttttcgtatcgtagttttcgggtacgatttttcggatacggtgtaggtaggtgagtgagggtcgaggggcgggtaggggtgtgggtgttgtttgggtgtttgtcgtgcgttttttaacgcggtggatagtcggagattttgttttgttgggggagggagggtttatcggttcgttgtttttcgaagaagggattcgcgtgggcgcggaagaag

SEQ ID NO: 29508 - DNA, 1005 bp, Artificial Sequence
  chemically treated genomic DNA (Homo sapiens) CpG-island No: 29508
cttcttccgcgcccacgcgaatcccttcttcgaaaaacaacgaaccgataaaccctccctcccccaacaaaacaaaatctccgactatccaccgcgttaaaaaacgcacgacaaacacccaaacaacacccacacccctacccgcccctcgaccctcactcacctacctacaccgtatccgaaaaatcgtacccgaaaactacgatacgaaaaaattccttcaatttcctaacgctcaaattcaaccccccgaaattaaccgcctcctcaaacgcgcgctccaaaccccgattcaaaaacaaattaaaacccccgctaccaccgccgccaccacccgccccgccgaaaacgccgattcctccgtaatactaataataataataataataataaaaataataaaataaatacaaaataactaccgaaaaaaccgaaacgaaaaattaaaattcgcttcccgacgtcgccatcttctcccgaacccccccaccccgccccgccgctcctacgaaaaaatcacaacgttccccgcgaaaaaaaaacgacaactcgaactaaataccgcaatactccaccgaaaaacgctaaaaaaaaaaaaaaaaaatataaacaaacgcgtaaaataaaaaacgaacgaaaaaacgaccgtaacaactcgatcttaaaaatttcctatccccgaaaaactaaaaactacgacgacgacgacgacgacgacaacgcgcatatatctcctcccgcccctacgccctccccccgactactctaccctcctccgccgtctactctctcctcctccttcccccacgcaatctaccccgcctaaaccttcctccgcgcctattctaccgaccgccgccgccttaccgcgatccgccccgcaatcgaatacacgacgaaactaaacgtctactccgaaacaactaaaacgccgaacctctctctaaacgtccttttaccgcccaaaaaactttaaaaaactaaaaattacgaaaataaaaaaat

SEQ ID NO: 29509 - DNA, 647 bp, Artificial Sequence
  chemically treated genomic DNA (Homo sapiens) CpG-island No: 29509
gacgaataatttcgttttttatttaatgcgtttatacgtacgtatataagtagcgcgcggtcgaggagggtacgttttatttgttttcgtcgtgttatttattttttttttatttaggttcggcgtttttaatttcgttttcgtcgtggtttttcggtcgttcgtttcgagcgtcgcgtatttattgtttgattgagcgcgtttagcgtttgtagggttcggcggcggcggcggggatcgagatagcggttgtagtagcggcggcggcggcggcggcggcggcggttttagtcggcgttagttagattggagtcgcgaagttttatcgttcgtattagtgcgtcgatttggaaagcggttagggagttttgtttgcggttcgttttcgttcgtcgtcgcgcgttttggtcgtttcgggagtcgtagaggagggggttgcgcgggttcggcggggggcgggagcgagatcggttttacggttacgtgcgcggaaattcgcggcgcgggggtggcggggtagtatttttcgtagcggtttgcggttcggttttcgttttttttttatttttagtttcgcgttgttttttcggtttttttgcgcgattttaggttcggtttttgttcggtttgtcggggtggttcggggg

SEQ ID NO: 29510 - DNA, 647 bp, Artificial Sequence
  chemically treated genomic DNA (Homo sapiens) CpG-island No: 29510
cccccgaaccaccccgacaaaccgaacaaaaaccgaacctaaaatcgcgcaaaaaaaccgaaaaaacaacgcgaaactaaaaataaaaaaaaaacgaaaaccgaaccgcaaaccgctacgaaaaatactaccccgccacccccgcgccgcgaatttccgcgcacgtaaccgtaaaaccgatctcgctcccgccccccgccgaacccgcgcaaccccctcctctacgactcccgaaacgaccaaaacgcgcgacgacgaacgaaaacgaaccgcaaacaaaactccctaaccgctttccaaatcgacgcactaatacgaacgataaaacttcgcgactccaatctaactaacgccgactaaaaccgccgccgccgccgccgccgccgccgctactacaaccgctatctcgatccccgccgccgccgccgaaccctacaaacgctaaacgcgctcaatcaaacaataaatacgcgacgctcgaaacgaacgaccgaaaaaccacgacgaaaacgaaattaaaaacgccgaacctaaataaaaaaaaaataaataacacgacgaaaacaaataaaacgtaccctcctcgaccgcgcgctacttatatacgtacgtataaacgcattaaataaaaaacgaaattattcgtc

SEQ ID NO: 29511 - DNA, 647 bp, Artificial Sequence
  chemically treated genomic DNA (Homo sapiens) CpG-island No: 29511
ttttcgggttatttcggtaggtcgggtaggggtcgagtttggggtcgcgtagggggatcgagagggtagcgcggggttgggggtggggaagaggcgggaatcgagtcgtaggtcgttgcgaggagtattatttcgttattttcgcgtcgcgagttttcgcgtacgtggtcgtggggtcggtttcgttttcgtttttcgtcgggttcgcgtagtttttttttttgcggttttcggagcggttagagcgcgcggcggcgggcgggggcgggtcgtaagtagggttttttggtcgttttttaggtcggcgtattaatacgggcgatgaggtttcgcggttttagtttgattgacgtcggttggggtcgtcgtcgtcgtcgtcgtcgtcgtcgttgttgtagtcgttgtttcggttttcgtcgtcgtcgtcgggttttgtaggcgttgggcgcgtttagttaggtagtgagtgcgcggcgttcggagcgggcggtcgggggattacggcgggggcggggttgggggcgtcggatttgggtgggggagggatgagtggtacggcggggataggtaagacgtgtttttttcggtcgcgcgttgtttgtgtgcgtgcgtgtgagcgtattgagtggagggcgaagttgttcgtt

SEQ ID NO: 29512 - DNA, 647 bp, Artificial Sequence
  chemically treated genomic DNA (Homo sapiens) CpG-island No: 29512
aacgaacaacttcgccctccactcaatacgctcacacgcacgcacacaaacaacgcgcgaccgaaaaaaacacgtcttacctatccccgccgtaccactcatccctcccccacccaaatccgacgcccccaaccccgcccccgccgtaatcccccgaccgcccgctccgaacgccgcgcactcactacctaactaaacgcgcccaacgcctacaaaacccgacgacgacgacgaaaaccgaaacaacgactacaacaacgacgacgacgacgacgacgacgacgaccccaaccgacgtcaatcaaactaaaaccgcgaaacctcatcgcccgtattaatacgccgacctaaaaaacgaccaaaaaaccctacttacgacccgcccccgcccgccgccgcgcgctctaaccgctccgaaaaccgcaaaaaaaaaaactacgcgaacccgacgaaaaacgaaaacgaaaccgaccccacgaccacgtacgcgaaaactcgcgacgcgaaaataacgaaataatactcctcgcaacgacctacgactcgattcccgcctcttccccacccccaaccccgcgctaccctctcgatccccctacgcgaccccaaactcgacccctacccgacctaccgaaataacccgaaaa

SEQ ID NO: 29513 - DNA, 521 bp, Artificial Sequence
  chemically treated genomic DNA (Homo sapiens) CpG-island No: 29513
ttgaggaagaggttaggatatcggcgtttaacgagatttatagtatcgtttcggcgtcgtcgtcgtagttgttatcgtcggaggttatttcgttgcgtcgagcgttggagtttcgggaatttggtgtcgttatcgtttgcgttttttgcgttgcgttgcgttcgttgcgttcgggttttgttgttcggcgatcgttacggttaagcggagtttcgtttcgtgcgcgtcgggcgagttgcggattttttaaggacgcgtcgttatttcgattggttgcgggagttattggtttcgtttttgttcgtcgcgttttttttacgtcgggggcgcgcgttgttggcggtttagagattggcggtttttttaggggcgtcgcgggagggtgcggttcgcgttgggcgaggttttttgcgggtatcggcgcgttcggttttcgtttttgggcgttgtagttttttttttttttgttagtttagagataaatagacggttagaaagaaaagaaaaagagaaaatatttt

SEQ ID NO: 29514 - DNA, 521 bp, Artificial Sequence
  chemically treated genomic DNA (Homo sapiens) CpG-island No: 29514
aaaatattttctctttttcttttctttctaaccgtctatttatctctaaactaacaaaaaaaaaaaaaactacaacgcccaaaaacgaaaaccgaacgcgccgatacccgcaaaaaacctcgcccaacgcgaaccgcaccctcccgcgacgcccctaaaaaaaccgccaatctctaaaccgccaacaacgcgcgcccccgacgtaaaaaaaacgcgacgaacaaaaacgaaaccaataactcccgcaaccaatcgaaataacgacgcgtccttaaaaaatccgcaactcgcccgacgcgcacgaaacgaaactccgcttaaccgtaacgatcgccgaacaacaaaacccgaacgcaacgaacgcaacgcaacgcaaaaaacgcaaacgataacgacaccaaattcccgaaactccaacgctcgacgcaacgaaataacctccgacgataacaactacgacgacgacgccgaaacgatactataaatctcgttaaacgccgatatcctaacctcttcctcaa

SEQ ID NO: 29515 - DNA, 521 bp, Artificial Sequence
  chemically treated genomic DNA (Homo sapiens) CpG-island No: 29515
gagatgtttttttttttttttttttttttggtcgtttatttatttttgggttggtaaggagagggagaattgtagcgtttaggagcggaggtcgagcgcgtcggtgttcgtaggaagtttcgtttagcgcggatcgtattttttcgcgacgtttttggagaagtcgttagtttttgggtcgttagtagcgcgcgttttcggcgtgggaggagcgcggcgagtaggggcggggttagtgattttcgtagttaatcggggtggcggcgcgtttttggagggttcgtagttcgttcggcgcgtacggggcggggtttcgtttgatcgtggcggtcgtcgggtagtagagttcgggcgtagcgagcgtagcgtagcgtagggagcgtaggcggtggcggtattaggttttcggggttttagcgttcggcgtagcgaagtagttttcggcggtggtaattacggcggcggcgtcggggcgatgttgtgggtttcgttgggcgtcggtgttttggttttttttttag

SEQ ID NO: 29516 - DNA, 521 bp, Artificial Sequence
  chemically treated genomic DNA (Homo sapiens) CpG-island No: 29516
ctaaaaaaaaaaccaaaacaccgacgcccaacgaaacccacaacatcgccccgacgccgccgccgtaattaccaccgccgaaaactacttcgctacgccgaacgctaaaaccccgaaaacctaataccgccaccgcctacgctccctacgctacgctacgctcgctacgcccgaactctactacccgacgaccgccacgatcaaacgaaaccccgccccgtacgcgccgaacgaactacgaaccctccaaaaacgcgccgccaccccgattaactacgaaaatcactaaccccgcccctactcgccgcgctcctcccacgccgaaaacgcgcgctactaacgacccaaaaactaacgacttctccaaaaacgtcgcgaaaaaatacgatccgcgctaaacgaaacttcctacgaacaccgacgcgctcgacctccgctcctaaacgctacaattctccctctccttaccaacccaaaaataaataaacgaccaaaaaaaaaaaaaaaaaaaaaaacatctc

SEQ ID NO: 29517 - DNA, 581 bp, Artificial Sequence
  chemically treated genomic DNA (Homo sapiens) CpG-island No: 29517
ttcgcgtcgggcgttttcggaggtcgtaggttagggggcgaggcgcggtgttcgggtttttttcgcgggtagtcggcgattttggggtgtcgagggagtagcgtttttttttttcgatagcgtttttttcgatttgaggcgtttatttcggtgtaagcgggggttttagggagtcggcgaggtcgtttggtatttttttttttcgcgtcggacgttcgcgtcgtagggattaaggtcggcgatacggtggggggcgaggggcgaagacggggattggttttcgttggtttcggcggttttagggtttcggcgtcgtttagcgtcgtgtttttagtcgttcgcgcgttaggtagcgttttcggtttttgcgggttatttgtggtcgagttcgtcgcgttcgtcgtcgtagggttttttgtttcgtttcgtcggtttcgttttatttttgtcggcggtttttacgtcggtgtcgtagcgttttttagcggcgagtcggggtacggtagggattttcgcgagagagaggtggtatcgcggaggttttggggttggtttcgatttgtagtttttttttgggtggg

SEQ ID NO: 29518 - DNA, 581 bp, Artificial Sequence
  chemically treated genomic DNA (Homo sapiens) CpG-island No: 29518
cccacccaaaaaaaaactacaaatcgaaaccaaccccaaaacctccgcgataccacctctctctcgcgaaaatccctaccgtaccccgactcgccgctaaaaaacgctacgacaccgacgtaaaaaccgccgacaaaaataaaacgaaaccgacgaaacgaaacaaaaaaccctacgacgacgaacgcgacgaactcgaccacaaataacccgcaaaaaccgaaaacgctacctaacgcgcgaacgactaaaaacacgacgctaaacgacgccgaaaccctaaaaccgccgaaaccaacgaaaaccaatccccgtcttcgcccctcgccccccaccgtatcgccgaccttaatccctacgacgcgaacgtccgacgcgaaaaaaaaaaataccaaacgacctcgccgactccctaaaacccccgcttacaccgaaataaacgcctcaaatcgaaaaaaacgctatcgaaaaaaaaaaacgctactccctcgacaccccaaaatcgccgactacccgcgaaaaaaacccgaacaccgcgcctcgccccctaacctacgacctccgaaaacgcccgacgcgaa

SEQ ID NO: 29519 - DNA, 581 bp, Artificial Sequence
  chemically treated genomic DNA (Homo sapiens) CpG-island No: 29519
tttatttaggagagggttgtagatcggggttagttttagggttttcgcggtgttatttttttttcgcgagggtttttgtcgtgtttcggttcgtcgttgggaggcgttgcggtatcggcgtaggagtcgtcggtaggggtggggcggggtcggcgggacggggtagagggttttgcggcggcggacgcggcgggttcggttataggtaattcgtaggagtcgagagcgttgtttggcgcgcgggcggttggaggtacggcgttgggcggcgtcgaggttttggggtcgtcggagttagcgggagttagttttcgttttcgtttttcgttttttatcgtgtcgtcggttttggtttttgcggcgcggacgttcggcgcgggagagaaaggtattaggcgatttcgtcggttttttgggattttcgtttatatcggggtgggcgttttaggtcggggaggacgttgtcgggggaagggggcgttgttttttcggtattttaggatcgtcgattgttcgcggaggagattcggatatcgcgtttcgttttttggtttgcggttttcgaaaacgttcggcgcgag

SEQ ID NO: 29520 - DNA, 581 bp, Artificial Sequence
  chemically treated genomic DNA (Homo sapiens) CpG-island No: 29520
ctcgcgccgaacgttttcgaaaaccgcaaaccaaaaaacgaaacgcgatatccgaatctcctccgcgaacaatcgacgatcctaaaataccgaaaaaacaacgcccccttcccccgacaacgtcctccccgacctaaaacgcccaccccgatataaacgaaaatcccaaaaaaccgacgaaatcgcctaatacctttctctcccgcgccgaacgtccgcgccgcaaaaaccaaaaccgacgacacgataaaaaacgaaaaacgaaaacgaaaactaactcccgctaactccgacgaccccaaaacctcgacgccgcccaacgccgtacctccaaccgcccgcgcgccaaacaacgctctcgactcctacgaattacctataaccgaacccgccgcgtccgccgccgcaaaaccctctaccccgtcccgccgaccccgccccacccctaccgacgactcctacgccgataccgcaacgcctcccaacgacgaaccgaaacacgacaaaaaccctcgcgaaaaaaaaataacaccgcgaaaaccctaaaactaaccccgatctacaaccctctcctaaataaa

SEQ ID NO: 29521 - DNA, 916 bp, Artificial Sequence
  chemically treated genomic DNA (Homo sapiens) CpG-island No: 29521
ggcgtgtgggagtgggacggcgggggggatattgagggtgtgcggcgtttttttttttgtttgtgcggggattacgtgaaggagaggcgcgtgggggtttttggcgcgtagtcgcggtgggtgacggtcggcgtttcgggggtttcgtgtacggggcgtgtgtcggtgtgagtttgggagggtgtaggggtttcgcgttttttcggttttttcgtgcgtgtgcgtgtgcgtgtgtatgtgtgttttcggtttagcgtttcgtcgagtggtgttcgcggtcgggcgagcgcgcgcgcgttcgtgcggggtgtgtatgtgagtatgtgatagtgtgtgttaggtgattcgggttacgtagtttttttttttttttttttttcgggaggaattgtcgcgtttcggttgattttttcgtcggcgggcggggcgggggagggggtttcgggcgcgttgggaatcgcgggattcggatttgggcgtcgttcgtcgggggacgcgcggttttcgttttcgtcgggtttcgttgagttttagataaattttcgttttagaaataggttgcgggcggtcggttaggaggtttggtttttatttcgggattttcgtcgttttcgggtcggtcggtcggtgggtacgatgagttaggtgttggggaagtcgtagtcgtaggacgaggacgacgcggaggaggaggaggaggaggatgagttggtggggttagcggattacggagacgggttcgattttttcgacgtcgattcggatagcggtatagaggagggaggtgagcgttcggttttcgcgttttcggttcgcgttttttttttttttttggcgttttttcgtttttagttcggtcgtgcgcgagttatcgatttggagggggtttaggggagcgggtttagttgagggtttg

SEQ ID NO: 29522 - DNA, 916 bp, Artificial Sequence
  chemically treated genomic DNA (Homo sapiens) CpG-island No: 29522
caaaccctcaactaaacccgctcccctaaaccccctccaaatcgataactcgcgcacgaccgaactaaaaacgaaaaaacgccaaaaaaaaaaaaaaaacgcgaaccgaaaacgcgaaaaccgaacgctcacctccctcctctataccgctatccgaatcgacgtcgaaaaaatcgaacccgtctccgtaatccgctaaccccaccaactcatcctcctcctcctcctcctccgcgtcgtcctcgtcctacgactacgacttccccaacacctaactcatcgtacccaccgaccgaccgacccgaaaacgacgaaaatcccgaaataaaaaccaaacctcctaaccgaccgcccgcaacctatttctaaaacgaaaatttatctaaaactcaacgaaacccgacgaaaacgaaaaccgcgcgtcccccgacgaacgacgcccaaatccgaatcccgcgattcccaacgcgcccgaaaccccctcccccgccccgcccgccgacgaaaaaatcaaccgaaacgcgacaattcctcccgaaaaaaaaaaaaaaaaaaaaactacgtaacccgaatcacctaacacacactatcacatactcacatacacaccccgcacgaacgcgcgcgcgctcgcccgaccgcgaacaccactcgacgaaacgctaaaccgaaaacacacatacacacgcacacgcacacgcacgaaaaaaccgaaaaaacgcgaaacccctacaccctcccaaactcacaccgacacacgccccgtacacgaaacccccgaaacgccgaccgtcacccaccgcgactacgcgccaaaaacccccacgcgcctctccttcacgtaatccccgcacaaacaaaaaaaaaaacgccgcacaccctcaatatcccccccgccgtcccactcccacacgcc

SEQ ID NO: 29523 - DNA, 916 bp, Artificial Sequence
  chemically treated genomic DNA (Homo sapiens) CpG-island No: 29523
taaatttttaattggattcgtttttttggattttttttaagtcggtggttcgcgtacggtcgggttgggggcgggaaggcgttaaggggaggaaaggggcgcgagtcgaggacgcgggggtcgggcgtttattttttttttttgtgtcgttgttcggatcggcgtcggaggagtcgggttcgttttcgtagttcgttagttttattagtttattttttttttttttttttttcgcgtcgttttcgttttgcggttgcggtttttttagtatttggtttatcgtgtttatcggtcggtcggttcggggacggcgggggtttcggggtgggggttaagttttttagtcggtcgttcgtagtttatttttgaagcggaggtttgtttagagtttagcggggttcggcggaagcgggggtcgcgcgtttttcggcgggcggcgtttaggttcgggtttcgcggtttttagcgcgttcgaagttttttttttcgtttcgttcgtcggcggaggagttagtcggagcgcggtagtttttttcggaggagggagagagagagagattgcgtgattcgagttatttgatatatattgttatatatttatatatatatttcgtacgggcgcgcgcgcgttcgttcggtcgcgggtattattcggcggggcgttgggtcgaggatatatatgtatacgtatacgtatacgtacgaggagatcggggaggcgcggggtttttgtatttttttagatttatatcgatatacgtttcgtatacggggttttcgggacgtcggtcgttatttatcgcggttgcgcgttaggggtttttacgcgttttttttttacgtggttttcgtataggtaggggagggggcgtcgtatatttttaatgtttttttcgtcgttttatttttatacgtt

SEQ ID NO: 29524 - DNA, 916 bp, Artificial Sequence
  chemically treated genomic DNA (Homo sapiens) CpG-island No: 29524
aacgtataaaaataaaacgacgaaaaaaacattaaaaatatacgacgccccctcccctacctatacgaaaaccacgtaaaaaaaaaacgcgtaaaaacccctaacgcgcaaccgcgataaataacgaccgacgtcccgaaaaccccgtatacgaaacgtatatcgatataaatctaaaaaaatacaaaaaccccgcgcctccccgatctcctcgtacgtatacgtatacgtatacatatatatcctcgacccaacgccccgccgaataatacccgcgaccgaacgaacgcgcgcgcgcccgtacgaaatatatatataaatatataacaatatatatcaaataactcgaatcacgcaatctctctctctctccctcctccgaaaaaaactaccgcgctccgactaactcctccgccgacgaacgaaacgaaaaaaaaaacttcgaacgcgctaaaaaccgcgaaacccgaacctaaacgccgcccgccgaaaaacgcgcgacccccgcttccgccgaaccccgctaaactctaaacaaacctccgcttcaaaaataaactacgaacgaccgactaaaaaacttaacccccaccccgaaacccccgccgtccccgaaccgaccgaccgataaacacgataaaccaaatactaaaaaaaccgcaaccgcaaaacgaaaacgacgcgaaaaaaaaaaaaaaaaaaaataaactaataaaactaacgaactacgaaaacgaacccgactcctccgacgccgatccgaacaacgacacaaaaaaaaaaaataaacgcccgacccccgcgtcctcgactcgcgcccctttcctccccttaacgccttcccgcccccaacccgaccgtacgcgaaccaccgacttaaaaaaaatccaaaaaaacgaatccaattaaaaattta

SEQ ID NO: 29525 - DNA, 636 bp, Artificial Sequence
  chemically treated genomic DNA (Homo sapiens) CpG-island No: 29525
gggagggacgttaaaagttcgatttcgagttgttaaatgagggagcgcggtgttggtggcggaggggtaattaggatcggtggaaaaggggaaggagggagtaagcgtttgggttggaggagcgcgcgtttttgttttttttagagtcggtgtttttcgcgttttttattttaagtttttcgtagcgtttggcggttggggaggggaggggatcgcgggcgcgttttgggattttttttttagaacggtgttgttgaagttagggttagatgtcgtggttaaaaaaaggtagtcggcggcggcgtgattggtagggtcgtcggtagttgcgggtgttagtttcgtttcgcgtcgtcgcgggaggggtttatttaggtagtggttggggagattcgcggggcggcggggggatgttcgttaagttgttgtgggagttttcgagaggtcgtagatttttcgggatttacgtaaatatcgttgttaggatattttatttgttttcggtattattatttggatatggtagtgtttgttcgggagtgagcgcgcggcggggaattttttgttttaatagtgaagtaaatttttttttttgttttagaagcgggttttagtaatcgtttagtttgtgggggt

SEQ ID NO: 29526 - DNA, 636 bp, Artificial Sequence
  chemically treated genomic DNA (Homo sapiens) CpG-island No: 29526
acccccacaaactaaacgattactaaaacccgcttctaaaacaaaaaaaaaaatttacttcactattaaaacaaaaaattccccgccgcgcgctcactcccgaacaaacactaccatatccaaataataataccgaaaacaaataaaatatcctaacaacgatatttacgtaaatcccgaaaaatctacgacctctcgaaaactcccacaacaacttaacgaacatccccccgccgccccgcgaatctccccaaccactacctaaataaacccctcccgcgacgacgcgaaacgaaactaacacccgcaactaccgacgaccctaccaatcacgccgccgccgactacctttttttaaccacgacatctaaccctaacttcaacaacaccgttctaaaaaaaaaatcccaaaacgcgcccgcgatcccctcccctccccaaccgccaaacgctacgaaaaacttaaaataaaaaacgcgaaaaacaccgactctaaaaaaaacaaaaacgcgcgctcctccaacccaaacgcttactccctccttccccttttccaccgatcctaattacccctccgccaccaacaccgcgctccctcatttaacaactcgaaatcgaacttttaacgtccctccc

SEQ ID NO: 29527 - DNA, 636 bp, Artificial Sequence
  chemically treated genomic DNA (Homo sapiens) CpG-island No: 29527
gtttttataagttgaacgattgttaaaattcgtttttagaataggaaaaagagtttgttttattattgaagtaaagaatttttcgtcgcgcgtttattttcgggtaggtattgttatgtttaggtggtgatatcgagagtagataaggtgttttgataacggtgtttgcgtggatttcgggaaatttgcggtttttcggagatttttataatagtttggcgagtattttttcgtcgtttcgcgggtttttttagttattatttgggtgggtttttttcgcggcgacgcggggcgagattgatattcgtagttgtcgacgattttgttagttacgtcgtcgtcggttgtttttttttagttacgatatttgattttggttttaatagtatcgttttgggagagaggttttagggcgcgttcgcggtttttttttttttttaatcgttagacgttgcggagagtttggggtgaggggcgcgggaggtatcggttttgaaaggggtagaagcgcgcgtttttttagtttagacgtttattttttttttttttttttttatcgattttggttgttttttcgttattagtatcgcgtttttttatttggtagttcgaggtcgggtttttggcgtttttttt

SEQ ID NO: 29528 - DNA, 636 bp, Artificial Sequence
  chemically treated genomic DNA (Homo sapiens) CpG-island No: 29528
aaaaaaaacgccaaaaacccgacctcgaactaccaaataaaaaaacgcgatactaataacgaaaaaacaaccaaaatcgataaaaaaaaaaaaaaaaaaaataaacgtctaaactaaaaaaacgcgcgcttctacccctttcaaaaccgatacctcccgcgcccctcaccccaaactctccgcaacgtctaacgattaaaaaaaaaaaaaaaccgcgaacgcgccctaaaacctctctcccaaaacgatactattaaaaccaaaatcaaatatcgtaactaaaaaaaaacaaccgacgacgacgtaactaacaaaatcgtcgacaactacgaatatcaatctcgccccgcgtcgccgcgaaaaaaacccacccaaataataactaaaaaaacccgcgaaacgacgaaaaaatactcgccaaactattataaaaatctccgaaaaaccgcaaatttcccgaaatccacgcaaacaccgttatcaaaacaccttatctactctcgatatcaccacctaaacataacaatacctacccgaaaataaacgcgcgacgaaaaattctttacttcaataataaaacaaactctttttcctattctaaaaacgaattttaacaatcgttcaacttataaaaac

SEQ ID NO: 29529 - DNA, 639 bp, Artificial Sequence
  chemically treated genomic DNA (Homo sapiens) CpG-island No: 29529
gcgggatcgcgcgcgggtagtcggttgcggatagttttgtagtcggagttcggcgtttttttcgagttttcgagggttcgggggtttcggatttcgtttatagcgggtagggtcgggacgagaggacgaggacgtcgttcgtttttgtatttttttaagtcggtttcgtcgggcgggcggcggttgggtagtgatcgatcgttacgaagttattgttacgttagggtaattttataaatttcggacgagggcgggtgacgtaagtcgggcggtcgcggtagggttgggtttgcgattattcgaggaggttgatttttagttcgggcgttcggtttagcgtcgtttcggtcggcgtcggtgtttgttaggtatttagggaggcgggggcgtagtggaggaggcggcgttatcgcgaagcgagcgtttcgttcgtatttagttttgttatttcgttcgtagtttaggttggattgggcggtatttgtcgaggtttttcggttaggtttcgttcgttcgagtcgcgttgagattcgggtagcggtcgcgtggagaggaggtggtagcggttcgggaggtcggagttaagttagcgatttattatggagattcgttataatttgaagagttcgggtgagtagg

SEQ ID NO: 29530 - DNA, 639 bp, Artificial Sequence
  chemically treated genomic DNA (Homo sapiens) CpG-island No: 29530
cctactcacccgaactcttcaaattataacgaatctccataataaatcgctaacttaactccgacctcccgaaccgctaccacctcctctccacgcgaccgctacccgaatctcaacgcgactcgaacgaacgaaacctaaccgaaaaacctcgacaaataccgcccaatccaacctaaactacgaacgaaataacaaaactaaatacgaacgaaacgctcgcttcgcgataacgccgcctcctccactacgcccccgcctccctaaatacctaacaaacaccgacgccgaccgaaacgacgctaaaccgaacgcccgaactaaaaatcaacctcctcgaataatcgcaaacccaaccctaccgcgaccgcccgacttacgtcacccgccctcgtccgaaatttataaaattaccctaacgtaacaataacttcgtaacgatcgatcactacccaaccgccgcccgcccgacgaaaccgacttaaaaaaatacaaaaacgaacgacgtcctcgtcctctcgtcccgaccctacccgctataaacgaaatccgaaacccccgaaccctcgaaaactcgaaaaaaacgccgaactccgactacaaaactatccgcaaccgactacccgcgcgcgatcccgc

SEQ ID NO: 29531 - DNA, 639 bp, Artificial Sequence
  chemically treated genomic DNA (Homo sapiens) CpG-island No: 29531
tttgtttattcggattttttaggttgtagcgggtttttatggtgggtcgttggtttggtttcggtttttcgggtcgttgttattttttttttacgcggtcgttgttcgggttttagcgcggttcgggcggacggggtttggtcgaggagtttcggtaaatgtcgtttagtttagtttggattgcgggcggggtggtaaggttgagtgcgggcgaggcgttcgtttcgcgatggcgtcgttttttttattgcgttttcgtttttttgagtgtttggtaggtatcggcgtcggtcggggcggcgttgaatcgggcgttcgggttggaggttagttttttcgggtagtcgtaggtttagttttgtcgcggtcgttcggtttgcgttattcgttttcgttcgggatttgtgaagttgttttgacgtggtagtagtttcgtggcggtcggttattatttagtcgtcgttcgttcggcgaagtcggtttggggaggtgtaggagcgagcggcgttttcgttttttcgtttcggttttgttcgttgtaggcgaggttcgggattttcgggttttcgagagttcggagggggcgtcgggtttcggttgtaaagttgttcgtagtcggttgttcgcgcgcggtttcgt

SEQ ID NO: 29532 - DNA, 639 bp, Artificial Sequence
  chemically treated genomic DNA (Homo sapiens) CpG-island No: 29532
acgaaaccgcgcgcgaacaaccgactacgaacaactttacaaccgaaacccgacgccccctccgaactctcgaaaacccgaaaatcccgaacctcgcctacaacgaacaaaaccgaaacgaaaaaacgaaaacgccgctcgctcctacacctccccaaaccgacttcgccgaacgaacgacgactaaataataaccgaccgccacgaaactactaccacgtcaaaacaacttcacaaatcccgaacgaaaacgaataacgcaaaccgaacgaccgcgacaaaactaaacctacgactacccgaaaaaactaacctccaacccgaacgcccgattcaacgccgccccgaccgacgccgatacctaccaaacactcaaaaaaacgaaaacgcaataaaaaaaacgacgccatcgcgaaacgaacgcctcgcccgcactcaaccttaccaccccgcccgcaatccaaactaaactaaacgacatttaccgaaactcctcgaccaaaccccgtccgcccgaaccgcgctaaaacccgaacaacgaccgcgtaaaaaaaaaataacaacgacccgaaaaaccgaaaccaaaccaacgacccaccataaaaacccgctacaacctaaaaaatccgaataaacaaa

SEQ ID NO: 29533 - DNA, 518 bp, Artificial Sequence
  chemically treated genomic DNA (Homo sapiens) CpG-island No: 29533
gaagtcgagagtgggatagaagtggagcgttgggcggtaacgaggaaattaaagttatagaagttcggcgtagggcgggaagcgtgggaaggttttttttttcgcggcgaggtgtttttttcgttcgaaacgtcggtttaggttcgttttcggtttttaggtcgttatttttttttttttcgtcgcgggttatttattggcgttcgttcggtgggtttcgcggtttggcggtttggagcgtattatcgcggcggagcggcgggttggggcgtcgtacggtgagaaaggtcggggtttgagaataaatcgtcgcggtcgtcggggtaacgggacggggtacgtgtttttttcgttagagtcggaagcggtaggttcgtgcgttttttttgagttcgaagttaattaggtttcgagcggttcgttgcggtcggtttatgtcggttagttttcgtttttcgagaaggatggtttggaattgttgagacgaggttagagtatgtatggggtttttttttagg

SEQ ID NO: 29534 - DNA, 518 bp, Artificial Sequence
  chemically treated genomic DNA (Homo sapiens) CpG-island No: 29534
cctaaaaaaaaaccccatacatactctaacctcgtctcaacaattccaaaccatccttctcgaaaaacgaaaactaaccgacataaaccgaccgcaacgaaccgctcgaaacctaattaacttcgaactcaaaaaaaacgcacgaacctaccgcttccgactctaacgaaaaaaacacgtaccccgtcccgttaccccgacgaccgcgacgatttattctcaaaccccgacctttctcaccgtacgacgccccaacccgccgctccgccgcgataatacgctccaaaccgccaaaccgcgaaacccaccgaacgaacgccaataaataacccgcgacgaaaaaaaaaaaaataacgacctaaaaaccgaaaacgaacctaaaccgacgtttcgaacgaaaaaaacacctcgccgcgaaaaaaaaaaccttcccacgcttcccgccctacgccgaacttctataactttaatttcctcgttaccgcccaacgctccacttctatcccactctcgacttc

SEQ ID NO: 29535 - DNA, 518 bp, Artificial Sequence
  chemically treated genomic DNA (Homo sapiens) CpG-island No: 29535
tttgaagaaaagttttatgtatgttttggtttcgttttagtagttttaggttatttttttcgaggggcgggagttgatcggtatgaatcggtcgtagcgagtcgttcgaggtttggttggtttcgagtttaggagggacgtacgagtttgtcgttttcggttttggcggggggggtacgtgtttcgtttcgttgtttcggcgatcgcggcggtttgtttttaggtttcggttttttttatcgtgcgacgttttaattcgtcgtttcgtcgcggtggtacgttttaggtcgttaggtcgcgaggtttatcgagcggacgttagtggatgattcgcggcgggggaggaggaggtgacggtttgggagtcggaggcgggtttgggtcggcgtttcgggcgaggggggtatttcgtcgcgaaggaaggggtttttttacgtttttcgttttgcgtcgggtttttgtggttttagttttttcgttgtcgtttagcgttttatttttgttttattttcgatttt

SEQ ID NO: 29536 - DNA, 518 bp, Artificial Sequence
  chemically treated genomic DNA (Homo sapiens) CpG-island No: 29536
aaaatcgaaaataaaacaaaaataaaacgctaaacgacaacgaaaaaactaaaaccacaaaaacccgacgcaaaacgaaaaacgtaaaaaaaccccttccttcgcgacgaaatacccccctcgcccgaaacgccgacccaaacccgcctccgactcccaaaccgtcacctcctcctcccccgccgcgaatcatccactaacgtccgctcgataaacctcgcgacctaacgacctaaaacgtaccaccgcgacgaaacgacgaattaaaacgtcgcacgataaaaaaaaccgaaacctaaaaacaaaccgccgcgatcgccgaaacaacgaaacgaaacacgtaccccccccgccaaaaccgaaaacgacaaactcgtacgtccctcctaaactcgaaaccaaccaaacctcgaacgactcgctacgaccgattcataccgatcaactcccgcccctcgaaaaaaataacctaaaactactaaaacgaaaccaaaacatacataaaacttttcttcaaa

SEQ ID NO: 29537 - DNA, 984 bp, Artificial Sequence
  chemically treated genomic DNA (Homo sapiens) CpG-island No: 29537
tggggcgtcggggtttcgaatcgttcgttttttttagtcgagtttttttattcgttaggttatcgcggcgtcggggttttatatttgatgttgttgtcgtttttgttggtaaggtttaattggtttttggtggtaacgtcgcgttcggattttgtcgttatcgtttttttcgattttttcggttttcgaggttatggcggagttttcgtcgtttttcgtttcggggcgggtaagggggcgggagaggtagaggcggaggttttagagagtttttttcgtcgttcggtttcggtttaaaagttcgttcgcgttgtttatatagtgggtataagtattttaggaatcgcgaggttgcgagtaggagcggagagagggtgagtgttggtagcggggaagggggtggcggtcgtagaggtcgaggaggtttcggttcggtcgtttttgcggattttcgtttttgtgtgtgttacggtttttatggagatttttcgtagaggatagtacgaatagtttttcgcggtgttgaggtttaattcgatcgtcgattggtgggagttttttcgtcgttttagtcgtagttgtcgtagttgaagtcgttggcgacgttcgtttattttttttttgtgcgtatagcgttcgtttcgtcgtcgtcgtcgtcgtcgtttttgtagttttcgtcgtcgttgcgtttattatttttgttaaggcggttgtcgcggtcgcgagttaaaatgtcgttatttatcggcgttcgacgtatttgtattattatgttgcgacgagttgataggtaaagaggaagggttggtcgagtttacgttttcggtcgcgcggtacgttgggaaacgtagtttaataacggaacgcggtttttcggaaaggaagagggacggggaaggagattttcggggcgtcgtagaggtataaagttaaggggtatttttgttgtttttggttgtaaattagattttgaaaagatattta

SEQ ID NO: 29538 - DNA, 984 bp, Artificial Sequence
  chemically treated genomic DNA (Homo sapiens) CpG-island No: 29538
taaatatcttttcaaaatctaatttacaaccaaaaacaacaaaaataccccttaactttatacctctacgacgccccgaaaatctccttccccgtccctcttcctttccgaaaaaccgcgttccgttattaaactacgtttcccaacgtaccgcgcgaccgaaaacgtaaactcgaccaacccttcctctttacctatcaactcgtcgcaacataataatacaaatacgtcgaacgccgataaataacgacattttaactcgcgaccgcgacaaccgccttaacaaaaataataaacgcaacgacgacgaaaactacaaaaacgacgacgacgacgacgacgaaacgaacgctatacgcacaaaaaaaaaataaacgaacgtcgccaacgacttcaactacgacaactacgactaaaacgacgaaaaaactcccaccaatcgacgatcgaattaaacctcaacaccgcgaaaaactattcgtactatcctctacgaaaaatctccataaaaaccgtaacacacacaaaaacgaaaatccgcaaaaacgaccgaaccgaaacctcctcgacctctacgaccgccacccccttccccgctaccaacactcaccctctctccgctcctactcgcaacctcgcgattcctaaaatacttatacccactatataaacaacgcgaacgaacttttaaaccgaaaccgaacgacgaaaaaaactctctaaaacctccgcctctacctctcccgcccccttacccgccccgaaacgaaaaacgacgaaaactccgccataacctcgaaaaccgaaaaaatcgaaaaaaacgataacgacaaaatccgaacgcgacgttaccaccaaaaaccaattaaaccttaccaacaaaaacgacaacaacatcaaatataaaaccccgacgccgcgataacctaacgaataaaaaaactcgactaaaaaaaacgaacgattcgaaaccccgacgcccca

SEQ ID NO: 29539 - DNA, 984 bp, Artificial Sequence
  chemically treated genomic DNA (Homo sapiens) CpG-island No: 29539
taagtgtttttttaaagtttaatttatagttaagaatagtaaaagtattttttggttttgtgtttttgcggcgtttcggagattttttttttcgttttttttttttttcgagaagtcgcgtttcgttgttgaattacgttttttagcgtgtcgcgcggtcgagagcgtggattcgattagttttttttttttgtttattagttcgtcgtagtatgatgatgtaaatgcgtcgggcgtcgatgagtgacgatattttggttcgcgatcgcggtagtcgttttagtaggggtaataggcgtaacggcggcggaggttgtagggacgacgacgacgacggcggcggggcgggcgttgtgcgtataggggaggggtaggcgggcgtcgttagcggttttaattgcggtagttacggttagggcgacggaagaatttttattagtcggcggtcgagttaggttttagtatcgcggggaattgttcgtgttgttttttgcgggagatttttatagagatcgtgatatatatagaggcgggggttcgtagaggcggtcggatcggagttttttcggtttttgcggtcgttattttttttttcgttgttagtatttatttttttttcgtttttgttcgtaatttcgcggtttttggggtgtttgtgtttattgtgtggatagcgcgggcggatttttgggtcggggtcgggcggcgggggaggttttttaaggttttcgtttttgtttttttcgtttttttattcgtttcggagcgggaagcggcggaggtttcgttatggtttcgggagtcggaggagtcggagggggcggtggcggtaagattcggacgcggcgttgttattaggggttaattaagttttattagtaggggcgataatagtattaggtatgggatttcgacgtcgcggtggtttggcgggtggggaaattcggttggaggggacgggcggttcgaggtttcggcgtttta

SEQ ID NO: 29540 - DNA, 984 bp, Artificial Sequence
  chemically treated genomic DNA (Homo sapiens) CpG-island No: 29540
taaaacgccgaaacctcgaaccgcccgtcccctccaaccgaatttccccacccgccaaaccaccgcgacgtcgaaatcccatacctaatactattatcgcccctactaataaaacttaattaacccctaataacaacgccgcgtccgaatcttaccgccaccgccccctccgactcctccgactcccgaaaccataacgaaacctccgccgcttcccgctccgaaacgaataaaaaaacgaaaaaaacaaaaacgaaaaccttaaaaaacctcccccgccgcccgaccccgacccaaaaatccgcccgcgctatccacacaataaacacaaacaccccaaaaaccgcgaaattacgaacaaaaacgaaaaaaaaataaatactaacaacgaaaaaaaaaataacgaccgcaaaaaccgaaaaaactccgatccgaccgcctctacgaacccccgcctctatatatatcacgatctctataaaaatctcccgcaaaaaacaacacgaacaattccccgcgatactaaaacctaactcgaccgccgactaataaaaattcttccgtcgccctaaccgtaactaccgcaattaaaaccgctaacgacgcccgcctacccctcccctatacgcacaacgcccgccccgccgccgtcgtcgtcgtcgtccctacaacctccgccgccgttacgcctattacccctactaaaacgactaccgcgatcgcgaaccaaaatatcgtcactcatcgacgcccgacgcatttacatcatcatactacgacgaactaataaacaaaaaaaaaaaactaatcgaatccacgctctcgaccgcgcgacacgctaaaaaacgtaattcaacaacgaaacgcgacttctcgaaaaaaaaaaaaaacgaaaaaaaaaatctccgaaacgccgcaaaaacacaaaaccaaaaaatacttttactattcttaactataaattaaactttaaaaaaacactta

SEQ ID NO: 29541 - DNA, 794 bp, Artificial Sequence
  chemically treated genomic DNA (Homo sapiens) CpG-island No: 29541
tggattcgtatacggggtgtttttggtgtgagaatgtgtgtggattcgtatacggggtgtttttggtgtgagaatgtgtgtggattcgtagacggggtgtttttggtgtgagaatgtgtgtggattcgtatacggggtgtttttggtgtgagaatgtgtgtggattcgtatacggggtgtttttggtgtgagaatgtgtgtggattcgtatacggggtgtttttggtgtgagaatgtgtgtggattcgtatacggggtgtttttggtgtgagaatgtgtgtggattcgtatacggggtgtttttggtgtgagaatgtgtgtggattcgtatacggggtgtttttggtgtgagaatgtgtgtggattcgtatacggggtgtttttggtgtgagaatgtgtgtggattcgtatacggggtgtttttggtgtgagaatgtgtgtggattcgtagacggggtgtttttggtgtgagaatgtgtgtggattcgtatacggggtgtttttggtgtgagaatgtgtgtggattcgtatacggggtgtttttggtgtgagaatgtgtgtggattcgtagacggggtgtttttggtgtgagaatgtgtgtggattcgtatacggggtgtttttggtgtgagaatgtgtgtggattcgtagacggggtgtttttggtgtgagaatgtgtgtggattcgtatacggggtgtttttggtgtgagaatgtgtgtggattcgtatacggggtgtttttggtgtgagaatgtgtgtggattcgtatacggggtgtttttggtgtgagaa

SEQ ID NO: 29542 - DNA, 794 bp, Artificial Sequence
  chemically treated genomic DNA (Homo sapiens) CpG-island No: 29542
ttctcacaccaaaaacaccccgtatacgaatccacacacattctcacaccaaaaacaccccgtatacgaatccacacacattctcacaccaaaaacaccccgtatacgaatccacacacattctcacaccaaaaacaccccgtctacgaatccacacacattctcacaccaaaaacaccccgtatacgaatccacacacattctcacaccaaaaacaccccgtctacgaatccacacacattctcacaccaaaaacaccccgtatacgaatccacacacattctcacaccaaaaacaccccgtatacgaatccacacacattctcacaccaaaaacaccccgtctacgaatccacacacattctcacaccaaaaacaccccgtatacgaatccacacacattctcacaccaaaaacaccccgtatacgaatccacacacattctcacaccaaaaacaccccgtatacgaatccacacacattctcacaccaaaaacaccccgtatacgaatccacacacattctcacaccaaaaacaccccgtatacgaatccacacacattctcacaccaaaaacaccccgtatacgaatccacacacattctcacaccaaaaacaccccgtatacgaatccacacacattctcacaccaaaaacaccccgtatacgaatccacacacattctcacaccaaaaacaccccgtctacgaatccacacacattctcacaccaaaaacaccccgtatacgaatccacacacattctcacaccaaaaacaccccgtatacgaatcca

SEQ ID NO: 29543 - DNA, 794 bp, Artificial Sequence
  chemically treated genomic DNA (Homo sapiens) CpG-island No: 29543
tttttatattaagaatatttcgtgtacgaatttatatatatttttatattaagaatatttcgtgtgcgaatttatatatatttttatattaagaatatttcgtgtgcgaatttatatatatttttatattaagaatatttcgtttgcgaatttatatatatttttatattaagaatatttcgtgtgcgaatttatatatatttttatattaagaatatttcgtttgcgaatttatatatatttttatattaagaatatttcgtgtgcgaatttatatatatttttatattaagaatatttcgtgtgcgaatttatatatatttttatattaagaatatttcgtttgcgaatttatatatatttttatattaagaatatttcgtgtgcgaatttatatatatttttatattaagaatatttcgtgtgcgaatttatatatatttttatattaagaatatttcgtgtgcgaatttatatatatttttatattaagaatatttcgtgtgcgaatttatatatatttttatattaagaatatttcgtgtgcgaatttatatatatttttatattaagaatatttcgtgtgcgaatttatatatatttttatattaagaatatttcgtgtgcgaatttatatatatttttatattaagaatatttcgtgtgcgaatttatatatatttttatattaagaatatttcgtttgcgaatttatatatatttttatattaagaatatttcgtgtgcgaatttatatatatttttatattaagaatatttcgtgtgcgaattta

SEQ ID NO: 29544 - DNA, 794 bp, Artificial Sequence
  chemically treated genomic DNA (Homo sapiens) CpG-island No: 29544
taaattcgcacacgaaatattcttaatataaaaatatatataaattcgcacacgaaatattcttaatataaaaatatatataaattcgcaaacgaaatattcttaatataaaaatatatataaattcgcacacgaaatattcttaatataaaaatatatataaattcgcacacgaaatattcttaatataaaaatatatataaattcgcacacgaaatattcttaatataaaaatatatataaattcgcacacgaaatattcttaatataaaaatatatataaattcgcacacgaaatattcttaatataaaaatatatataaattcgcacacgaaatattcttaatataaaaatatatataaattcgcacacgaaatattcttaatataaaaatatatataaattcgcacacgaaatattcttaatataaaaatatatataaattcgcaaacgaaatattcttaatataaaaatatatataaattcgcacacgaaatattcttaatataaaaatatatataaattcgcacacgaaatattcttaatataaaaatatatataaattcgcaaacgaaatattcttaatataaaaatatatataaattcgcacacgaaatattcttaatataaaaatatatataaattcgcaaacgaaatattcttaatataaaaatatatataaattcgcacacgaaatattcttaatataaaaatatatataaattcgcacacgaaatattcttaatataaaaatatatataaattcgtacacgaaatattcttaatataaaaa

SEQ ID NO: 29545 - DNA, 552 bp, Artificial Sequence
  chemically treated genomic DNA (Homo sapiens) CpG-island No: 29545
tcgttattttttttacgatgttttttagcgttttttagcgcggtaggcggatgttcgcgtcggaggcgcgtaggttgggcggtaggtagtttcgttatatttttttgggaagtattcgtacgggtagattttgtattacgttgcgagcgcggtttagggacgagattagttttatcgttatcgtgagggaggggcggcgtttgtgggttagttgtagttttagggaggacgcgttcgttgcgtttttcgtcgttcgggataggtgtttcgtcgttagttttaggtggattttatcgagatttttcgagatattttttatgcgaaattgttggaaggttttttgtcgtatttcgtattatagtttggtttcgtggaggtcgtcggaattcgcggggtcgaagtataggttgttagggcgtacgcggagtacgtagattttcgttagtttcgcgacggtgtcgttgacgtgaatgaatagttttagatagtttttgtcggtgattttggcgcgaaattttatgatgttatagggaaggtagttgggggtttttg

SEQ ID NO: 29546 - DNA, 552 bp, Artificial Sequence
  chemically treated genomic DNA (Homo sapiens) CpG-island No: 29546
caaaaacccccaactaccttccctataacatcataaaatttcgcgccaaaatcaccgacaaaaactatctaaaactattcattcacgtcaacgacaccgtcgcgaaactaacgaaaatctacgtactccgcgtacgccctaacaacctatacttcgaccccgcgaattccgacgacctccacgaaaccaaactataatacgaaatacgacaaaaaaccttccaacaatttcgcataaaaaatatctcgaaaaatctcgataaaatccacctaaaactaacgacgaaacacctatcccgaacgacgaaaaacgcaacgaacgcgtcctccctaaaactacaactaacccacaaacgccgcccctccctcacgataacgataaaactaatctcgtccctaaaccgcgctcgcaacgtaatacaaaatctacccgtacgaatacttcccaaaaaaatataacgaaactacctaccgcccaacctacgcgcctccgacgcgaacatccgcctaccgcgctaaaaaacgctaaaaaacatcgtaaaaaaaataacga

SEQ ID NO: 29547 - DNA, 552 bp, Artificial Sequence
  chemically treated genomic DNA (Homo sapiens) CpG-island No: 29547
tagaggtttttagttgttttttttgtggtattatgaagtttcgcgttaagattatcggtaaaggttgtttagagttgtttatttacgttagcggtatcgtcgcgaggttagcgaaggtttgcgtgtttcgcgtgcgttttgatagtttgtgtttcggtttcgcgggtttcggcggtttttacgaggttaggttgtggtgcgaggtgcggtagggggttttttagtagtttcgtatggaaggtgtttcggaagatttcgatgagatttatttggagttgacggcggagtatttgtttcgggcggcgagaagcgtagcgggcgcgttttttttgaagttgtagttgatttataagcgtcgttttttttttacggtggcggtggagttggtttcgtttttgggtcgcgttcgtagcgtggtgtaagatttgttcgtgcgggtgttttttaggagagtgtggcgggattgtttgtcgtttagtttgcgcgttttcgacgcgagtattcgtttgtcgcgttggaggacgttgaggagtatcgtggagaggatggcga

SEQ ID NO: 29548 - DNA, 552 bp, Artificial Sequence
  chemically treated genomic DNA (Homo sapiens) CpG-island No: 29548
tcgccatcctctccacgatactcctcaacgtcctccaacgcgacaaacgaatactcgcgtcgaaaacgcgcaaactaaacgacaaacaatcccgccacactctcctaaaaaacacccgcacgaacaaatcttacaccacgctacgaacgcgacccaaaaacgaaaccaactccaccgccaccgtaaaaaaaaaacgacgcttataaatcaactacaacttcaaaaaaaacgcgcccgctacgcttctcgccgcccgaaacaaatactccgccgtcaactccaaataaatctcatcgaaatcttccgaaacaccttccatacgaaactactaaaaaaccccctaccgcacctcgcaccacaacctaacctcgtaaaaaccgccgaaacccgcgaaaccgaaacacaaactatcaaaacgcacgcgaaacacgcaaaccttcgctaacctcgcgacgataccgctaacgtaaataaacaactctaaacaacctttaccgataatcttaacgcgaaacttcataataccacaaaaaaaacaactaaaaacctcta

SEQ ID NO: 29549 - DNA, 1169 bp, Artificial Sequence
  chemically treated genomic DNA (Homo sapiens) CpG-island No: 29549
gatgcggcgggattagagaaaaattatttagggttaatgttagcgtttcgttaatatagatgtaggtgttttatagggtagttagtagtattttgcgatgtagattcggaatataatggtgtagggcgttgattttcgcgtttttagattttacgaaatacggaaatcgaagattatttatgttgttgtttaggtcgtagacgttttgtagtagtagtcgttttacgttcgttcgcgtatcggtgatttattttgttaattagtaaggtaattttaatagtttagtcgggtttttaacgataggagtacgattatgcgtattcgtggttaggatttaacgttgttcgagatgcgtcgcgtgcggttgttggagatggcggacgcgatggatatgttttgttaagggttggtttgcgtatttatagtttttcgtaagattgattggttttaatttttggagtggtgaattcgttagcgaggtgtcgtcggtttttatttaggtcgaggtggttcggttttatgtatcgcgacgtaacgcggggaggtagataaggtatagggcggcgtttataatttatgttaattcgttttatgtgttcgtcgaggcggtataaatcgtcgtgacgattagcggtttaatgatcgaagttaggttggtaagagtcgcgagcgatttttgaagttgtttttgatggtcgttatttatttgtttggatagtatggtttgtaacgcgggtatttcgatgtcgtcggaagcgagaagaattataatggggaaggttatttagtttcgcgtcgcgaacgttagtaagacgtagtttagcgcgtcggtcgttatgtcggcgataatggtttgtttttcgtcgaaacgtttggtggcgggattagtgacgaaggtttgagcgagggcgtgtaagatttcgaatatcgtaagcgataggtcgattatcgtcgcgttttagcgaaagcggttttcgtcgaaaatgatttagagcgttgtcggtatttgttttacgagttgtatgataaagaagatagttataagtgcggcgacgatagttatgtttcgcgtttatcggaaggagttgattgggttgaaggtttttaagggtatcggtcgagtttgatattgtaggattatattgttttaataaatttgcggtcgttaa

SEQ ID NO: 29550 - DNA, 1169 bp, Artificial Sequence
  chemically treated genomic DNA (Homo sapiens) CpG-island No: 29550
ttaacgaccgcaaatttattaaaacaatataatcctacaatatcaaactcgaccgatacccttaaaaaccttcaacccaatcaactccttccgataaacgcgaaacataactatcgtcgccgcacttataactatcttctttatcatacaactcgtaaaacaaataccgacaacgctctaaatcattttcgacgaaaaccgctttcgctaaaacgcgacgataatcgacctatcgcttacgatattcgaaatcttacacgccctcgctcaaaccttcgtcactaatcccgccaccaaacgtttcgacgaaaaacaaaccattatcgccgacataacgaccgacgcgctaaactacgtcttactaacgttcgcgacgcgaaactaaataaccttccccattataattcttctcgcttccgacgacatcgaaatacccgcgttacaaaccatactatccaaacaaataaataacgaccatcaaaaacaacttcaaaaatcgctcgcgactcttaccaacctaacttcgatcattaaaccgctaatcgtcacgacgatttataccgcctcgacgaacacataaaacgaattaacataaattataaacgccgccctataccttatctacctccccgcgttacgtcgcgatacataaaaccgaaccacctcgacctaaataaaaaccgacgacacctcgctaacgaattcaccactccaaaaattaaaaccaatcaatcttacgaaaaactataaatacgcaaaccaacccttaacaaaacatatccatcgcgtccgccatctccaacaaccgcacgcgacgcatctcgaacaacgttaaatcctaaccacgaatacgcataatcgtactcctatcgttaaaaacccgactaaactattaaaattaccttactaattaacaaaataaatcaccgatacgcgaacgaacgtaaaacgactactactacaaaacgtctacgacctaaacaacaacataaataatcttcgatttccgtatttcgtaaaatctaaaaacgcgaaaatcaacgccctacaccattatattccgaatctacatcgcaaaatactactaactaccctataaaacacctacatctatattaacgaaacgctaacattaaccctaaataatttttctctaatcccgccgcatc

SEQ ID NO: 29551 - DNA, 1169 bp, Artificial Sequence
  chemically treated genomic DNA (Homo sapiens) CpG-island No: 29551
ttagcggtcgtaaatttattagagtaatatagttttataatgttaagttcgatcgatgtttttgagagtttttaatttagttagtttttttcggtgggcgcggggtatgattatcgtcgtcgtatttatgattgttttttttattatgtaattcgtaggataggtgtcggtagcgttttgggttattttcggcgaggatcgttttcgttggagcgcgacgatgatcggtttgtcgtttgcggtattcggaattttgtacgttttcgtttaagttttcgttattggtttcgttattaaacgtttcggcgagaagtaggttattatcgtcggtatggcggtcgacgcgttgggttacgttttgttggcgttcgcgacgcgaggttggatggttttttttattatgatttttttcgttttcggcggtatcgggatgttcgcgttgtaggttatgttgtttaggtaggtagatgacgattattagggatagttttaaggatcgttcgcggtttttattagtttaatttcgattattggatcgttgatcgttacggcgatttatgtcgtttcggcgagtatatggaacgggttggtatggattgtaggcgtcgttttatattttgtttgttttttcgcgttgcgtcgcggtgtatggagtcgggttatttcgatttgaatggaagtcggcggtatttcgttaacggatttattattttaagaattggagttaattaattttgcggagaattgtgaatgcgtaaattaatttttggtagaatatatttatcgcgttcgttatttttagtagtcgtacgcggcgtatttcgggtagcgttgggttttggttacgggtgcgtatgatcgtgtttttgtcgttgaggattcggttaggttgttggggttgttttattggttagtagaatgaattatcgatacgcgagcgaacgtgaagcgattgttgttgtaaaacgtttgcgatttgagtaataatatgaatggttttcggttttcgtgtttcgtaaagtttggaaacgcggaagttagcgttttgtattattatgtttcggatttgtatcgtaggatgttgttggttattttgtggaatatttatatttgtattaacgaagcgttggtattgattttgagtgatttttttttggtttcgtcgtatt

SEQ ID NO: 29552 - DNA, 1169 bp, Artificial Sequence
  chemically treated genomic DNA (Homo sapiens) CpG-island No: 29552
aatacgacgaaaccaaaaaaaaatcactcaaaatcaataccaacgcttcgttaatacaaatataaatattccacaaaataaccaacaacatcctacgatacaaatccgaaacataataatacaaaacgctaacttccgcgtttccaaactttacgaaacacgaaaaccgaaaaccattcatattattactcaaatcgcaaacgttttacaacaacaatcgcttcacgttcgctcgcgtatcgataattcattctactaaccaataaaacaaccccaacaacctaaccgaatcctcaacgacaaaaacacgatcatacgcacccgtaaccaaaacccaacgctacccgaaatacgccgcgtacgactactaaaaataacgaacgcgataaatatattctaccaaaaattaatttacgcattcacaattctccgcaaaattaattaactccaattcttaaaataataaatccgttaacgaaataccgccgacttccattcaaatcgaaataacccgactccatacaccgcgacgcaacgcgaaaaaacaaacaaaatataaaacgacgcctacaatccataccaacccgttccatatactcgccgaaacgacataaatcgccgtaacgatcaacgatccaataatcgaaattaaactaataaaaaccgcgaacgatccttaaaactatccctaataatcgtcatctacctacctaaacaacataacctacaacgcgaacatcccgataccgccgaaaacgaaaaaaatcataataaaaaaaaccatccaacctcgcgtcgcgaacgccaacaaaacgtaacccaacgcgtcgaccgccataccgacgataataacctacttctcgccgaaacgtttaataacgaaaccaataacgaaaacttaaacgaaaacgtacaaaattccgaataccgcaaacgacaaaccgatcatcgtcgcgctccaacgaaaacgatcctcgccgaaaataacccaaaacgctaccgacacctatcctacgaattacataataaaaaaaacaatcataaatacgacgacgataatcataccccgcgcccaccgaaaaaaactaactaaattaaaaactctcaaaaacatcgatcgaacttaacattataaaactatattactctaataaatttacgaccgctaa

SEQ ID NO: 29553 - DNA, 505 bp, Artificial Sequence
  chemically treated genomic DNA (Homo sapiens) CpG-island No: 29553
aaatcgtaagttgcgttaaatttcgcgtatcggggcgggagggcgggtggggaatgtaaggtatcgcgagatgataggattttttcgcgaaggagaagcgcgtttttttttttggcgggggatttggttagaaggttgggtcggtatcggttgtgaggagttagttcgcggtattgtaggttttgataggagggattcggttttcgggtgagtgtttaggtatgttagcggaacggttcgcgggtagcggcggtgagtgaggaaaattttttgggcgcgggtggtagtttgcggggttgaggtgggtaagtatggagttgcggcggagtttcggggagggagtcgatttcgggtagggattgaggaggaaaggagggttgggaaattgtacggtgagtggaggatatttcggaatcgtacgtattagtatgtcggtgaagattttttataggtaattgtattttttcgagtatttcgagttgtaaattgtggtttaggttatttg

SEQ ID NO: 29554 - DNA, 505 bp, Artificial Sequence
  chemically treated genomic DNA (Homo sapiens) CpG-island No: 29554
caaataacctaaaccacaatttacaactcgaaatactcgaaaaaatacaattacctataaaaaatcttcaccgacatactaatacgtacgattccgaaatatcctccactcaccgtacaatttcccaaccctcctttcctcctcaatccctacccgaaatcgactccctccccgaaactccgccgcaactccatacttacccacctcaaccccgcaaactaccacccgcgcccaaaaaattttcctcactcaccgccgctacccgcgaaccgttccgctaacatacctaaacactcacccgaaaaccgaatccctcctatcaaaacctacaataccgcgaactaactcctcacaaccgataccgacccaaccttctaaccaaatcccccgccaaaaaaaaaaacgcgcttctccttcgcgaaaaaatcctatcatctcgcgataccttacattccccacccgccctcccgccccgatacgcgaaatttaacgcaacttacgattt

SEQ ID NO: 29555 - DNA, 505 bp, Artificial Sequence
  chemically treated genomic DNA (Homo sapiens) CpG-island No: 29555
taagtggtttggattatagtttataattcgggatgttcgggaaaatgtagttgtttatgagaaatttttatcggtatgttaatacgtgcgatttcggggtgttttttatttatcgtgtagttttttaattttttttttttttttagtttttgttcggggtcggtttttttttcgaaatttcgtcgtagttttatgtttgtttattttagtttcgtaggttgttattcgcgtttaaaaggttttttttatttatcgtcgttgttcgcgggtcgtttcgttggtatgtttggatatttattcgggaatcgggttttttttattagagtttgtaatgtcgcgagttaattttttataatcggtgtcggtttagttttttagttaaatttttcgttagggaaaaaagcgcgtttttttttcgcgggaaaattttgttatttcgcgatattttatattttttattcgttttttcgtttcgatgcgcgagatttggcgtagtttgcggttt

SEQ ID NO: 29556 - DNA, 505 bp, Artificial Sequence
  chemically treated genomic DNA (Homo sapiens) CpG-island No: 29556
aaaccgcaaactacgccaaatctcgcgcatcgaaacgaaaaaacgaataaaaaatataaaatatcgcgaaataacaaaattttcccgcgaaaaaaaaacgcgcttttttccctaacgaaaaatttaactaaaaaactaaaccgacaccgattataaaaaattaactcgcgacattacaaactctaataaaaaaaacccgattcccgaataaatatccaaacataccaacgaaacgacccgcgaacaacgacgataaataaaaaaaaccttttaaacgcgaataacaacctacgaaactaaaataaacaaacataaaactacgacgaaatttcgaaaaaaaaaccgaccccgaacaaaaactaaaaaaaaaaaaaaaattaaaaaactacacgataaataaaaaacaccccgaaatcgcacgtattaacataccgataaaaatttctcataaacaactacattttcccgaacatcccgaattataaactataatccaaaccactta

SEQ ID NO: 29557 - DNA, 522 bp, Artificial Sequence
  chemically treated genomic DNA (Homo sapiens) CpG-island No: 29557
agaagtcgcgcggtcgcgttgagtcgtcggttagttaggtggcgtatttatttagtaaggcggggttgttgaatttttaagtttcgttgtaggtcgtgtattgggggtggttgtacgggttgtcggagaattcgttttttgcgggagggtcggggagtggggattagacgtttgtaagttagggcggattttacgagttcggtcggtggttttttcgttcgtttttttcgtcgggttttaggcgtaggtgtcgcgggtagggtaatggtcgtggcgggcgggtcgggcggaggtggggcgattatcgcgttcgcgtggagagagttcggggaggcgggaggtatcgacgcgttcgtatatttacgggcgggatttgtgggtcggtgttcgtttagggttttttagcggaggcgttcgcggttatttacgaagggtttgtattggggcgcgtttattttgtcgcgttgggggttagggtttttatagatgttatttcggttttaggaggtatggtttttaatg

SEQ ID NO: 29558 - DNA, 522 bp, Artificial Sequence
  chemically treated genomic DNA (Homo sapiens) CpG-island No: 29558
cattaaaaaccatacctcctaaaaccgaaataacatctataaaaaccctaacccccaacgcgacaaaataaacgcgccccaatacaaacccttcgtaaataaccgcgaacgcctccgctaaaaaaccctaaacgaacaccgacccacaaatcccgcccgtaaatatacgaacgcgtcgatacctcccgcctccccgaactctctccacgcgaacgcgataatcgccccacctccgcccgacccgcccgccacgaccattaccctacccgcgacacctacgcctaaaacccgacgaaaaaaacgaacgaaaaaaccaccgaccgaactcgtaaaatccgccctaacttacaaacgtctaatccccactccccgaccctcccgcaaaaaacgaattctccgacaacccgtacaaccacccccaatacacgacctacaacgaaacttaaaaattcaacaaccccgccttactaaataaatacgccacctaactaaccgacgactcaacgcgaccgcgcgacttct

SEQ ID NO: 29559 - DNA, 522 bp, Artificial Sequence
  chemically treated genomic DNA (Homo sapiens) CpG-island No: 29559
tattaggggttatgttttttagaatcggagtggtatttataaaggttttggtttttagcgcgatagggtggacgcgttttaatataaatttttcgtgggtggtcgcgagcgttttcgttgggaagttttgggcgggtatcggtttataggtttcgttcgtgggtgtgcgagcgcgtcggtgtttttcgttttttcgggttttttttacgcggacgcggtgatcgttttattttcgttcggttcgttcgttacggttattattttgttcgcgatatttgcgtttgagattcggcgggaggagcgggcggagaagttatcggtcggattcgtggggttcgttttggtttgtaggcgtttgatttttatttttcgattttttcgtagggagcgagtttttcggtaattcgtatagttatttttagtatacggtttataacgaggtttggagatttagtaatttcgttttattaagtgagtacgttatttggttggtcggcggtttagcgcggtcgcgcggttttt

SEQ ID NO: 29560 - DNA, 522 bp, Artificial Sequence
  chemically treated genomic DNA (Homo sapiens) CpG-island No: 29560
aaaaaccgcgcgaccgcgctaaaccgccgaccaaccaaataacgtactcacttaataaaacgaaattactaaatctccaaacctcgttataaaccgtatactaaaaataactatacgaattaccgaaaaactcgctccctacgaaaaaatcgaaaaataaaaatcaaacgcctacaaaccaaaacgaaccccacgaatccgaccgataacttctccgcccgctcctcccgccgaatctcaaacgcaaatatcgcgaacaaaataataaccgtaacgaacgaaccgaacgaaaataaaacgatcaccgcgtccgcgtaaaaaaaacccgaaaaaacgaaaaacaccgacgcgctcgcacacccacgaacgaaacctataaaccgatacccgcccaaaacttcccaacgaaaacgctcgcgaccacccacgaaaaatttatattaaaacgcgtccaccctatcgcgctaaaaaccaaaacctttataaataccactccgattctaaaaaacataacccctaata

SEQ ID NO: 29561 - DNA, 627 bp, Artificial Sequence
  chemically treated genomic DNA (Homo sapiens) CpG-island No: 29561
gattagggttttttagtagttcggttcgcgagttggtatcgttcggaatttcgtttacgtttagttcggggcggcgtttggaggcggagtcgttcgttgggttaaatggggtagaggtcgggaggggtgggggtttttcgcgtcgtagttatggagtagtttcgcgtcgtcgttcgtttgtagattgttttgggttatttcggtcgtttttcggtcggggttgtcgtattttttgggttgcgcggggttcgggttggattcggcgtcggcgtcgtcgtttgagtggtggttttggttcgggtggaggtttcggggtcgtacgtttcgtagttttagcgttttttcgtttagcgtcgcgttttcgtttgggtcgcgttttttttaggagtcggggagcggggaagaggttgcgtttttcgaggatacgcgcggtcgttttggggtcggggtaattgtcgcgttgttttgtttttcgggatttttgggggtttttgtttttttttttgtggagacgtcgttttatcggcggcgcgtgatttcggtagttgtttagagatttagagatgtttaattataggcgtacggtgtataggcgcgtagggttgtttggaatcggtttaggtaggt

SEQ ID NO: 29562 - DNA, 627 bp, Artificial Sequence
  chemically treated genomic DNA (Homo sapiens) CpG-island No: 29562
acctacctaaaccgattccaaacaaccctacgcgcctatacaccgtacgcctataattaaacatctctaaatctctaaacaactaccgaaatcacgcgccgccgataaaacgacgtctccacaaaaaaaaaaacaaaaacccccaaaaatcccgaaaaacaaaacaacgcgacaattaccccgaccccaaaacgaccgcgcgtatcctcgaaaaacgcaacctcttccccgctccccgactcctaaaaaaaacgcgacccaaacgaaaacgcgacgctaaacgaaaaaacgctaaaactacgaaacgtacgaccccgaaacctccacccgaaccaaaaccaccactcaaacgacgacgccgacgccgaatccaacccgaaccccgcgcaacccaaaaaatacgacaaccccgaccgaaaaacgaccgaaataacccaaaacaatctacaaacgaacgacgacgcgaaactactccataactacgacgcgaaaaacccccacccctcccgacctctaccccatttaacccaacgaacgactccgcctccaaacgccgccccgaactaaacgtaaacgaaattccgaacgataccaactcgcgaaccgaactactaaaaaaccctaatc

SEQ ID NO: 29563 - DNA, 627 bp, Artificial Sequence
  chemically treated genomic DNA (Homo sapiens) CpG-island No: 29563
gtttgtttgggtcggttttaggtagttttgcgcgtttgtgtatcgtgcgtttgtgattggatatttttgggtttttggatagttgtcggggttacgcgtcgtcggtgaaacgacgtttttataaagagaggagtagaggtttttagggatttcggagggtagggtaacgcggtaattgtttcgattttagggcggtcgcgcgtgttttcgggggacgtagtttttttttcgtttttcggtttttggaagagacgcgatttaggcggggacgcggcgttgagcgaggaggcgttggggttgcgaagcgtgcgatttcgaggtttttattcggattagggttattatttaggcggcggcgtcggcgtcggatttagttcgagtttcgcgtagtttaaaggatacgatagtttcggtcgaggggcggtcgaggtggtttagaataatttgtagacgggcggcggcgcgaagttgttttatggttgcggcgcggggaatttttatttttttcggtttttgttttatttagtttagcgggcggtttcgtttttaggcgtcgtttcggattggacgtaagcgggatttcgggcggtgttagttcgcgggtcgggttgttggggagttttagtt

SEQ ID NO: 29564 - DNA, 627 bp, Artificial Sequence
  chemically treated genomic DNA (Homo sapiens) CpG-island No: 29564
aactaaaactccccaacaacccgacccgcgaactaacaccgcccgaaatcccgcttacgtccaatccgaaacgacgcctaaaaacgaaaccgcccgctaaactaaataaaacaaaaaccgaaaaaaataaaaattccccgcgccgcaaccataaaacaacttcgcgccgccgcccgtctacaaattattctaaaccacctcgaccgcccctcgaccgaaactatcgtatcctttaaactacgcgaaactcgaactaaatccgacgccgacgccgccgcctaaataataaccctaatccgaataaaaacctcgaaatcgcacgcttcgcaaccccaacgcctcctcgctcaacgccgcgtccccgcctaaatcgcgtctcttccaaaaaccgaaaaacgaaaaaaaaactacgtcccccgaaaacacgcgcgaccgccctaaaatcgaaacaattaccgcgttaccctaccctccgaaatccctaaaaacctctactcctctctttataaaaacgtcgtttcaccgacgacgcgtaaccccgacaactatccaaaaacccaaaaatatccaatcacaaacgcacgatacacaaacgcgcaaaactacctaaaaccgacccaaacaaac

SEQ ID NO: 29565 - DNA, 551 bp, Artificial Sequence
  chemically treated genomic DNA (Homo sapiens) CpG-island No: 29565
  unsure (187, 239)
cggagacgtttgcggcggtttcggagatatcggaaggagtcgcggttgttgcgggaagtggttagtttaggaggcggatttttcgagggtagcgttgcggggtcgtttttcggtttttttgacgcgatattgttttttttcgagagttgagaaggaaaagaggagtttgcgaaggtgcggttgtagntcgttgttggtcgagttggcgggtttcgcgggtaagatcgtgaaggtgagtncggcgttgttggaaggggcgcggggtttaagggcgtttcgttcgcgttcggggtacggtttttgttttcgttttcgcgcgttggggttgcggtcgttgtagtagttttttttttttggttttgggtggcggcgggttcgcgggcgggaagaaggttttggtttttcggtgttttgcgttgtagagataatttagtggtcgttttgttaacggtcggtggaggatgggaatcggtcgttgatttgaggaagggtttttaggggtttttttttggaagcgggaggtgtaggtgagttcgagaagcgggggtttt

SEQ ID NO: 29566 - DNA, 551 bp, Artificial Sequence
  chemically treated genomic DNA (Homo sapiens) CpG-island No: 29566
  unsure (313, 365)
aaaacccccgcttctcgaactcacctacacctcccgcttccaaaaaaaaacccctaaaaacccttcctcaaatcaacgaccgattcccatcctccaccgaccgttaacaaaacgaccactaaattatctctacaacgcaaaacaccgaaaaaccaaaaccttcttcccgcccgcgaacccgccgccacccaaaaccaaaaaaaaaaaactactacaacgaccgcaaccccaacgcgcgaaaacgaaaacaaaaaccgtaccccgaacgcgaacgaaacgcccttaaaccccgcgccccttccaacaacgccgnactcaccttcacgatcttacccgcgaaacccgccaactcgaccaacaacganctacaaccgcaccttcgcaaactcctcttttccttctcaactctcgaaaaaaaacaatatcgcgtcaaaaaaaccgaaaaacgaccccgcaacgctaccctcgaaaaatccgcctcctaaactaaccacttcccgcaacaaccgcgactccttccgatatctccgaaaccgccgcaaacgtctccg

SEQ ID NO: 29567 - DNA, 551 bp, Artificial Sequence
  chemically treated genomic DNA (Homo sapiens) CpG-island No: 29567
  unsure (313, 365)
agagttttcgtttttcgggtttatttgtatttttcgtttttagggaagaatttttgaggatttttttttaaattaacgatcggtttttattttttatcgatcgttgatagggcgattattagattatttttgtaacgtagagtatcgaggggttaaggtttttttttcgttcgcgaattcgtcgttatttaggattaagaaaaagaggttgttgtagcggtcgtaattttagcgcgcggaagcgagaatagagatcgtatttcggacgcgagcgaaacgtttttgggtttcgcgttttttttagtagcgtcgngtttatttttacggttttgttcgcgggattcgttagttcgattaataacggnttgtagtcgtattttcgtaagtttttttttttttttttagttttcggagaggggtagtgtcgcgttaggagggtcggaaaacggtttcgtagcgttgttttcggggggttcgttttttgaattggttatttttcgtagtagtcgcggtttttttcggtgttttcggggtcgtcgtaggcgttttcg

SEQ ID NO: 29568 - DNA, 551 bp, Artificial Sequence
  chemically treated genomic DNA (Homo sapiens) CpG-island No: 29568
  unsure (187, 239)
cgaaaacgcctacgacgaccccgaaaacaccgaaaaaaaccgcgactactacgaaaaataaccaattcaaaaaacgaaccccccgaaaacaacgctacgaaaccgttttccgaccctcctaacgcgacactacccctctccgaaaactaaaaaaaaaaaaaaaaacttacgaaaatacgactacaanccgttattaatcgaactaacgaatcccgcgaacaaaaccgtaaaaataaacncgacgctactaaaaaaaacgcgaaacccaaaaacgtttcgctcgcgtccgaaatacgatctctattctcgcttccgcgcgctaaaattacgaccgctacaacaacctctttttcttaatcctaaataacgacgaattcgcgaacgaaaaaaaaaccttaacccctcgatactctacgttacaaaaataatctaataatcgccctatcaacgatcgataaaaaataaaaaccgatcgttaatttaaaaaaaaatcctcaaaaattcttccctaaaaacgaaaaatacaaataaacccgaaaaacgaaaactct

SEQ ID NO: 29569 - DNA, 504 bp, Artificial Sequence
  chemically treated genomic DNA (Homo sapiens) CpG-island No: 29569
gggcgcgtttttgttcggcgcgtcgatttcgggtattagagtcgttagtttcgtttttcgggtagggggcgggcgtggaaacgtttaagaggatgttgagtgatagaggcgtaggtcgcgtttcgattttgttatgtttttttttagttgtttttttcgttagtcgtcgcgtttttaacgttttttttttttagtagattgggttttcggagtagtagcggtcggtcgcgtagacgtaaagtttcggggatggaggattagattttaagatggcgttagcggtttcgcgtttgcggtttttataaggtttttttgggagttgtagttcggttagcgggttatatgcgaggtatttagcgcgattttcgttttaaattcggttgtatatttggtttacggcgagtgcggagtagaaagtattattggcgcgggttatagttagtcgtttttatttgttaagattttatttgaaagtcgtattagtgtttttaaggattttttcgt

SEQ ID NO: 29570 - DNA, 504 bp, Artificial Sequence
  chemically treated genomic DNA (Homo sapiens) CpG-island No: 29570
acgaaaaaatccttaaaaacactaatacgactttcaaataaaatcttaacaaataaaaacgactaactataacccgcgccaataatactttctactccgcactcgccgtaaaccaaatatacaaccgaatttaaaacgaaaatcgcgctaaatacctcgcatataacccgctaaccgaactacaactcccaaaaaaaccttataaaaaccgcaaacgcgaaaccgctaacgccatcttaaaatctaatcctccatccccgaaactttacgtctacgcgaccgaccgctactactccgaaaacccaatctactaaaaaaaaaaaacgttaaaaacgcgacgactaacgaaaaaaacaactaaaaaaaaacataacaaaatcgaaacgcgacctacgcctctatcactcaacatcctcttaaacgtttccacgcccgccccctacccgaaaaacgaaactaacgactctaatacccgaaatcgacgcgccgaacaaaaacgcgccc

SEQ ID NO: 29571 - DNA, 504 bp, Artificial Sequence
  chemically treated genomic DNA (Homo sapiens) CpG-island No: 29571
gcgggaggatttttgagggtattggtgcgatttttaggtgaggttttagtagatgaaagcggttggttgtggttcgcgttagtagtgttttttgtttcgtattcgtcgtgagttaggtgtgtaatcggatttggggcgagggtcgcgttggatatttcgtatgtagttcgttgatcggattatagtttttagaagagttttgtggaggtcgtagacgcgaagtcgttggcgttattttgaaatttgattttttattttcgaggttttgcgtttgcgcggtcggtcgttgttgtttcgggagtttagtttgttaaaaggggaggacgttgaggacgcggcggttggcgggagagatagttggggagagatatggtagggtcggagcgcggtttgcgtttttgttatttagtatttttttaggcgtttttacgttcgttttttgttcgaggggcggggttgacggttttggtattcggagtcggcgcgtcgggtaggggcgcgttt

SEQ ID NO: 29572 - DNA, 504 bp, Artificial Sequence
  chemically treated genomic DNA (Homo sapiens) CpG-island No: 29572
aaacgcgcccctacccgacgcgccgactccgaataccaaaaccgtcaaccccgcccctcgaacaaaaaacgaacgtaaaaacgcctaaaaaaatactaaataacaaaaacgcaaaccgcgctccgaccctaccatatctctccccaactatctctcccgccaaccgccgcgtcctcaacgtcctccccttttaacaaactaaactcccgaaacaacaacgaccgaccgcgcaaacgcaaaacctcgaaaataaaaaatcaaatttcaaaataacgccaacgacttcgcgtctacgacctccacaaaactcttctaaaaactataatccgatcaacgaactacatacgaaatatccaacgcgaccctcgccccaaatccgattacacacctaactcacgacgaatacgaaacaaaaaacactactaacgcgaaccacaaccaaccgctttcatctactaaaacctcacctaaaaatcgcaccaataccctcaaaaatcctcccgc

SEQ ID NO: 29573 - DNA, 636 bp, Artificial Sequence
  chemically treated genomic DNA (Homo sapiens) CpG-island No: 29573
gcgagcgagcgagcgtttagcgtttcgggttgagtgagggaggaggttcggtggagaggttgtaagtgggcgagggttgggcgtagcgattttattggagtcggtcggtggacgtttcggcggaatcgtttagagtttttgttttgcgttatttattcgaacgcgtttgcgcgttgcgaatttcgtttcggtgttatttgttggagtttttcgttcgcgtagtcgtgtatatgcgtattgtcggtcgtcggttagtggggttacgtgttgcgcgcgagttattttttttgttggcgttttttgtcgttatcgttgcggtttagggttcgcgggagtttagggcggtgtcgggtgagataaggtcggggtttggttcggatttatcgcgaggtatgtcgcgttttcgtttttcggcgtggggagttttggggatcgcgggggtagatggaggcggcgcgggcggggtagggcggcgcgtttcgtagcgcgggagtgggggtttcgtgtcgtttttttttacggatttcgttgtttatttttcgtgaggtttggttgtgttatcggggtcgtagttttggagtgtttggtttcgtttttatttgagtcggagttattttcgaaatttgatatttagag

SEQ ID NO: 29574 - DNA, 636 bp, Artificial Sequence
  chemically treated genomic DNA (Homo sapiens) CpG-island No: 29574
ctctaaatatcaaatttcgaaaataactccgactcaaataaaaacgaaaccaaacactccaaaactacgaccccgataacacaaccaaacctcacgaaaaataaacaacgaaatccgtaaaaaaaaacgacacgaaacccccactcccgcgctacgaaacgcgccgccctaccccgcccgcgccgcctccatctacccccgcgatccccaaaactccccacgccgaaaaacgaaaacgcgacatacctcgcgataaatccgaaccaaaccccgaccttatctcacccgacaccgccctaaactcccgcgaaccctaaaccgcaacgataacgacaaaaaacgccaacaaaaaaaataactcgcgcgcaacacgtaaccccactaaccgacgaccgacaatacgcatatacacgactacgcgaacgaaaaactccaacaaataacaccgaaacgaaattcgcaacgcgcaaacgcgttcgaataaataacgcaaaacaaaaactctaaacgattccgccgaaacgtccaccgaccgactccaataaaatcgctacgcccaaccctcgcccacttacaacctctccaccgaacctcctccctcactcaacccgaaacgctaaacgctcgctcgctcgc

SEQ ID NO: 29575 - DNA, 636 bp, Artificial Sequence
  chemically treated genomic DNA (Homo sapiens) CpG-island No: 29575
ttttgagtgttagatttcgggagtgatttcggtttaggtgaaagcgaggttagatattttaaggttgcggtttcgatgatatagttaggttttacggaaggtgggtaacggagttcgtagggggaggcgatacgggatttttattttcgcgttgcgggacgcgtcgttttgtttcgttcgcgtcgtttttatttattttcgcggtttttagaattttttacgtcgaggggcggggacgcggtatatttcgcggtgaattcgagttaaatttcggttttgttttattcggtatcgttttgggttttcgcgggttttgggtcgtagcggtagcgataggaagcgttagtaggggaggtggttcgcgcgtaatacgtgattttattggtcggcggtcggtagtgcgtatgtgtacggttacgcgggcggggggttttaataggtgatatcggggcggggttcgtagcgcgtaggcgcgttcgggtaggtagcgtaggataggaattttgggcggtttcgtcggggcgtttatcggtcggttttaatgaggtcgttgcgtttagttttcgtttatttgtagtttttttatcgaatttttttttttatttagttcgaggcgttgggcgttcgttcgttcgt

SEQ ID NO: 29576 - DNA, 636 bp, Artificial Sequence
  chemically treated genomic DNA (Homo sapiens) CpG-island No: 29576
acgaacgaacgaacgcccaacgcctcgaactaaataaaaaaaaaaattcgataaaaaaactacaaataaacgaaaactaaacgcaacgacctcattaaaaccgaccgataaacgccccgacgaaaccgcccaaaattcctatcctacgctacctacccgaacgcgcctacgcgctacgaaccccgccccgatatcacctattaaaaccccccgcccgcgtaaccgtacacatacgcactaccgaccgccgaccaataaaatcacgtattacgcgcgaaccacctcccctactaacgcttcctatcgctaccgctacgacccaaaacccgcgaaaacccaaaacgataccgaataaaacaaaaccgaaatttaactcgaattcaccgcgaaatataccgcgtccccgcccctcgacgtaaaaaattctaaaaaccgcgaaaataaataaaaacgacgcgaacgaaacaaaacgacgcgtcccgcaacgcgaaaataaaaatcccgtatcgcctccccctacgaactccgttacccaccttccgtaaaacctaactatatcatcgaaaccgcaaccttaaaatatctaacctcgctttcacctaaaccgaaatcactcccgaaatctaacactcaaaa

SEQ ID NO: 29577 - DNA, 624 bp, Artificial Sequence
  chemically treated genomic DNA (Homo sapiens) CpG-island No: 29577
cgtttagttttcgttatcggagcgtttcgttcgagattattgattttttggggtttcgtagttttgttttcgaacgttaaggtcgcggtgcgtcggggtagcgaacggttaggttcgaaatttcgtttcgtagttaaacgttcggttcgttattttgcgtttagttttagtcgtcgggtttcgtttgggtttttttttttgggaatatcgggtatcggtggtttcgtttttatttgcgcgtcgtattttcgggaataatagtttttttttcgagtattatagttagatatggtttagattagggattcgcgcggtttttaattttcgtacggttttgcgcgcggcgtttagtttgggatacggtagcgaggtcgtaaatgtaattaggcggcgttgagggtagttcgggggcggggcgaacggggcgggggtcggggtttggtaaggtttcgtcggttgagatatttagcggcgtatttgatttttcgggaggtaaggttaacgtggttggaggcggggttgggttggggggcgggggtttaagtttgagagatttaaaggtatcgttagcgtttgggggcgtggttaattatgcgggaggcggggttttgatgttggatatta

SEQ ID NO: 29578 - DNA, 624 bp, Artificial Sequence
  chemically treated genomic DNA (Homo sapiens) CpG-island No: 29578
taatatccaacatcaaaaccccgcctcccgcataattaaccacgcccccaaacgctaacgatacctttaaatctctcaaacttaaacccccgccccccaacccaaccccgcctccaaccacgttaaccttacctcccgaaaaatcaaatacgccgctaaatatctcaaccgacgaaaccttaccaaaccccgacccccgccccgttcgccccgcccccgaactaccctcaacgccgcctaattacatttacgacctcgctaccgtatcccaaactaaacgccgcgcgcaaaaccgtacgaaaattaaaaaccgcgcgaatccctaatctaaaccatatctaactataatactcgaaaaaaaaactattattcccgaaaatacgacgcgcaaataaaaacgaaaccaccgatacccgatattcccaaaaaaaaaaacccaaacgaaacccgacgactaaaactaaacgcaaaataacgaaccgaacgtttaactacgaaacgaaatttcgaacctaaccgttcgctaccccgacgcaccgcgaccttaacgttcgaaaacaaaactacgaaaccccaaaaaatcaataatctcgaacgaaacgctccgataacgaaaactaaacg

SEQ ID NO: 29579 - DNA, 624 bp, Artificial Sequence
  chemically treated genomic DNA (Homo sapiens) CpG-island No: 29579
tgatgtttagtattaaggtttcgtttttcgtatggttggttacgtttttagacgttagcggtgtttttaggttttttagatttgaattttcgttttttaatttagtttcgtttttaattacgttggttttgtttttcgggaagttaggtgcgtcgttggatattttagtcggcggggttttattagatttcggttttcgtttcgttcgtttcgttttcgggttgtttttagcgtcgtttgattgtatttgcggtttcgttgtcgtattttaggttaagcgtcgcgcgtaaagtcgtgcggagattggaggtcgcgcgggtttttggtttgggttatgtttggttgtgatgttcgggagggagattgttgttttcggaaatgcggcgcgtaggtaagggcggggttatcggtgttcggtatttttaggaggagaggtttaggcgggattcggcggttggagttgggcgtagggtagcgggtcgggcgtttagttgcggggcggggtttcgggtttggtcgttcgttatttcggcgtatcgcgattttggcgttcggaagtaaggttgcgaggttttaggagattagtggtttcgggcggggcgtttcgatggcgggagttgggcg

SEQ ID NO: 29580 - DNA, 624 bp, Artificial Sequence
  chemically treated genomic DNA (Homo sapiens) CpG-island No: 29580
cgcccaactcccgccatcgaaacgccccgcccgaaaccactaatctcctaaaacctcgcaaccttacttccgaacgccaaaatcgcgatacgccgaaataacgaacgaccaaacccgaaaccccgccccgcaactaaacgcccgacccgctaccctacgcccaactccaaccgccgaatcccgcctaaacctctcctcctaaaaataccgaacaccgataaccccgcccttacctacgcgccgcatttccgaaaacaacaatctccctcccgaacatcacaaccaaacataacccaaaccaaaaacccgcgcgacctccaatctccgcacgactttacgcgcgacgcttaacctaaaatacgacaacgaaaccgcaaatacaatcaaacgacgctaaaaacaacccgaaaacgaaacgaacgaaacgaaaaccgaaatctaataaaaccccgccgactaaaatatccaacgacgcacctaacttcccgaaaaacaaaaccaacgtaattaaaaacgaaactaaattaaaaaacgaaaattcaaatctaaaaaacctaaaaacaccgctaacgtctaaaaacgtaaccaaccatacgaaaaacgaaaccttaatactaaacatca

SEQ ID NO: 29581 - DNA, 1116 bp, Artificial Sequence
  chemically treated genomic DNA (Homo sapiens) CpG-island No: 29581
ggcgttgtttattttggcggtcggcgcggacggttcgtttcggtagtttcggagcgagtttaggtggtacgtgttagttaggtagtttcggttcggaggagagcgtcgcggggtacgggggcgttttttggagtcgcggtttggaggagtaggtgttttcgggtttttcggaggtttaggcggcggcgtggttggagacggttcgcggcgttcggatggtggttttggagcgcgggggttgcgggcgtagttttaatcgattggttcgttttgtcgacggtattcgcgtttgcgtgcgttacggtattaattcggagtagatttagggcgaggttttgttttattatttggcgcgtttgttgggtttttagcgttacgtgtcgtcgttggtattggttcgggtggaggttcggggcgcgtagtgggcgtaggtgtaggaggagttgcgcgttgcgtattggatcgagggtagcgtggtgagtttgatacgttggttgtttaattttacggacgtggtggtgttcgcgttttggcgttcggaggacggtcgtttgcgtttttttcgggatgtcgggggtgagttggttaattttagttaggcggagttggtggatttagtataatggatcgatttaatttttttcgattatttgacggttaatttcgatcggttcgtaagtaatttttttagtttgtagtgggattcgcgcgttatgtagcgtgttattagtaatttgtatcgcggttcgggcggggcgttggtttttttggataatgaggcgggtttggtgtacggttatcgggtagtaggtatgtgggataagtataacgagtcgttgttgtagttagtgtgcgtgtttcgcgagcggatcgcgcggcgcgttttggagttgtatcgcggataggacgtcgcggttcggttgttgcgtttttatcggcgttacgagtttcgttttttcgagttggtcgtttttgtagatttttacgtttagttgttatagcgtcgtttcgattttttcgttaagtatattttgtattgtaaggttaagtacggtcgtcggtttgggatttagtgttatcgggaggaaaagagagagatttggggttggggtatgg

SEQ ID NO: 29582 - DNA, 1116 bp, Artificial Sequence
  chemically treated genomic DNA (Homo sapiens) CpG-island No: 29582
ccataccccaaccccaaatctctctcttttcctcccgataacactaaatcccaaaccgacgaccgtacttaaccttacaatacaaaatatacttaacgaaaaaatcgaaacgacgctataacaactaaacgtaaaaatctacaaaaacgaccaactcgaaaaaacgaaactcgtaacgccgataaaaacgcaacaaccgaaccgcgacgtcctatccgcgatacaactccaaaacgcgccgcgcgatccgctcgcgaaacacgcacactaactacaacaacgactcgttatacttatcccacatacctactacccgataaccgtacaccaaacccgcctcattatccaaaaaaaccaacgccccgcccgaaccgcgatacaaattactaataacacgctacataacgcgcgaatcccactacaaactaaaaaaattacttacgaaccgatcgaaattaaccgtcaaataatcgaaaaaaattaaatcgatccattatactaaatccaccaactccgcctaactaaaattaaccaactcacccccgacatcccgaaaaaaacgcaaacgaccgtcctccgaacgccaaaacgcgaacaccaccacgtccgtaaaattaaacaaccaacgtatcaaactcaccacgctaccctcgatccaatacgcaacgcgcaactcctcctacacctacgcccactacgcgccccgaacctccacccgaaccaataccaacgacgacacgtaacgctaaaaacccaacaaacgcgccaaataataaaacaaaacctcgccctaaatctactccgaattaataccgtaacgcacgcaaacgcgaataccgtcgacaaaacgaaccaatcgattaaaactacgcccgcaacccccgcgctccaaaaccaccatccgaacgccgcgaaccgtctccaaccacgccgccgcctaaacctccgaaaaacccgaaaacacctactcctccaaaccgcgactccaaaaaacgcccccgtaccccgcgacgctctcctccgaaccgaaactacctaactaacacgtaccacctaaactcgctccgaaactaccgaaacgaaccgtccgcgccgaccgccaaaataaacaacgcc

SEQ ID NO: 29583 - DNA, 1116 bp, Artificial Sequence
  chemically treated genomic DNA (Homo sapiens) CpG-island No: 29583
ttatattttagttttagatttttttttttttttttcggtgatattaagttttagatcggcggtcgtatttggttttatagtgtaaaatgtgtttggcgaggaagtcgaggcggcgttgtagtagttgagcgtgggggtttgtaagggcggttagttcggggaagcgaggttcgtggcgtcggtagaggcgtagtagtcgggtcgcggcgttttgttcgcggtgtagttttaggacgcgtcgcgcggttcgttcgcggaatacgtatattgattgtaatagcggttcgttatatttgttttatatgtttgttattcggtagtcgtgtattaagttcgttttattgtttagaaagattagcgtttcgttcggatcgcggtgtaggttgttggtggtacgttgtatgacgcgcgggttttattgtaggttgaagaggttgtttacgagtcggtcgaagttggtcgttaggtagtcgaaaaggattaagtcggtttattgtattaggtttattagtttcgtttggttgaggttggttagtttattttcggtatttcggagggggcgtagacggtcgtttttcgagcgttagggcgcgggtattattacgttcgtgaggttgggtagttagcgtgttaggtttattacgttgttttcggtttagtgcgtagcgcgtagttttttttgtatttgcgtttattgcgcgtttcgagtttttattcgagttagtgttagcggcggtacgtggcgttggaggtttagtaggcgcgttagatagtaagatagggtttcgttttgaatttgtttcgggttgatgtcgtagcgtacgtaggcgcgggtgtcgtcggtaaaacgggttagtcggttggagttgcgttcgtaattttcgcgttttagggttattattcgggcgtcgcgagtcgtttttagttacgtcgtcgtttgggttttcgaaaagttcgggggtatttgtttttttaggtcgcggttttagaagacgttttcgtgtttcgcggcgttttttttcgggtcggggttgtttggttgatacgtgttatttgggttcgtttcgggattgtcggggcgggtcgttcgcgtcggtcgttagggtgagtagcgtt

SEQ ID NO: 29584 - DNA, 1116 bp, Artificial Sequence
  chemically treated genomic DNA (Homo sapiens) CpG-island No: 29584
aacgctactcaccctaacgaccgacgcgaacgacccgccccgacaatcccgaaacgaacccaaataacacgtatcaaccaaacaaccccgacccgaaaaaaaacgccgcgaaacacgaaaacgtcttctaaaaccgcgacctaaaaaaacaaatacccccgaacttttcgaaaacccaaacgacgacgtaactaaaaacgactcgcgacgcccgaataataaccctaaaacgcgaaaattacgaacgcaactccaaccgactaacccgttttaccgacgacacccgcgcctacgtacgctacgacatcaacccgaaacaaattcaaaacgaaaccctatcttactatctaacgcgcctactaaacctccaacgccacgtaccgccgctaacactaactcgaataaaaactcgaaacgcgcaataaacgcaaatacaaaaaaaactacgcgctacgcactaaaccgaaaacaacgtaataaacctaacacgctaactacccaacctcacgaacgtaataatacccgcgccctaacgctcgaaaaacgaccgtctacgccccctccgaaataccgaaaataaactaaccaacctcaaccaaacgaaactaataaacctaatacaataaaccgacttaatccttttcgactacctaacgaccaacttcgaccgactcgtaaacaacctcttcaacctacaataaaacccgcgcgtcatacaacgtaccaccaacaacctacaccgcgatccgaacgaaacgctaatctttctaaacaataaaacgaacttaatacacgactaccgaataacaaacatataaaacaaatataacgaaccgctattacaatcaatatacgtattccgcgaacgaaccgcgcgacgcgtcctaaaactacaccgcgaacaaaacgccgcgacccgactactacgcctctaccgacgccacgaacctcgcttccccgaactaaccgcccttacaaacccccacgctcaactactacaacgccgcctcgacttcctcgccaaacacattttacactataaaaccaaatacgaccgccgatctaaaacttaatatcaccgaaaaaaaaaaaaaaaaatctaaaactaaaatataa

SEQ ID NO: 29585 - DNA, 656 bp, Artificial Sequence
  chemically treated genomic DNA (Homo sapiens) CpG-island No: 29585
aattttgtacggcgttggagcgtggaagggtaaggaggagttaggggaggcggtgtgtagggttgagaacggagggagcgaattggcgtcgtggatttgcgggttttcgggcgggttgtattagggtagtggggagagggtcgggggtatcgcgaggtcggggcgtcggatattacgtatgcgcggggttgggagtttagcggggcgcgcggttgtagtagtttgggtagatcgtttcggtttcgttcggtgtcggttgcggtcgttttcgttttagcgcggcggtcgggtttatattagtttttttttagttattcggaattcggtagttcggttagattcgtcgaggtcgcgacgtcggcgtcgatagcggttgcgacggttttgggagcgcgtgaggtttcggggtcgcggcggcgattggtcggtcgcggcgttcgtttttagaatgtagcgtatggcgcgttattgaagagagattatgatggcggcggcgttggggtttttagaagtgatcgtttagttggagaacgcggttaaagttttgatggtgaggacgtcgcgttttttagatttcgggattcgcgggttttcggtcggttttgttattttaggttttgttgttcgttgggttggcgattggtaagggtttgtag

SEQ ID NO: 29586 - DNA, 656 bp, Artificial Sequence
  chemically treated genomic DNA (Homo sapiens) CpG-island No: 29586
ctacaaacccttaccaatcgccaacccaacgaacaacaaaacctaaaataacaaaaccgaccgaaaacccgcgaatcccgaaatctaaaaaacgcgacgtcctcaccatcaaaactttaaccgcgttctccaactaaacgatcacttctaaaaaccccaacgccgccgccatcataatctctcttcaataacgcgccatacgctacattctaaaaacgaacgccgcgaccgaccaatcgccgccgcgaccccgaaacctcacgcgctcccaaaaccgtcgcaaccgctatcgacgccgacgtcgcgacctcgacgaatctaaccgaactaccgaattccgaataactaaaaaaaaactaatataaacccgaccgccgcgctaaaacgaaaacgaccgcaaccgacaccgaacgaaaccgaaacgatctacccaaactactacaaccgcgcgccccgctaaactcccaaccccgcgcatacgtaatatccgacgccccgacctcgcgatacccccgaccctctccccactaccctaatacaacccgcccgaaaacccgcaaatccacgacgccaattcgctccctccgttctcaaccctacacaccgcctcccctaactcctccttacccttccacgctccaacgccgtacaaaatt

SEQ ID NO: 29587 - DNA, 656 bp, Artificial Sequence
  chemically treated genomic DNA (Homo sapiens) CpG-island No: 29587
ttgtaggtttttgttagtcgttagtttagcgagtagtaaggtttggagtggtagggtcgatcgggggttcgcgaatttcggggtttgaggggcgcggcgtttttattattagaattttagtcgcgttttttagttgagcgattatttttgggggttttagcgtcgtcgttattatggtttttttttaatgacgcgttatgcgttgtattttgggagcgggcgtcgcggtcggttaatcgtcgtcgcgatttcggagttttacgcgtttttagggtcgtcgtagtcgttgtcgacgtcggcgtcgcggtttcggcgggtttggtcgggttgtcgggtttcgggtggttgggaggggattagtgtgagttcggtcgtcgcgttggggcgggggcggtcgtagtcggtatcgggcgaggtcgaggcggtttgtttagattgttgtagtcgcgcgtttcgttaagtttttagtttcgcgtatgcgtggtgttcggcgtttcggtttcgcggtgttttcggttttttttttattattttagtatagttcgttcggggattcgtagatttacgacgttagttcgtttttttcgtttttagttttgtatatcgttttttttggtttttttttgtttttttacgttttagcgtcgtgtaggatt

SEQ ID NO: 29588 - DNA, 656 bp, Artificial Sequence
  chemically treated genomic DNA (Homo sapiens) CpG-island No: 29588
aatcctacacgacgctaaaacgtaaaaaaacaaaaaaaaaccaaaaaaaacgatatacaaaactaaaaacgaaaaaaacgaactaacgtcgtaaatctacgaatccccgaacgaactatactaaaataataaaaaaaaaaccgaaaacaccgcgaaaccgaaacgccgaacaccacgcatacgcgaaactaaaaacttaacgaaacgcgcgactacaacaatctaaacaaaccgcctcgacctcgcccgataccgactacgaccgcccccgccccaacgcgacgaccgaactcacactaatcccctcccaaccacccgaaacccgacaacccgaccaaacccgccgaaaccgcgacgccgacgtcgacaacgactacgacgaccctaaaaacgcgtaaaactccgaaatcgcgacgacgattaaccgaccgcgacgcccgctcccaaaatacaacgcataacgcgtcattaaaaaaaaaccataataacgacgacgctaaaacccccaaaaataatcgctcaactaaaaaacgcgactaaaattctaataataaaaacgccgcgcccctcaaaccccgaaattcgcgaacccccgatcgaccctaccactccaaaccttactactcgctaaactaacgactaacaaaaacctacaa

SEQ ID NO: 29589 - DNA, 694 bp, Artificial Sequence
  chemically treated genomic DNA (Homo sapiens) CpG-island No: 29589
  unsure (692)
ttttattcgtatttttcgcgttcgagtgagtttatttcgtttatagttggttgtcggttattgttttcgttattaatgacgtttttaggggcgggtacgttttcgtttttatttcgcgttttttttcgcgtttcgttttcgttcgcgtttcgttttcgttcgcgtttcgttttcgttcgcgtttcgtttttttttcgcgtttcgtttttttttcgcgtttcgttttagttttcgttttttttttcggcgtttcgtttttattttcgtttcgtatttcgttgtatagattttatttatttttttaagcgtcggggtttgcgtagcggcggaaatgggtagggcggagcgagcgttgcggttaaagcgaaggcggggattttatttatttttagttttgtcggttttttttatttcgggttacgtcgtgataggggcgaaagcgtcggtggcggtggcggtcgaaaagaggttggggttcgcggcgcggttgtagtcgtttgtgcgtcggcgcgcggtttcgaaaaggcgttttagtttaaggcggcgcgtatcgtttcgttggcgtttagaggtgggaggttttttatttcggggcgtgcgtgggggtcgtggcggatttcgggtgatagcgttgtataaagtagtttggttggggtgtaagttttttttttttttttgtgtagcgttttttntt

SEQ ID NO: 29590 - DNA, 694 bp, Artificial Sequence
  chemically treated genomic DNA (Homo sapiens) CpG-island No: 29590
  unsure (3)
aanaaaaaacgctacacaaaaaaaaaaaaaaaacttacaccccaaccaaactactttatacaacgctatcacccgaaatccgccacgacccccacgcacgccccgaaataaaaaacctcccacctctaaacgccaacgaaacgatacgcgccgccttaaactaaaacgccttttcgaaaccgcgcgccgacgcacaaacgactacaaccgcgccgcgaaccccaacctcttttcgaccgccaccgccaccgacgctttcgcccctatcacgacgtaacccgaaataaaaaaaaccgacaaaactaaaaataaataaaatccccgccttcgctttaaccgcaacgctcgctccgccctacccatttccgccgctacgcaaaccccgacgcttaaaaaaataaataaaatctatacaacgaaatacgaaacgaaaataaaaacgaaacgccgaaaaaaaaaacgaaaactaaaacgaaacgcgaaaaaaaaacgaaacgcgaaaaaaaaacgaaacgcgaacgaaaacgaaacgcgaacgaaaacgaaacgcgaacgaaaacgaaacgcgaaaaaaaacgcgaaataaaaacgaaaacgtacccgcccctaaaaacgtcattaataacgaaaacaataaccgacaaccaactataaacgaaataaactcactcgaacgcgaaaaatacgaataaaa

SEQ ID NO: 29591 - DNA, 694 bp, Artificial Sequence
  chemically treated genomic DNA (Homo sapiens) CpG-island No: 29591
  unsure (3)
ggngaggggcgttgtatagggggaaagggagggtttgtattttaattaagttgttttgtgtaacgttgttattcgaaattcgttacggtttttacgtacgtttcgaagtggggagttttttatttttgagcgttagcgaggcggtgcgcgtcgttttggattggggcgttttttcggagtcgcgcgtcggcgtatagacggttgtagtcgcgtcgcgagttttagttttttttcggtcgttatcgttatcggcgttttcgtttttgttacggcgtgattcggggtgggaggagtcgataggattagggatgggtagggttttcgttttcgttttagtcgtagcgttcgtttcgttttgtttattttcgtcgttgcgtaaatttcggcgtttggggaagtgggtggagtttgtgtaacgaggtacggggcgggagtgaagacggggcgtcgggagagggggcgggaattgaggcggggcgcgggaaagaggcggggcgcgggaaagaggcggggcgcgggcggaggcggggcgcgggcggaggcggggcgcgggcggaggcggggcgcggagaaagacgcgaggtggaagcggaggcgtattcgtttttggggacgttattggtggcggaggtaatggtcggtaattagttgtaagcgaggtaggtttattcgggcgcggagggtgcgggtgaga

SEQ ID NO: 29592 - DNA, 694 bp, Artificial Sequence
  chemically treated genomic DNA (Homo sapiens) CpG-island No: 29592
  unsure (692)
tctcacccgcaccctccgcgcccgaataaacctacctcgcttacaactaattaccgaccattacctccgccaccaataacgtccccaaaaacgaatacgcctccgcttccacctcgcgtctttctccgcgccccgcctccgcccgcgccccgcctccgcccgcgccccgcctccgcccgcgccccgcctctttcccgcgccccgcctctttcccgcgccccgcctcaattcccgccccctctcccgacgccccgtcttcactcccgccccgtacctcgttacacaaactccacccacttccccaaacgccgaaatttacgcaacgacgaaaataaacaaaacgaaacgaacgctacgactaaaacgaaaacgaaaaccctacccatccctaatcctatcgactcctcccaccccgaatcacgccgtaacaaaaacgaaaacgccgataacgataacgaccgaaaaaaaactaaaactcgcgacgcgactacaaccgtctatacgccgacgcgcgactccgaaaaaacgccccaatccaaaacgacgcgcaccgcctcgctaacgctcaaaaataaaaaactccccacttcgaaacgtacgtaaaaaccgtaacgaatttcgaataacaacgttacacaaaacaacttaattaaaatacaaaccctccctttccccctatacaacgcccctcncc

SEQ ID NO: 29593 - DNA, 523 bp, Artificial Sequence
  chemically treated genomic DNA (Homo sapiens) CpG-island No: 29593
tatcgtcgtcgttacgattacgttttgtattttcgtttttaacgtttcggttcgagtggcgtagtttggatattgtcgtcgtcgtttttttttttcgtttttacgttatttttacggatacgtcgtcgttatttttgtcgttgtcgtcgtcgtcgttagttttcgcgagaggagatagttttcgtttcgtttagttttttttttttttgcgtgtttttagcgagttcgttaagggagacgtggcgagcgtaacggtggaattcggcgaggtttcgtttttagtttcgttttaacgttaaagtttttttttaattttttttttagggtttcgtttttaatcgtttcgtttttttttatcgtttagttttttagcgtattacgtcggatttcgggcgtcggcgtataggattttagagaaggtttttcgtcggagtagcggtcgcgggcggtttatttggttgcgtaggggttttagatatttagagaagagttgaggtttagtttgttttgttttttggattaa

SEQ ID NO: 29594 - DNA, 523 bp, Artificial Sequence
  chemically treated genomic DNA (Homo sapiens) CpG-island No: 29594
ttaatccaaaaaacaaaacaaactaaacctcaactcttctctaaatatctaaaacccctacgcaaccaaataaaccgcccgcgaccgctactccgacgaaaaaccttctctaaaatcctatacgccgacgcccgaaatccgacgtaatacgctaaaaaactaaacgataaaaaaaaacgaaacgattaaaaacgaaaccctaaaaaaaaaattaaaaaaaaactttaacgttaaaacgaaactaaaaacgaaacctcgccgaattccaccgttacgctcgccacgtctcccttaacgaactcgctaaaaacacgcaaaaaaaaaaaaaactaaacgaaacgaaaactatctcctctcgcgaaaactaacgacgacgacgacaacgacaaaaataacgacgacgtatccgtaaaaataacgtaaaaacgaaaaaaaaaaacgacgacgacaatatccaaactacgccactcgaaccgaaacgttaaaaacgaaaatacaaaacgtaatcgtaacgacgacgata

SEQ ID NO: 29595 - DNA, 523 bp, Artificial Sequence
  chemically treated genomic DNA (Homo sapiens) CpG-island No: 29595
ttaatttagagggtaggataggttgagttttagtttttttttgaatatttgggatttttgcgtagttaggtgaatcgttcgcgatcgttgtttcggcgggaagttttttttgggattttgtacgtcgacgttcggaattcggcgtggtgcgttgggaaattgagcggtggaggaaggcggagcggttaggggcgggattttaggggaggggttgggggagggttttgacgttagggcggggttaagggcgagatttcgtcgagttttatcgttgcgttcgttacgttttttttagcgagttcgttggggatacgtagggggagggaaaattgagcggggcgggaattattttttttcgcgagagttggcgacggcggcggtagcggtagaggtggcggcggcgtgttcgtgagagtggcgtgggggcggggaggagaggcggcggcggtagtgtttaagttacgttattcgggtcggggcgttgggagcgggagtgtagagcgtggtcgtggcggcggcggtg

SEQ ID NO: 29596 - DNA, 523 bp, Artificial Sequence
  chemically treated genomic DNA (Homo sapiens) CpG-island No: 29596
caccgccgccgccacgaccacgctctacactcccgctcccaacgccccgacccgaataacgtaacttaaacactaccgccgccgcctctcctccccgcccccacgccactctcacgaacacgccgccgccacctctaccgctaccgccgccgtcgccaactctcgcgaaaaaaaataattcccgccccgctcaattttccctccccctacgtatccccaacgaactcgctaaaaaaaacgtaacgaacgcaacgataaaactcgacgaaatctcgcccttaaccccgccctaacgtcaaaaccctcccccaacccctcccctaaaatcccgcccctaaccgctccgccttcctccaccgctcaatttcccaacgcaccacgccgaattccgaacgtcgacgtacaaaatcccaaaaaaaacttcccgccgaaacaacgatcgcgaacgattcacctaactacgcaaaaatcccaaatattcaaaaaaaaactaaaactcaacctatcctaccctctaaattaa

SEQ ID NO: 29597 - DNA, 507 bp, Artificial Sequence
  chemically treated genomic DNA (Homo sapiens) CpG-island No: 29597
tgggcggttgttatgtgtacgtaagggggattttttagagtcgatttgtaggtatgtaagtttggtattggtcgtcgttttataacgtcgtgattgggaaaattttggcgttatttaatttaatcgttttgtagtatatttttttttcgttagttggcgtaatagcgaagaggttcgtatcgatcgtttttttaatagttgcgtagtttgaatggcgaatggcgtttgatgcggtattttttttttacgtatttgtgcggtattttatatcggaatggggtatttttagaataatttgttttgatgtcgtatagttaagttagtttcgatattcgttaatattcgttgacgcgttttgacgggtttgtttgttttcggtattcgtttatagataagttgtgatcgttttcgggagttgtatgtgttagaggtttttatcgttattatcgaaacgcgcgagacgaaagggtttcgtgatacgtttatttttataggttaacgttacga

SEQ ID NO: 29598 - DNA, 507 bp, Artificial Sequence
  chemically treated genomic DNA (Homo sapiens) CpG-island No: 29598
tcgtaacgttaacctataaaaataaacgtatcacgaaaccctttcgtctcgcgcgtttcgataataacgataaaaacctctaacacatacaactcccgaaaacgatcacaacttatctataaacgaataccgaaaacaaacaaacccgtcaaaacgcgtcaacgaatattaacgaatatcgaaactaacttaactatacgacatcaaaacaaattattctaaaaataccccattccgatataaaataccgcacaaatacgtaaaaaaaaaataccgcatcaaacgccattcgccattcaaactacgcaactattaaaaaaacgatcgatacgaacctcttcgctattacgccaactaacgaaaaaaaaatatactacaaaacgattaaattaaataacgccaaaattttcccaatcacgacgttataaaacgacgaccaataccaaacttacatacctacaaatcgactctaaaaaatcccccttacgtacacataacaaccgccca

SEQ ID NO: 29599 - DNA, 507 bp, Artificial Sequence
  chemically treated genomic DNA (Homo sapiens) CpG-island No: 29599
tcgtggcgttaatttataaaaataggcgtattacgaggttttttcgtttcgcgcgtttcggtgatgacggtgaaaatttttgatatatgtagttttcggagacggttatagtttgtttgtaagcggatgtcgggagtagataagttcgttagggcgcgttagcgggtgttggcgggtgtcggggttggtttaattatgcggtattagagtagattgttttgagagtgttttatttcggtgtgaaatatcgtatagatgcgtaaggagaaaatatcgtattaggcgttattcgttatttaggttgcgtaattgttggaagggcgatcggtgcgggttttttcgttattacgttagttggcgaaagggggatgtgttgtaaggcgattaagttgggtaacgttagggtttttttagttacgacgttgtaaaacgacggttagtgttaagtttgtatgtttgtaggtcgattttagaggattttttttacgtatatatgatagtcgttta

SEQ ID NO: 29600 - DNA, 507 bp, Artificial Sequence
  chemically treated genomic DNA (Homo sapiens) CpG-island No: 29600
taaacgactatcatatatacgtaaaaaaaatcctctaaaatcgacctacaaacatacaaacttaacactaaccgtcgttttacaacgtcgtaactaaaaaaaccctaacgttacccaacttaatcgccttacaacacatccccctttcgccaactaacgtaataacgaaaaaacccgcaccgatcgcccttccaacaattacgcaacctaaataacgaataacgcctaatacgatattttctccttacgcatctatacgatatttcacaccgaaataaaacactctcaaaacaatctactctaataccgcataattaaaccaaccccgacacccgccaacacccgctaacgcgccctaacgaacttatctactcccgacatccgcttacaaacaaactataaccgtctccgaaaactacatatatcaaaaattttcaccgtcatcaccgaaacgcgcgaaacgaaaaaacctcgtaatacgcctatttttataaattaacgccacga

SEQ ID NO: 29601 - DNA, 512 bp, Artificial Sequence
  chemically treated genomic DNA (Homo sapiens) CpG-island No: 29601
ttcgtgcgtttcgcgggttcggcggtcgggtgattttcgagaggtttcgcgtttgggcggtcggcggcgatttcgcggttcgcgaatacgcgtggattttgtggaacgtcgggttttttcgggcgttttcgttttttggtagttgtcgggagattcggtcggtggggaagttcgcggagtcgtagtttcggtttcggaaggtttttttgggtttcgggttcgatttttatttttgcgtcggttcgcgggtttcgtaggttttgtattgtcgatcgggttgcgtttaaggtcgttagtcgttcgtcgttttttttgttttttcgttgtaggaaggtcgcggtagagggggcgttttttaagtcgttagttacgtacgcggaggcgttcgggtttcggggcggcgtatcgggagagtacgtcggggaggatacgtgggttttcgcgcggtgggttgagagtttcggtttcggggaatttcgtagtttttttttgttatttttggaattgggttt

SEQ ID NO: 29602 - DNA, 512 bp, Artificial Sequence
  chemically treated genomic DNA (Homo sapiens) CpG-island No: 29602
aaacccaattccaaaaataacaaaaaaaaactacgaaattccccgaaaccgaaactctcaacccaccgcgcgaaaacccacgtatcctccccgacgtactctcccgatacgccgccccgaaacccgaacgcctccgcgtacgtaactaacgacttaaaaaacgccccctctaccgcgaccttcctacaacgaaaaaacaaaaaaaacgacgaacgactaacgaccttaaacgcaacccgatcgacaatacaaaacctacgaaacccgcgaaccgacgcaaaaataaaaatcgaacccgaaacccaaaaaaaccttccgaaaccgaaactacgactccgcgaacttccccaccgaccgaatctcccgacaactaccaaaaaacgaaaacgcccgaaaaaacccgacgttccacaaaatccacgcgtattcgcgaaccgcgaaatcgccgccgaccgcccaaacgcgaaacctctcgaaaatcacccgaccgccgaacccgcgaaacgcacgaa

SEQ ID NO: 29603 - DNA, 512 bp, Artificial Sequence
  chemically treated genomic DNA (Homo sapiens) CpG-island No: 29603
gagtttagttttaggggtagtaggagggggttgcgggatttttcggggtcggggtttttaatttatcgcgcgaaggtttacgtgtttttttcggcgtgttttttcggtgcgtcgtttcgaggttcgagcgttttcgcgtgcgtggttgacggtttggagggcgttttttttgtcgcggtttttttgtagcggggggataaagagggcggcgggcggttggcggttttgagcgtagttcggtcggtagtgtagggtttgcgaagttcgcgggtcggcgtaggggtgggagtcgggttcggggtttagagagatttttcggggtcggggttgcggtttcgcgggtttttttatcggtcgggtttttcggtaattattagagagcgggggcgttcggggaggttcggcgttttataaggtttacgcgtattcgcgggtcgcggggtcgtcgtcggtcgtttaggcgcggagtttttcgggggttattcggtcgtcgggttcgcgggacgtacggg

SEQ ID NO: 29604 - DNA, 512 bp, Artificial Sequence
  chemically treated genomic DNA (Homo sapiens) CpG-island No: 29604
cccgtacgtcccgcgaacccgacgaccgaataacccccgaaaaactccgcgcctaaacgaccgacgacgaccccgcgacccgcgaatacgcgtaaaccttataaaacgccgaacctccccgaacgcccccgctctctaataattaccgaaaaacccgaccgataaaaaaacccgcgaaaccgcaaccccgaccccgaaaaatctctctaaaccccgaacccgactcccacccctacgccgacccgcgaacttcgcaaaccctacactaccgaccgaactacgctcaaaaccgccaaccgcccgccgccctctttatccccccgctacaaaaaaaccgcgacaaaaaaaacgccctccaaaccgtcaaccacgcacgcgaaaacgctcgaacctcgaaacgacgcaccgaaaaaacacgccgaaaaaaacacgtaaaccttcgcgcgataaattaaaaaccccgaccccgaaaaatcccgcaaccccctcctactacccctaaaactaaactc

SEQ ID NO: 29605 - DNA, 874 bp, Artificial Sequence
  chemically treated genomic DNA (Homo sapiens) CpG-island No: 29605
ttgggtcgaaagtgttagcggttgcgttgttacgtcgcggttggggagcgggcgtttcggttaggttcgacgttcgggttttatcgtattttgcgggataagcggagtaggcgtaggtcgcgtaagattacgggttgtcgcggcgcgggttttttcgtaggaggggggtcggttttcggagaaagcgagttattgacgggattttggttcgttttcgtttcggttttcgttttcggtaagtttcggttttaggtttttcgtagtttttttcgttgcgcgttttcggttcgggggcgtcgcgttttgtcggtcgtcggtcgggattgcgggtttttagcgcgggttttacgtcgcggattaggggttaggtcgtttgtcgttcgtttgttcgtgtttatggtaatgtttcgtttcgcgcggttcgtttcggtcgagcgtttcggttcgatcgtgatagttgggtgtttaaagggttaagtcggtagcgcggcggtcggtgtttttcgcgcgttgttcgttagtcgcgagttggttttagcgcgtacgcgttcgttcgttatttgcggtcgttttcgcgttttttttttatttggtcgttttttttcgggggtcgttttttagttcgttttttcggttcggcgtcgcgtattttgttggttgttcggacgttgttcgcggaggaggggcgagggcgttattattatatattagtatattagcgcgcgttacgtggtcgttttagttaatggttattttagaagggcggggattgggcggaatacgttttagtgttgtttttagtttgaatcggtggttatggtaacgggcgggtgggcgggggagtggggaggtgtcggagttcggtgttttcggg

SEQ ID NO: 29606 - DNA, 874 bp, Artificial Sequence
  chemically treated genomic DNA (Homo sapiens) CpG-island No: 29606
cccgaaaacaccgaactccgacacctccccactcccccgcccacccgcccgttaccataaccaccgattcaaactaaaaacaacactaaaacgtattccgcccaatccccgcccttctaaaataaccattaactaaaacgaccacgtaacgcgcgctaatatactaatatataataataacgccctcgcccctcctccgcgaacaacgtccgaacaaccaacaaaatacgcgacgccgaaccgaaaaaacgaactaaaaaacgacccccgaaaaaaaacgaccaaataaaaaaaaaacgcgaaaacgaccgcaaataacgaacgaacgcgtacgcgctaaaaccaactcgcgactaacgaacaacgcgcgaaaaacaccgaccgccgcgctaccgacttaaccctttaaacacccaactatcacgatcgaaccgaaacgctcgaccgaaacgaaccgcgcgaaacgaaacattaccataaacacgaacaaacgaacgacaaacgacctaacccctaatccgcgacgtaaaacccgcgctaaaaacccgcaatcccgaccgacgaccgacaaaacgcgacgcccccgaaccgaaaacgcgcaacgaaaaaaactacgaaaaacctaaaaccgaaacttaccgaaaacgaaaaccgaaacgaaaacgaaccaaaatcccgtcaataactcgctttctccgaaaaccgacccccctcctacgaaaaaacccgcgccgcgacaacccgtaatcttacgcgacctacgcctactccgcttatcccgcaaaatacgataaaacccgaacgtcgaacctaaccgaaacgcccgctccccaaccgcgacgtaacaacgcaaccgctaacactttcgacccaa

SEQ ID NO: 29607 - DNA, 874 bp, Artificial Sequence
  chemically treated genomic DNA (Homo sapiens) CpG-island No: 29607
ttcgggggtatcgggtttcggtatttttttattttttcgtttattcgttcgttgttatggttatcggtttaggttgggagtagtattaaggcgtgtttcgtttaattttcgtttttttagggtgattattggttggagcggttacgtgacgcgcgttggtatgttaatatatggtaatagcgttttcgtttttttttcgcgggtagcgttcgagtagttagtagggtgcgcggcgtcgagtcgagggggcgggttgaggggcggttttcgggagagagcggttaggtggaggaggagcgcggaggcgatcgtaggtaacgggcgggcgcgtgcgcgttggggttagttcgcggttgacgggtagcgcgcgggggatatcggtcgtcgcgttgtcggtttaattttttgggtatttagttgttacggtcgggtcggagcgttcggtcgggacgggtcgcgcggggcggggtattgttatgggtacggataggcgggcggtaggcggtttgatttttggttcgcggcgtggggttcgcgttgggagttcgtagtttcggtcggcgatcggtagagcgcggcgttttcgggtcgggaacgcgtagcgaggagggttgcggagagtttggggtcgaggtttgtcgggaacgggaatcggaacgggaacgggttaaggtttcgttagtgattcgtttttttcggggatcgattttttttttgcggagaggttcgcgtcgcggtagttcgtggttttgcgcggtttgcgtttgtttcgtttgtttcgtagagtgcggtgagattcgggcgtcgggtttgatcggggcgttcgttttttagtcgcggcgtgatagcgtagtcgttggtattttcggtttag

SEQ ID NO: 29608 - DNA, 874 bp, Artificial Sequence
  chemically treated genomic DNA (Homo sapiens) CpG-island No: 29608
ctaaaccgaaaataccaacgactacgctatcacgccgcgactaaaaaacgaacgccccgatcaaacccgacgcccgaatctcaccgcactctacgaaacaaacgaaacaaacgcaaaccgcgcaaaaccacgaactaccgcgacgcgaacctctccgcaaaaaaaaaatcgatccccgaaaaaaacgaatcactaacgaaaccttaacccgttcccgttccgattcccgttcccgacaaacctcgaccccaaactctccgcaaccctcctcgctacgcgttcccgacccgaaaacgccgcgctctaccgatcgccgaccgaaactacgaactcccaacgcgaaccccacgccgcgaaccaaaaatcaaaccgcctaccgcccgcctatccgtacccataacaataccccgccccgcgcgacccgtcccgaccgaacgctccgacccgaccgtaacaactaaatacccaaaaaattaaaccgacaacgcgacgaccgatatcccccgcgcgctacccgtcaaccgcgaactaaccccaacgcgcacgcgcccgcccgttacctacgatcgcctccgcgctcctcctccacctaaccgctctctcccgaaaaccgcccctcaacccgccccctcgactcgacgccgcgcaccctactaactactcgaacgctacccgcgaaaaaaaaacgaaaacgctattaccatatattaacataccaacgcgcgtcacgtaaccgctccaaccaataatcaccctaaaaaaacgaaaattaaacgaaacacgccttaatactactcccaacctaaaccgataaccataacaacgaacgaataaacgaaaaaataaaaaaataccgaaacccgatacccccgaa

SEQ ID NO: 29609 - DNA, 505 bp, Artificial Sequence
  chemically treated genomic DNA (Homo sapiens) CpG-island No: 29609
ttcggcgcggtaggcgtttttcggttttgtttggtcgcgggtttcgtcgtttcgtagtcgagtttgggattcgggattcggttgttcgttgttgtacggtttttttatgattcggcgttttgttcgggatcggttcgttcgttgtattggtttttttttcggtttttttttgagtttttttcggataggggtatcgtgcgtttttcggttatcgtcgttttgttttcggttttttggggtcggggatttcggatcgggagtcgggttgttggtcggggcgcgtatagacgttaggcggtttagttcgggcgtcgttggtatcggttcgcggttttcggtaaaaattcgttcgattggttgggttattttcgtttgacgtttttttagatgatacgattagttttttcggcgtgttgtttttgttagtttattcgttaggttgttagaataagcggtatttcgttttttgcgtgtttttatagagtttcggtataattagattgtt

SEQ ID NO: 29610 - DNA, 505 bp, Artificial Sequence
  chemically treated genomic DNA (Homo sapiens) CpG-island No: 29610
aacaatctaattataccgaaactctataaaaacacgcaaaaaacgaaataccgcttattctaacaacctaacgaataaactaacaaaaacaacacgccgaaaaaactaatcgtatcatctaaaaaaacgtcaaacgaaaataacccaaccaatcgaacgaatttttaccgaaaaccgcgaaccgataccaacgacgcccgaactaaaccgcctaacgtctatacgcgccccgaccaacaacccgactcccgatccgaaatccccgaccccaaaaaaccgaaaacaaaacgacgataaccgaaaaacgcacgatacccctatccgaaaaaaactcaaaaaaaaaccgaaaaaaaaaccaatacaacgaacgaaccgatcccgaacaaaacgccgaatcataaaaaaaccgtacaacaacgaacaaccgaatcccgaatcccaaactcgactacgaaacgacgaaacccgcgaccaaacaaaaccgaaaaacgcctaccgcgccgaa

SEQ ID NO: 29611 - DNA, 505 bp, Artificial Sequence
  chemically treated genomic DNA (Homo sapiens) CpG-island No: 29611
ggtagtttgattgtgtcggggttttgtagggatacgtaggaggcgaggtgtcgtttgttttgataatttggcgggtagattggtaaaggtagtacgtcgggagagttagtcgtgttatttgggggggcgttaggcgggagtggtttagttagtcggacgggtttttgtcgggagtcgcgagtcggtgttagcggcgttcgggttgggtcgtttagcgtttgtgcgcgtttcggttaataattcggttttcgattcggaattttcggttttagagagtcgagggtagagcgacggtggtcggggagcgtacggtgtttttgttcgaggaaagtttaagaggaggtcgaggagaggattagtgtagcgagcgggtcggtttcgggtagggcgtcgggttatggaggagtcgtgtagtagcgggtagtcgagtttcgagttttagattcggttgcgaagcggcggagttcgcggttagatagggtcgggaagcgtttgtcgcgtcgag

SEQ ID NO: 29612 - DNA, 505 bp, Artificial Sequence
  chemically treated genomic DNA (Homo sapiens) CpG-island No: 29612
ctcgacgcgacaaacgcttcccgaccctatctaaccgcgaactccgccgcttcgcaaccgaatctaaaactcgaaactcgactacccgctactacacgactcctccataacccgacgccctacccgaaaccgacccgctcgctacactaatcctctcctcgacctcctcttaaactttcctcgaacaaaaacaccgtacgctccccgaccaccgtcgctctaccctcgactctctaaaaccgaaaattccgaatcgaaaaccgaattattaaccgaaacgcgcacaaacgctaaacgacccaacccgaacgccgctaacaccgactcgcgactcccgacaaaaacccgtccgactaactaaaccactcccgcctaacgcccccccaaataacacgactaactctcccgacgtactacctttaccaatctacccgccaaattatcaaaacaaacgacacctcgcctcctacgtatccctacaaaaccccgacacaatcaaactacc

SEQ ID NO: 29613 - DNA, 546 bp, Artificial Sequence
  chemically treated genomic DNA (Homo sapiens) CpG-island No: 29613
tgtacggcgtttcgcggttgtagtggtcgggattgagttcgcggcggagcgagttgcgtttgcgcgaggaggagggcggagcggaggatttcgcgagcgcgcggtagcgaacgaagcgcgtattagaattcgttcgcgggaaagtagcggagagcgtaggcgcgcgtcgtatcgttcgttttttcgtttttagatttcgtttatttggttttacgttttttttttcgtttttttttttttttcgcgtagggagggtcgcggcgcgaggtttgtttgcgtcgtcgttatcgtttcggcgtaagcgtagtggttttttcggtcgcggggcggggcgggcggggtcgtgtcgggttttatttgcggagtatttcgtttagtagcgacgcgttgagatattcgggtggtgagagtcgtcgttgtattttcgttatcgtgattttgtattttgaggtggagttgaggagcgagaggcgattcggaattgaatagaagatttcgttggggtttattacgttttttaataagttgtttttggtaatagggatg

SEQ ID NO: 29614 - DNA, 546 bp, Artificial Sequence
  chemically treated genomic DNA (Homo sapiens) CpG-island No: 29614
catccctattaccaaaaacaacttattaaaaaacgtaataaaccccaacgaaatcttctattcaattccgaatcgcctctcgctcctcaactccacctcaaaatacaaaatcacgataacgaaaatacaacgacgactctcaccacccgaatatctcaacgcgtcgctactaaacgaaatactccgcaaataaaacccgacacgaccccgcccgccccgccccgcgaccgaaaaaaccactacgcttacgccgaaacgataacgacgacgcaaacaaacctcgcgccgcgaccctccctacgcgaaaaaaaaaaaaaaacgaaaaaaaaaacgtaaaaccaaataaacgaaatctaaaaacgaaaaaacgaacgatacgacgcgcgcctacgctctccgctactttcccgcgaacgaattctaatacgcgcttcgttcgctaccgcgcgctcgcgaaatcctccgctccgccctcctcctcgcgcaaacgcaactcgctccgccgcgaactcaatcccgaccactacaaccgcgaaacgccgtaca

SEQ ID NO: 29615 - DNA, 546 bp, Artificial Sequence
  chemically treated genomic DNA (Homo sapiens) CpG-island No: 29615
tatttttattattaaggataatttattagaaggcgtggtgaattttaacgaagttttttgtttagtttcgggtcgtttttcgttttttagttttattttaaagtataaggttacggtggcgaaagtgtagcggcggtttttattattcgagtgttttaacgcgtcgttgttggacggagtgtttcgtaggtaaggttcggtacggtttcgttcgtttcgtttcgcggtcgggggaattattgcgtttgcgtcggggcggtggcggcgacgtaaataggtttcgcgtcgcggttttttttacgcgggaaaggaaagggggcggggagaagagcgtagagttaagtgggcgggatttgggggcgggggagcgggcgatgcggcgcgcgtttgcgtttttcgttgttttttcgcgagcgagttttggtgcgcgtttcgttcgttgtcgcgcgttcgcggagtttttcgtttcgttttttttttcgcgtaagcgtagttcgtttcgtcgcgggtttaatttcggttattgtagtcgcggggcgtcgtata

SEQ ID NO: 29616 - DNA, 546 bp, Artificial Sequence
  chemically treated genomic DNA (Homo sapiens) CpG-island No: 29616
tatacgacgccccgcgactacaataaccgaaattaaacccgcgacgaaacgaactacgcttacgcgaaaaaaaaaacgaaacgaaaaactccgcgaacgcgcgacaacgaacgaaacgcgcaccaaaactcgctcgcgaaaaaacaacgaaaaacgcaaacgcgcgccgcatcgcccgctcccccgcccccaaatcccgcccacttaactctacgctcttctccccgccccctttcctttcccgcgtaaaaaaaaccgcgacgcgaaacctatttacgtcgccgccaccgccccgacgcaaacgcaataattcccccgaccgcgaaacgaaacgaacgaaaccgtaccgaaccttacctacgaaacactccgtccaacaacgacgcgttaaaacactcgaataataaaaaccgccgctacactttcgccaccgtaaccttatactttaaaataaaactaaaaaacgaaaaacgacccgaaactaaacaaaaaacttcgttaaaattcaccacgccttctaataaattatccttaataataaaaata

SEQ ID NO: 29617 - DNA, 527 bp, Artificial Sequence
  chemically treated genomic DNA (Homo sapiens) CpG-island No: 29617
cgaaaatttcgggaagaaacggttagtacgggtttcgtcgtgtcggttatttaatacgtttttttgagagtatagaatatttatagttttatatagcgcgttatttagagagtttcggatttttagttcggcgtaggggcgggattttcgtttaagttagattttcgggcgaggcggtgaggggttttcggttggggtggtagggtggtggatttgtcggtttcgttttttcgtcgtacgtggtggttattgttggtttttgaatggtttgtaaggcggatatttacgttaaggtttttggatcggtcgtgggtatattcgtttgagtcgtttttttttatcgtagagcggcggttttcggcggcgttttttagttatggattatcggcggttttttatgagtcgggtggttttcgggtaattcgacgacgcggatttttttgataggtaggcggtcgtatagtgttttggttttgggtacggttttttttttgatcgtttttttggggtgtggatttttgtttgcg

SEQ ID NO: 29618 - DNA, 527 bp, Artificial Sequence
  chemically treated genomic DNA (Homo sapiens) CpG-island No: 29618
cgcaaacaaaaatccacaccccaaaaaaacgatcaaaaaaaaaaccgtacccaaaaccaaaacactatacgaccgcctacctatcaaaaaaatccgcgtcgtcgaattacccgaaaaccacccgactcataaaaaaccgccgataatccataactaaaaaacgccgccgaaaaccgccgctctacgataaaaaaaaacgactcaaacgaatatacccacgaccgatccaaaaaccttaacgtaaatatccgccttacaaaccattcaaaaaccaacaataaccaccacgtacgacgaaaaaacgaaaccgacaaatccaccaccctaccaccccaaccgaaaacccctcaccgcctcgcccgaaaatctaacttaaacgaaaatcccgcccctacgccgaactaaaaatccgaaactctctaaataacgcgctatataaaactataaatattctatactctcaaaaaaacgtattaaataaccgacacgacgaaacccgtactaaccgtttcttcccgaaattttcg

SEQ ID NO: 29619 - DNA, 527 bp, Artificial Sequence
  chemically treated genomic DNA (Homo sapiens) CpG-island No: 29619
cgtaaataagagtttatattttaagggggcggttaaggagagagtcgtatttagagttagggtattgtacggtcgtttatttgttagaggagttcgcgtcgtcgaattgttcggggattattcggtttatgagaagtcgtcggtagtttatgattggagagcgtcgtcggaggtcgtcgttttgcgatggaaaggaacggtttagacggatgtatttacggtcgatttaaaggttttggcgtggatattcgttttgtaaattatttagaagttaatagtggttattacgtgcgacgggaaaacgggatcgatagatttattattttgttattttaatcggaagttttttatcgtttcgttcggaagtttgatttgagcggaagtttcgtttttgcgtcgagttgggagttcggagttttttggatggcgcgttgtatagggttgtggatgttttgtgtttttaggaaggcgtgttgagtagtcggtacggcgaggttcgtgttggtcgttttttttcggagttttcg

SEQ ID NO: 29620 - DNA, 527 bp, Artificial Sequence
  chemically treated genomic DNA (Homo sapiens) CpG-island No: 29620
cgaaaactccgaaaaaaaacgaccaacacgaacctcgccgtaccgactactcaacacgccttcctaaaaacacaaaacatccacaaccctatacaacgcgccatccaaaaaactccgaactcccaactcgacgcaaaaacgaaacttccgctcaaatcaaacttccgaacgaaacgataaaaaacttccgattaaaataacaaaataataaatctatcgatcccgttttcccgtcgcacgtaataaccactattaacttctaaataatttacaaaacgaatatccacgccaaaacctttaaatcgaccgtaaatacatccgtctaaaccgttcctttccatcgcaaaacgacgacctccgacgacgctctccaatcataaactaccgacgacttctcataaaccgaataatccccgaacaattcgacgacgcgaactcctctaacaaataaacgaccgtacaataccctaactctaaatacgactctctccttaaccgcccccttaaaatataaactcttatttacg

SEQ ID NO: 29621 - DNA, 917 bp, Artificial Sequence
  chemically treated genomic DNA (Homo sapiens) CpG-island No: 29621
ttgggatgttttgagtaattagatttgcgtagatacgacgattgacggtgcggcggtgttttttgtttgcggttcggcgcgttttttttttagttttgcgttgtttttcgattaaacgggcggtttttgtttttttttggcggcggcgttcggcggtaacggttttttttttttcgcggcgcgtacgtttttcggttttttttttttcgcgtttcgtacgttgtttcgttttaatgcgttggcgtttagttagttttgtacgtgttttttttttagttttacggcgcgttgcggttttaattttcgttttgtgtttcgtttcggtatttcggcgggtttgttttgttgtttcgcgtttaatgcgtttttcgtgtttacgtcgagtttgtttcgttaggcgggcgttgttttttgcggttatcggtcgaaatttttgtttattagtagagttatttcgtggttttgtttgaattgggtcgttaatttttgatcgaattggatgtttatttttagcgttttggcgtgtagcgcgtttatggtttttttagtatttaatgcgtttttgttcgtttttttattcggtgagtggcggggggttgcgtttcgaattcgttatatgtattaacgaaattttaatttcggtttagtaggtcgtatagttttttttaggcgttttaggtattttcggttcggttttttaattgtcgttttattgcgtgatatttgcgttgttagagaggcgatacggttacgtttttttttcgtggataggttcggtatttcgtttattgtttggcggatttgttcgagataagtattaaggtcgttcgttacgtaaagtattggggtttgtttcggtttgatttcgatgatagttaagttcgttatttcgtttatggttttttttgaaattttga

SEQ ID NO: 29622 - DNA, 917 bp, Artificial Sequence
  chemically treated genomic DNA (Homo sapiens) CpG-island No: 29622
tcaaaatttcaaaaaaaaccataaacgaaataacgaacttaactatcatcgaaatcaaaccgaaacaaaccccaatactttacgtaacgaacgaccttaatacttatctcgaacaaatccgccaaacaataaacgaaataccgaacctatccacgaaaaaaaaacgtaaccgtatcgcctctctaacaacgcaaatatcacgcaataaaacgacaattaaaaaaccgaaccgaaaatacctaaaacgcctaaaaaaaactatacgacctactaaaccgaaattaaaatttcgttaatacatataacgaattcgaaacgcaaccccccgccactcaccgaataaaaaaacgaacaaaaacgcattaaatactaaaaaaaccataaacgcgctacacgccaaaacgctaaaaataaacatccaattcgatcaaaaattaacgacccaattcaaacaaaaccacgaaataactctactaataaacaaaaatttcgaccgataaccgcaaaaaacaacgcccgcctaacgaaacaaactcgacgtaaacacgaaaaacgcattaaacgcgaaacaacaaaacaaacccgccgaaataccgaaacgaaacacaaaacgaaaattaaaaccgcaacgcgccgtaaaactaaaaaaaaaacacgtacaaaactaactaaacgccaacgcattaaaacgaaacaacgtacgaaacgcgaaaaaaaaaaaaccgaaaaacgtacgcgccgcgaaaaaaaaaaaaccgttaccgccgaacgccgccgccaaaaaaaaacaaaaaccgcccgtttaatcgaaaaacaacgcaaaactaaaaaaaaaacgcgccgaaccgcaaacaaaaaacaccgccgcaccgtcaatcgtcgtatctacgcaaatctaattactcaaaacatcccaa

SEQ ID NO: 29623 - DNA, 917 bp, Artificial Sequence
  chemically treated genomic DNA (Homo sapiens) CpG-island No: 29623
ttaaaattttaggagaaattatgagcgaagtaacggatttaattgttatcgaaattaagtcggaataggttttagtgttttacgtagcgggcggttttgatgtttatttcgagtaaattcgttaggtagtaaacgaagtgtcggatttgtttacgaagaaaggacgtgatcgtgtcgtttttttggtagcgtaggtattacgtagtaaggcggtaattgaaaagtcgggtcgagagtatttgaagcgtttgaaagaggttgtgcgatttgttaggtcgaaattaaggtttcgttgatgtatgtgacgagttcgggacgtaatttttcgttatttatcgaatgggaaagcgagtaggaacgtattaagtgttaaaaaagttatgaacgcgttgtacgttaaagcgttggaaatgaatatttagttcgattaggagttggcggtttagtttaagtaagattacgaaatggttttgttgatgaataaggatttcgatcggtgatcgtaaagagtagcgttcgtttggcggaataggttcggcgtgagtacgaagagcgtattaagcgcgaagtagtagaataagttcgtcgagatgtcgaagcgaagtataaagcggagattgaagtcgtagcgcgtcgtgaagttgaagagaaagtacgtgtagagttggttgaacgttagcgtattgaagcggaatagcgtgcggaacgcgagaagaaggaaatcgaagagcgtgcgcgtcgcgaaaaagaagaagtcgttgtcgtcgagcgtcgtcgttaggaagaggtagaagtcgttcgtttggtcgaagagtagcgtaaagttgaagaagaagcgcgtcgagtcgtagataaagagtatcgtcgtatcgttaatcgtcgtgtttacgtagatttaattgtttagggtattttag

SEQ ID NO: 29624 - DNA, 917 bp, Artificial Sequence
  chemically treated genomic DNA (Homo sapiens) CpG-island No: 29624
ctaaaataccctaaacaattaaatctacgtaaacacgacgattaacgatacgacgatactctttatctacgactcgacgcgcttcttcttcaactttacgctactcttcgaccaaacgaacgacttctacctcttcctaacgacgacgctcgacgacaacgacttcttctttttcgcgacgcgcacgctcttcgatttccttcttctcgcgttccgcacgctattccgcttcaatacgctaacgttcaaccaactctacacgtactttctcttcaacttcacgacgcgctacgacttcaatctccgctttatacttcgcttcgacatctcgacgaacttattctactacttcgcgcttaatacgctcttcgtactcacgccgaacctattccgccaaacgaacgctactctttacgatcaccgatcgaaatccttattcatcaacaaaaccatttcgtaatcttacttaaactaaaccgccaactcctaatcgaactaaatattcatttccaacgctttaacgtacaacgcgttcataacttttttaacacttaatacgttcctactcgctttcccattcgataaataacgaaaaattacgtcccgaactcgtcacatacatcaacgaaaccttaatttcgacctaacaaatcgcacaacctctttcaaacgcttcaaatactctcgacccgacttttcaattaccgccttactacgtaatacctacgctaccaaaaaaacgacacgatcacgtcctttcttcgtaaacaaatccgacacttcgtttactacctaacgaatttactcgaaataaacatcaaaaccgcccgctacgtaaaacactaaaacctattccgacttaatttcgataacaattaaatccgttacttcgctcataatttctcctaaaattttaa

SEQ ID NO: 29625 - DNA, 1007 bp, Artificial Sequence
  chemically treated genomic DNA (Homo sapiens) CpG-island No: 29625
gaaagagaaaaaagtttgcgtcgtgtttttggtaagtagggttcgtttcgttttttttttcggttggattagttttttttttgaggtttcggggtcgcgagggatttggcggggggggcgcgaggcgtgggcgagcgtttgggattcgattcggttgtcggttacgggggttttcgtggtcgcgtagttcggattttgcggagcggcgggggcgcggttagtcgaatttattattttttaaagcggttcgcggcgttcgtttcgcgggaggcgggcgggaggcggattcggtttatttcgacgtcgattatcgcgtcgttcgcgatgggaagcgttttataaagtcgcgttcggtcggttcgagttattcgtcgtcgcgtcgtttcgttgtttcgaacgcgggttatacgtagtttttttggagtgacgggtcgatttcggacgatttcggttacggatagattcgggacgatttcggtcggggcgcgttttttgcgggcgggcgggcggcggggttggggagtttttggcgggggtatgcgtgcgatatggtttcggcggtgtttgagggtacgtcgttcgtgaatatgttcgtgcgcggttgttgggtgaacggtattcgtaggtttatcgttagtcggcgcggcgacgaagaggagtttttcgagattcgtacggagtggtcggatcgtagcgtgttttatttgtatcgtagtttggcggatttgggtcgtttgtggtagcgtttgcgcgacgtttttttcgaggatcggttcgaattggcgtaggggtcgttgcggtaaggtgcggggtcggggacgcgggaggggcgcggggtcgaggtagttttgaagtgtacgaaggaggcggggaagagattttaatcgagattgcgattttttttttttgttcgttttggataggggatatttggatttcgcgttcgtagacgaggggtgttcgggcggcggggttagggggacggggagttagtttgtttagtttgg

SEQ ID NO: 29626 - DNA, 1007 bp, Artificial Sequence
  chemically treated genomic DNA (Homo sapiens) CpG-island No: 29626
ccaaactaaacaaactaactccccgtccccctaaccccgccgcccgaacacccctcgtctacgaacgcgaaatccaaatatcccctatccaaaacgaacaaaaaaaaaaaatcgcaatctcgattaaaatctcttccccgcctccttcgtacacttcaaaactacctcgaccccgcgcccctcccgcgtccccgaccccgcaccttaccgcaacgacccctacgccaattcgaaccgatcctcgaaaaaaacgtcgcgcaaacgctaccacaaacgacccaaatccgccaaactacgatacaaataaaacacgctacgatccgaccactccgtacgaatctcgaaaaactcctcttcgtcgccgcgccgactaacgataaacctacgaataccgttcacccaacaaccgcgcacgaacatattcacgaacgacgtaccctcaaacaccgccgaaaccatatcgcacgcatacccccgccaaaaactccccaaccccgccgcccgcccgcccgcaaaaaacgcgccccgaccgaaatcgtcccgaatctatccgtaaccgaaatcgtccgaaatcgacccgtcactccaaaaaaactacgtataacccgcgttcgaaacaacgaaacgacgcgacgacgaataactcgaaccgaccgaacgcgactttataaaacgcttcccatcgcgaacgacgcgataatcgacgtcgaaataaaccgaatccgcctcccgcccgcctcccgcgaaacgaacgccgcgaaccgctttaaaaaataataaattcgactaaccgcgcccccgccgctccgcaaaatccgaactacgcgaccacgaaaacccccgtaaccgacaaccgaatcgaatcccaaacgctcgcccacgcctcgcgccccccccgccaaatccctcgcgaccccgaaacctcaaaaaaaaaactaatccaaccgaaaaaaaaaacgaaacgaaccctacttaccaaaaacacgacgcaaacttttttctctttc

SEQ ID NO: 29627 - DNA, 1007 bp, Artificial Sequence
  chemically treated genomic DNA (Homo sapiens) CpG-island No: 29627
ttaggttgggtaggttggtttttcgtttttttaatttcgtcgttcgggtatttttcgtttgcgggcgcggggtttaagtgttttttgtttagggcgggtagaaaggagaagtcgtaatttcggttgaagtttttttttcgtttttttcgtgtattttaaggttgtttcggtttcgcgtttttttcgcgttttcggtttcgtattttgtcgtagcggtttttgcgttagttcggatcggttttcgggaaaggcgtcgcgtaggcgttgttataggcggtttaggttcgttaggttgcggtgtaggtagagtacgttgcggttcgattatttcgtgcggatttcgaagaattttttttcgtcgtcgcgtcggttgacgatgagtttgcggatgtcgtttatttagtagtcgcgtacgaatatgtttacgagcgacgtgtttttaaatatcgtcgaggttatgtcgtacgtatgttttcgttaagggttttttagtttcgtcgttcgttcgttcgtaggaggcgcgtttcggtcggggtcgtttcgggtttgttcgtggtcggggtcgttcggggtcggttcgttattttaaggaggttgcgtatggttcgcgttcggggtagcggggcggcgcggcggcgagtggttcgggtcggtcgggcgcggttttataaggcgttttttatcgcgggcggcgcggtagtcgacgtcgaggtaggtcgggttcgtttttcgttcgtttttcgcggaacgggcgtcgcgggtcgttttggaaagtaataggttcggttggtcgcgttttcgtcgtttcgtagagttcgggttgcgcggttacgaaaattttcgtagtcggtagtcgggtcgagttttaagcgttcgtttacgtttcgcgtttttttcgttaaatttttcgcggtttcggagttttagaaaaaaaattggtttagtcgggaagggaggcggggcgggttttgtttgttaggagtacggcgtagatttttttttttttt

SEQ ID NO: 29628 - DNA, 1007 bp, Artificial Sequence
  chemically treated genomic DNA (Homo sapiens) CpG-island No: 29628
aaaaaaaaaaaaaatctacgccgtactcctaacaaacaaaacccgccccgcctcccttcccgactaaaccaattttttttctaaaactccgaaaccgcgaaaaatttaacgaaaaaaacgcgaaacgtaaacgaacgcttaaaactcgacccgactaccgactacgaaaattttcgtaaccgcgcaacccgaactctacgaaacgacgaaaacgcgaccaaccgaacctattactttccaaaacgacccgcgacgcccgttccgcgaaaaacgaacgaaaaacgaacccgacctacctcgacgtcgactaccgcgccgcccgcgataaaaaacgccttataaaaccgcgcccgaccgacccgaaccactcgccgccgcgccgccccgctaccccgaacgcgaaccatacgcaacctccttaaaataacgaaccgaccccgaacgaccccgaccacgaacaaacccgaaacgaccccgaccgaaacgcgcctcctacgaacgaacgaacgacgaaactaaaaaacccttaacgaaaacatacgtacgacataacctcgacgatatttaaaaacacgtcgctcgtaaacatattcgtacgcgactactaaataaacgacatccgcaaactcatcgtcaaccgacgcgacgacgaaaaaaaattcttcgaaatccgcacgaaataatcgaaccgcaacgtactctacctacaccgcaacctaacgaacctaaaccgcctataacaacgcctacgcgacgcctttcccgaaaaccgatccgaactaacgcaaaaaccgctacgacaaaatacgaaaccgaaaacgcgaaaaaaacgcgaaaccgaaacaaccttaaaatacacgaaaaaaacgaaaaaaaaacttcaaccgaaattacgacttctcctttctacccgccctaaacaaaaaacacttaaaccccgcgcccgcaaacgaaaaatacccgaacgacgaaattaaaaaaacgaaaaaccaacctacccaacctaa

SEQ ID NO: 29629 - DNA, 578 bp, Artificial Sequence
  chemically treated genomic DNA (Homo sapiens) CpG-island No: 29629
ggcgttttcggcggaggagttaaatggggcgggaaaggggtcgaggtcggtagggcgggcgtcggattttttttgaggacgagttattttcgaggagggcgggggcgttcggggttgagcggtttatagggtcggttcggttttagttttttgttcggtatttttcgagggtcggcgggcgggcgtattgggaaagcgtttgggagtagttaattgtagggttcgagtcgggggtcgcgtcgggtttggtcgtcgtttcgagtttttttcgcggagggcgcgtttttggttttcgagcgcgaggtgttacgtagttttttcgttttttttcggagcggtcgtttcgttcgcggttgtcgcggatagttagggttttttcgtattttcgttagggttggtttttattcgcgtttgattagttgcgtcgtttttttttcggtttcgtgatcgttttggttcgcgggaatttttgtttttagaaatcgcggtggtttttttttttttatcgttttgttcgattttttttttggaggttaggttgagggggtggaagtcgggaggacgtaagagagagggat

SEQ ID NO: 29630 - DNA, 578 bp, Artificial Sequence
  chemically treated genomic DNA (Homo sapiens) CpG-island No: 29630
atccctctctcttacgtcctcccgacttccaccccctcaacctaacctccaaaaaaaaaatcgaacaaaacgataaaaaaaaaaaaaccaccgcgatttctaaaaacaaaaattcccgcgaaccaaaacgatcacgaaaccgaaaaaaaaacgacgcaactaatcaaacgcgaataaaaaccaaccctaacgaaaatacgaaaaaaccctaactatccgcgacaaccgcgaacgaaacgaccgctccgaaaaaaaacgaaaaaactacgtaacacctcgcgctcgaaaaccaaaaacgcgccctccgcgaaaaaaactcgaaacgacgaccaaacccgacgcgacccccgactcgaaccctacaattaactactcccaaacgctttcccaatacgcccgcccgccgaccctcgaaaaataccgaacaaaaaactaaaaccgaaccgaccctataaaccgctcaaccccgaacgcccccgccctcctcgaaaataactcgtcctcaaaaaaaatccgacgcccgccctaccgacctcgacccctttcccgccccatttaactcctccgccgaaaacgcc

SEQ ID NO: 29631 - DNA, 578 bp, Artificial Sequence
  chemically treated genomic DNA (Homo sapiens) CpG-island No: 29631
gttttttttttttgcgttttttcggtttttatttttttagtttggtttttaaaagaaagatcgggtagagcggtaggaaaagggaagttatcgcggtttttgaaaataagaattttcgcgagttaggacggttacgaggtcggggaggaggcggcgtagttgattaaacgcgaatggggattagttttggcgggggtgcgggggggttttggttgttcgcggtagtcgcgggcggggcggtcgtttcgaggagggacggaagggttgcgtggtatttcgcgttcgaagattaggggcgcgtttttcgcggggagaattcggggcggcggttagattcgacgcgattttcggttcggattttgtagttaattgtttttagacgtttttttagtgcgttcgttcgtcggttttcgggaggtatcgggtagggggttagggtcgggtcgattttgtgagtcgtttagtttcgggcgttttcgtttttttcggaagtgattcgtttttagggagagttcggcgttcgttttgtcggtttcggtttttttttcgttttatttggttttttcgtcgggggcgtt

SEQ ID NO: 29632 - DNA, 578 bp, Artificial Sequence
  chemically treated genomic DNA (Homo sapiens) CpG-island No: 29632
aacgcccccgacgaaaaaaccaaataaaacgaaaaaaaaaccgaaaccgacaaaacgaacgccgaactctccctaaaaacgaatcacttccgaaaaaaacgaaaacgcccgaaactaaacgactcacaaaatcgacccgaccctaaccccctacccgatacctcccgaaaaccgacgaacgaacgcactaaaaaaacgtctaaaaacaattaactacaaaatccgaaccgaaaatcgcgtcgaatctaaccgccgccccgaattctccccgcgaaaaacgcgcccctaatcttcgaacgcgaaataccacgcaacccttccgtccctcctcgaaacgaccgccccgcccgcgactaccgcgaacaaccaaaacccccccgcacccccgccaaaactaatccccattcgcgtttaatcaactacgccgcctcctccccgacctcgtaaccgtcctaactcgcgaaaattcttattttcaaaaaccgcgataacttcccttttcctaccgctctacccgatctttcttttaaaaaccaaactaaaaaaataaaaaccgaaaaaacgcaaaaaaaaaaaac

SEQ ID NO: 29633 - DNA, 735 bp, Artificial Sequence
  chemically treated genomic DNA (Homo sapiens) CpG-island No: 29633
gtttcgtcgtttttcgggagcggttgtagttttcgttggttgtagacgggtagatattcgaagtgttcgcgtcggtagtcggatcgtaagcgaggaagagcgaatcgcgttttcgggtttggtcgaagcgttttttgtgttaggtttttcggtttcgggtttcgggaggaggatcgcgggttagaggcggagtcgtcgttttgtcgcgatttttagatttcgattatggtttcgcgttggtggcggtggcggcgcggttgtttttgaaagtcggcggcgcggagtttcgggtttcggttttttcggtcgtgcgggatcgttggggtcgagcgtcgttgtcgaagttcgcgcgtaggtaaggttggaaggcgcgcgttcggcggggtttagaggttacggttttaatgatagtagtgggcggaatgaatgggagcggggagtacgtgcgtcgcgacgcgggggcgcgcggggtagtttcggggtagtttcggggtgggatttcggagttgaggggtgttcgcggtgggacggagtcgcgcgttggattgaagtaggggcgttttatacggggttgtagaaagcggtgttttggggatttcgggagcgttttggggggtggagaaagcggtgggattcgtgttttgggggaagcgtaggagcgattagattgatcgttgttatatggataaggttaattaagtttggagagcgattgtagttatttattttggagtt

SEQ ID NO: 29634 - DNA, 735 bp, Artificial Sequence
  chemically treated genomic DNA (Homo sapiens) CpG-island No: 29634
aactccaaaataaataactacaatcgctctccaaacttaattaaccttatccatataacaacgatcaatctaatcgctcctacgcttcccccaaaacacgaatcccaccgctttctccaccccccaaaacgctcccgaaatccccaaaacaccgctttctacaaccccgtataaaacgcccctacttcaatccaacgcgcgactccgtcccaccgcgaacacccctcaactccgaaatcccaccccgaaactaccccgaaactaccccgcgcgcccccgcgtcgcgacgcacgtactccccgctcccattcattccgcccactactatcattaaaaccgtaacctctaaaccccgccgaacgcgcgccttccaaccttacctacgcgcgaacttcgacaacgacgctcgaccccaacgatcccgcacgaccgaaaaaaccgaaacccgaaactccgcgccgccgactttcaaaaacaaccgcgccgccaccgccaccaacgcgaaaccataatcgaaatctaaaaatcgcgacaaaacgacgactccgcctctaacccgcgatcctcctcccgaaacccgaaaccgaaaaacctaacacaaaaaacgcttcgaccaaacccgaaaacgcgattcgctcttcctcgcttacgatccgactaccgacgcgaacacttcgaatatctacccgtctacaaccaacgaaaactacaaccgctcccgaaaaacgacgaaac

SEQ ID NO: 29635 - DNA, 735 bp, Artificial Sequence
  chemically treated genomic DNA (Homo sapiens) CpG-island No: 29635
aattttaaagtaaatagttgtagtcgttttttaggtttaattaattttgtttatatagtagcggttaatttgatcgtttttgcgttttttttaggatacggattttatcgttttttttattttttaaaacgttttcggggtttttaggatatcgttttttgtaatttcgtgtagggcgtttttattttagtttaacgcgcggtttcgttttatcgcgggtattttttagtttcggagttttatttcggagttatttcggagttatttcgcgcgttttcgcgtcgcgacgtacgtgtttttcgtttttatttatttcgtttattgttgttattggagtcgtgatttttgagtttcgtcgggcgcgcgttttttaattttatttgcgcgcggatttcggtagcggcgttcggttttaacggtttcgtacggtcgggggagtcggggttcggggtttcgcgtcgtcggtttttaggagtagtcgcgtcgttatcgttattagcgcgaggttatggtcggagtttgaaagtcgcggtagggcggcggtttcgtttttggttcgcgatttttttttcgggattcggagtcgggaaatttggtataggaagcgtttcggttaggttcgggagcgcggttcgttttttttcgtttgcggttcggttgtcggcgcggatatttcgggtgtttgttcgtttgtagttaacggggattgtagtcgttttcgggaggcgacggggt

SEQ ID NO: 29636 - DNA, 735 bp, Artificial Sequence
  chemically treated genomic DNA (Homo sapiens) CpG-island No: 29636
accccgtcgcctcccgaaaacgactacaatccccgttaactacaaacgaacaaacacccgaaatatccgcgccgacaaccgaaccgcaaacgaaaaaaaacgaaccgcgctcccgaacctaaccgaaacgcttcctataccaaatttcccgactccgaatcccgaaaaaaaaatcgcgaaccaaaaacgaaaccgccgccctaccgcgactttcaaactccgaccataacctcgcgctaataacgataacgacgcgactactcctaaaaaccgacgacgcgaaaccccgaaccccgactcccccgaccgtacgaaaccgttaaaaccgaacgccgctaccgaaatccgcgcgcaaataaaattaaaaaacgcgcgcccgacgaaactcaaaaatcacgactccaataacaacaataaacgaaataaataaaaacgaaaaacacgtacgtcgcgacgcgaaaacgcgcgaaataactccgaaataactccgaaataaaactccgaaactaaaaaatacccgcgataaaacgaaaccgcgcgttaaactaaaataaaaacgccctacacgaaattacaaaaaacgatatcctaaaaaccccgaaaacgttttaaaaaataaaaaaaacgataaaatccgtatcctaaaaaaaacgcaaaaacgatcaaattaaccgctactatataaacaaaattaattaaacctaaaaaacgactacaactatttactttaaaatt

SEQ ID NO: 29637 - DNA, 535 bp, Artificial Sequence
  chemically treated genomic DNA (Homo sapiens) CpG-island No: 29637
tttttttcgttttagacgttgtcgtttcgttttttttcgcgatcgagtttcggttttttttttttgttaaagatttttatgagcgtggggtatttgattttagttttttttttcggttcgcggcgttcgcgtttagtcgtttttcgttcgtcgggggtatttgtttttgtagtcgtttttgttttttttgttcggtttgcgttttttttcgtgttttttgtttttttcgttttcgggttttcgtttttcgtttcgttcgggtttcggtttttcgtgttagttgtttttttcgtattcgtttgggggacggagtaaacggtttaggttcggtttttgttttttttttagcgtttacgagggtttttttagttttcgaggcgtatttatttgtttttttttgtttgtagttttcgtttttgtttttcgcgttttcgttgttttcgggtttggcgtcgttttttagttaagagtcgagtggttttttttcggtttgtggtgtcggttattggtttgttaggggttatcgggggagtag

SEQ ID NO: 29638 - DNA, 535 bp, Artificial Sequence
  chemically treated genomic DNA (Homo sapiens) CpG-island No: 29638
ctactcccccgataacccctaacaaaccaataaccgacaccacaaaccgaaaaaaaaccactcgactcttaactaaaaaacgacgccaaacccgaaaacaacgaaaacgcgaaaaacaaaaacgaaaactacaaacaaaaaaaaacaaataaatacgcctcgaaaactaaaaaaaccctcgtaaacgctaaaaaaaaaacaaaaaccgaacctaaaccgtttactccgtcccccaaacgaatacgaaaaaaacaactaacacgaaaaaccgaaacccgaacgaaacgaaaaacgaaaacccgaaaacgaaaaaaacaaaaaacacgaaaaaaaacgcaaaccgaacaaaaaaaacaaaaacgactacaaaaacaaatacccccgacgaacgaaaaacgactaaacgcgaacgccgcgaaccgaaaaaaaaaactaaaatcaaataccccacgctcataaaaatctttaacaaaaaaaaaaaaccgaaactcgatcgcgaaaaaaaacgaaacgacaacgtctaaaacgaaaaaaa

SEQ ID NO: 29639 - DNA, 535 bp, Artificial Sequence
  chemically treated genomic DNA (Homo sapiens) CpG-island No: 29639
ttgttttttcggtgatttttagtaaattaatggtcggtattatagatcgagaagaagttattcggtttttggttgagaagcggcgttaggttcgggagtagcgggagcgcgaggagtaggagcggaggttgtaggtagaaagggataagtgagtgcgtttcggggattgagggggttttcgtgggcgttggagaagaagtagaggtcgagtttgagtcgtttgtttcgttttttaggcgaatgcgagaggagtagttggtacgggaggtcgaggttcgggcggagcgggaggcggaggttcggaggcgggaggagtaggaggtacgagagaaggcgtaggtcgagtaggaggagtaggagcggttgtagaagtaggtgttttcggcgggcgggaagcggttgggcgcgggcgtcgcgggtcgggagggaaggttggagttaagtgttttacgtttatgggggtttttggtagaaagaggaggtcgaagttcggtcgcgggaagaggcggagcggtagcgtttggagcgggaaaag

SEQ ID NO: 29640 - DNA, 535 bp, Artificial Sequence
  chemically treated genomic DNA (Homo sapiens) CpG-island No: 29640
cttttcccgctccaaacgctaccgctccgcctcttcccgcgaccgaacttcgacctcctctttctaccaaaaacccccataaacgtaaaacacttaactccaaccttccctcccgacccgcgacgcccgcgcccaaccgcttcccgcccgccgaaaacacctacttctacaaccgctcctactcctcctactcgacctacgccttctctcgtacctcctactcctcccgcctccgaacctccgcctcccgctccgcccgaacctcgacctcccgtaccaactactcctctcgcattcgcctaaaaaacgaaacaaacgactcaaactcgacctctacttcttctccaacgcccacgaaaaccccctcaatccccgaaacgcactcacttatccctttctacctacaacctccgctcctactcctcgcgctcccgctactcccgaacctaacgccgcttctcaaccaaaaaccgaataacttcttctcgatctataataccgaccattaatttactaaaaatcaccgaaaaaacaa

SEQ ID NO: 29641 - DNA, 902 bp, Artificial Sequence
  chemically treated genomic DNA (Homo sapiens) CpG-island No: 29641
cgcgcggggtttttgcggttttcgacgttcgatgcgttcggtattcggggtgggggagggggtagttgttagaggatgtatcgcgagtttggagtcgtcgtcgtcgtagtttttatttttaaatttttaagtggttagagggcgcggtagcggaggggttttcgtttagtcggtcggttttattttcggtcgttttgtagtttttttatttatttttatttcgttttcgcgtggttttcggtatatttgggggtgcgttcgtttttagtttcgtacgcgggtcgttttttatggttgcggcgttattgggggtttcggggttttagcggcggcggcggcggcggttagtggttaggataggggtttcgcggcgtattacgttcggttcggttcggttcggtaagtagcgattcggaggcgggggcgtttcggggaaggtcgaggtaggtggttcgcgagtttcggaggtgtcggtcgttcggggtttttcggttgcggtcgcgaattcgtttttcgttcggcgtcggtttagtttcggtttcggtttaattttattgtatcgttcgggttgggtttggtttttcgttggcgcgtattaagttcgaggcgggggggtttattttagtagcgtttcgggatttagtttttcgcgttcgcgtcgttcgcgtcgttcgcgtcgttttcgtttcggagtttcgcgttcgtagtttttcggcgttttttttacggttacggtcgagcgggttttacggttttaggagttcgtcgcgttagttgtttttttttgcgttcgcgttttggtacgcgtcgtagcgtttgaggattaagtagggagcgttcgggtgatttattcgtcgcggggattgggggagagggggagtagggttgggattttttttttt

SEQ ID NO: 29642 - DNA, 902 bp, Artificial Sequence
  chemically treated genomic DNA (Homo sapiens) CpG-island No: 29642
aaaaaaaaaaatcccaaccctactccccctctcccccaatccccgcgacgaataaatcacccgaacgctccctacttaatcctcaaacgctacgacgcgtaccaaaacgcgaacgcaaaaaaaaacaactaacgcgacgaactcctaaaaccgtaaaacccgctcgaccgtaaccgtaaaaaaaacgccgaaaaactacgaacgcgaaactccgaaacgaaaacgacgcgaacgacgcgaacgacgcgaacgcgaaaaactaaatcccgaaacgctactaaaataaacccccccgcctcgaacttaatacgcgccaacgaaaaaccaaacccaacccgaacgatacaataaaattaaaccgaaaccgaaactaaaccgacgccgaacgaaaaacgaattcgcgaccgcaaccgaaaaaccccgaacgaccgacacctccgaaactcgcgaaccacctacctcgaccttccccgaaacgcccccgcctccgaatcgctacttaccgaaccgaaccgaaccgaacgtaatacgccgcgaaacccctatcctaaccactaaccgccgccgccgccgccgctaaaaccccgaaacccccaataacgccgcaaccataaaaaacgacccgcgtacgaaactaaaaacgaacgcacccccaaatataccgaaaaccacgcgaaaacgaaataaaaataaataaaaaaactacaaaacgaccgaaaataaaaccgaccgactaaacgaaaacccctccgctaccgcgccctctaaccacttaaaaatttaaaaataaaaactacgacgacgacgactccaaactcgcgatacatcctctaacaactaccccctcccccaccccgaataccgaacgcatcgaacgtcgaaaaccgcaaaaaccccgcgcg

SEQ ID NO: 29643 - DNA, 902 bp, Artificial Sequence
  chemically treated genomic DNA (Homo sapiens) CpG-island No: 29643
ggaaaggggagttttagttttgtttttttttttttttagttttcgcggcgggtgagttattcgagcgttttttatttagtttttaggcgttgcggcgcgtattaagacgcggacgtagggggaggtagttagcgcggcgaatttttggagtcgtggagttcgttcggtcgtggtcgtgggagaggcgtcgggaggttgcgggcgcggggtttcggggcgggggcggcgcgaacggcgcggacggcgcgggcgcggggggttgggtttcggggcgttgttggggtggattttttcgtttcgaatttggtacgcgttagcgagaggttaggtttagttcgggcggtataatagggttgggtcgaggtcgggattgggtcggcgtcgggcggggaacgggttcgcgatcgtagtcgagagatttcgggcgatcggtattttcgagattcgcgggttatttgtttcgatttttttcggagcgttttcgttttcgagtcgttatttgtcgggtcgggtcgggtcgggcgtgatgcgtcgcgggatttttgttttggttattggtcgtcgtcgtcgtcgtcgttgagatttcgagatttttagtgacgtcgtagttatggagagcggttcgcgtgcggagttgggggcgggcgtatttttaggtatgtcgggagttacgcggaggcgagatgggggtagatggaggggttgtagggcggtcgaggatgaggtcggtcggttgggcggggattttttcgttgtcgcgttttttgattatttggaagtttaaaaataaaggttgcggcggcggcggttttaggttcgcgatgtattttttgatagttgtttttttttttatttcgggtgtcggacgtatcgggcgtcgggagtcgtagggatttcgcgcg

SEQ ID NO: 29644 - DNA, 902 bp, Artificial Sequence
  chemically treated genomic DNA (Homo sapiens) CpG-island No: 29644
cgcgcgaaatccctacgactcccgacgcccgatacgtccgacacccgaaataaaaaaaaaaacaactatcaaaaaatacatcgcgaacctaaaaccgccgccgccgcaacctttatttttaaacttccaaataatcaaaaaacgcgacaacgaaaaaatccccgcccaaccgaccgacctcatcctcgaccgccctacaacccctccatctacccccatctcgcctccgcgtaactcccgacatacctaaaaatacgcccgcccccaactccgcacgcgaaccgctctccataactacgacgtcactaaaaatctcgaaatctcaacgacgacgacgacgacgaccaataaccaaaacaaaaatcccgcgacgcatcacgcccgacccgacccgacccgacaaataacgactcgaaaacgaaaacgctccgaaaaaaatcgaaacaaataacccgcgaatctcgaaaataccgatcgcccgaaatctctcgactacgatcgcgaacccgttccccgcccgacgccgacccaatcccgacctcgacccaaccctattataccgcccgaactaaacctaacctctcgctaacgcgtaccaaattcgaaacgaaaaaatccaccccaacaacgccccgaaacccaaccccccgcgcccgcgccgtccgcgccgttcgcgccgcccccgccccgaaaccccgcgcccgcaacctcccgacgcctctcccacgaccacgaccgaacgaactccacgactccaaaaattcgccgcgctaactacctccccctacgtccgcgtcttaatacgcgccgcaacgcctaaaaactaaataaaaaacgctcgaataactcacccgccgcgaaaactaaaaaaaaaaaaaaacaaaactaaaactcccctttcc

SEQ ID NO: 29645 - DNA, 573 bp, Artificial Sequence
  chemically treated genomic DNA (Homo sapiens) CpG-island No: 29645
atcgcgcggttcggtttgaagcgcggtcgtttttatttttttttcggggttggggtgggttatcggtcgataaatataggaggggtcgcgttttcgttttcgacgcgtttataaacgtcgtggtcgttcgaattttcggtttcgtagtattcggttataggatcgcgatattgtagggtttcggttttgcgcgttgcgtttcggtcgttcggcgcgggaggacgtgcggtcgcgtttgtttcggtggtcgcgcggggtaggtggttgcggggatcggaaggatggcgaggaagtcggaaagggttttttgagatgagagattattttcgttcgggttgcggtttttttttggagtcggttagtcggggttcggggagcggggtgcgtagggttcggggttacgttttgttatttgtagcgttcgggtgggtcgcgggggtttcggcgggacgcgttcggttttgtcgtaggagttaacgtagggggaatttttgtaggtgggagtattttagagcgtataagttatggtggttaaatagcggattcggatggttaacgagaagtatagtaaaa

SEQ ID NO: 29646 - DNA, 573 bp, Artificial Sequence
  chemically treated genomic DNA (Homo sapiens) CpG-island No: 29646
ttttactatacttctcgttaaccatccgaatccgctatttaaccaccataacttatacgctctaaaatactcccacctacaaaaattccccctacgttaactcctacgacaaaaccgaacgcgtcccgccgaaacccccgcgacccacccgaacgctacaaataacaaaacgtaaccccgaaccctacgcaccccgctccccgaaccccgactaaccgactccaaaaaaaaaccgcaacccgaacgaaaataatctctcatctcaaaaaaccctttccgacttcctcgccatccttccgatccccgcaaccacctaccccgcgcgaccaccgaaacaaacgcgaccgcacgtcctcccgcgccgaacgaccgaaacgcaacgcgcaaaaccgaaaccctacaatatcgcgatcctataaccgaatactacgaaaccgaaaattcgaacgaccacgacgtttataaacgcgtcgaaaacgaaaacgcgacccctcctatatttatcgaccgataacccaccccaaccccgaaaaaaaaataaaaacgaccgcgcttcaaaccgaaccgcgcgat

SEQ ID NO: 29647 - DNA, 573 bp, Artificial Sequence
  chemically treated genomic DNA (Homo sapiens) CpG-island No: 29647
ttttgttgtgtttttcgttagttattcggattcgttgtttggttattatggtttgtgcgttttgaaatgtttttatttgtaaggattttttttgcgttagtttttgcgatagggtcgagcgcgtttcgtcgaggttttcgcggtttattcgggcgttgtaggtggtaaggcgtggtttcgagttttgcgtatttcgtttttcgagtttcggttagtcgattttagagagaggtcgtagttcggacggaagtaattttttattttaggaaatttttttcgattttttcgttattttttcggttttcgtagttatttatttcgcgcggttatcgaggtaggcgcgatcgtacgttttttcgcgtcgagcggtcggagcgtagcgcgtagagtcggggttttgtagtgtcgcggttttgtagtcgaatgttgcggggtcgaaggttcgggcgattacggcgtttgtgagcgcgtcggggacggggacgcggttttttttgtgtttgtcggtcggtgatttattttagtttcggggaagggatgagggcggtcgcgttttaggtcgggtcgcgcggt

SEQ ID NO: 29648 - DNA, 573 bp, Artificial Sequence
  chemically treated genomic DNA (Homo sapiens) CpG-island No: 29648
accgcgcgacccgacctaaaacgcgaccgccctcatcccttccccgaaactaaaataaatcaccgaccgacaaacacaaaaaaaaccgcgtccccgtccccgacgcgctcacaaacgccgtaatcgcccgaaccttcgaccccgcaacattcgactacaaaaccgcgacactacaaaaccccgactctacgcgctacgctccgaccgctcgacgcgaaaaaacgtacgatcgcgcctacctcgataaccgcgcgaaataaataactacgaaaaccgaaaaaataacgaaaaaatcgaaaaaaatttcctaaaataaaaaattacttccgtccgaactacgacctctctctaaaatcgactaaccgaaactcgaaaaacgaaatacgcaaaactcgaaaccacgccttaccacctacaacgcccgaataaaccgcgaaaacctcgacgaaacgcgctcgaccctatcgcaaaaactaacgcaaaaaaaatccttacaaataaaaacatttcaaaacgcacaaaccataataaccaaacaacgaatccgaataactaacgaaaaacacaacaaaa

SEQ ID NO: 29649 - DNA, 1081 bp, Artificial Sequence
  chemically treated genomic DNA (Homo sapiens) CpG-island No: 29649
gcgtttcgagagttggtttttttttacgttgcgcgcgtattttttcgtttttatttttattcgttggcgtgtttagtggaacggagttttgtgttttcgttttaagttttcggatgtttattttttcgattcgttttcgttgtggtttcgttttcgcgcggtttttcgtgttacgttatcgtttgcgtcgttttcggaggcgtagcgggcgatgacgtagagggacgtgttttttatatgaggttggggagcggttgagtcggtttttttcgttcgttttttttttttttcgagcgtcgtttcggttgtatcgcgttcgtttcgagttttaggttcgtgttaagttagcgtcgtcgtcgtttttttttagtcgttattatgattatttatcgggattttattagtcgtgagtttttattgtattatttttattgtcgtatacgggggtttggggtgcgggtgggggcggggaaggcgtagtcgtcgcgggtttaggggacgtcggcggttttagtcgagcgcggaggggtcggtgttcggggttcgcgtttagttttggtgtgttacggaggggtagatttcgcgtgcggtcgtcggcgcgggaaatgcgggaaatggcggcgttaggcgtacggtgatgggcggttttgtgtattcggtagacgatgagatgtttttcgatatttataagattcgggagatcgcggacgggttgtgtttggaggtggaggggaaggtgagtcggtcgggtttgcgcgtgggggagttcgggtcgagcgggttcgggtttttttcgttttttcgtttgaggttgtgtaatttttttcgtcgttttttggcggaggagacgtttttttcgggtttgggtttttttagaaaattggaggcggagttgattttggaaataggttcgtcgattaggcgtttatttttttttcggagttgttcggatatgatgttttcgttttagagtttggagttttttcgtgttgttttgtttttatttattaatcggagtattatatgttcgtattggaatattttttatgattttatttttgtttcggttatagatattttt

SEQ ID NO: 29650 - DNA, 1081 bp, Artificial Sequence
  chemically treated genomic DNA (Homo sapiens) CpG-island No: 29650
aaaaatatctataaccgaaacaaaaataaaatcataaaaaatattccaatacgaacatataatactccgattaataaataaaaacaaaacaacacgaaaaaactccaaactctaaaacgaaaacatcatatccgaacaactccgaaaaaaaaataaacgcctaatcgacgaacctatttccaaaatcaactccgcctccaattttctaaaaaaacccaaacccgaaaaaaacgtctcctccgccaaaaaacgacgaaaaaaattacacaacctcaaacgaaaaaacgaaaaaaacccgaacccgctcgacccgaactcccccacgcgcaaacccgaccgactcaccttcccctccacctccaaacacaacccgtccgcgatctcccgaatcttataaatatcgaaaaacatctcatcgtctaccgaatacacaaaaccgcccatcaccgtacgcctaacgccgccatttcccgcatttcccgcgccgacgaccgcacgcgaaatctacccctccgtaacacaccaaaactaaacgcgaaccccgaacaccgacccctccgcgctcgactaaaaccgccgacgtcccctaaacccgcgacgactacgccttccccgcccccacccgcaccccaaacccccgtatacgacaataaaaataatacaataaaaactcacgactaataaaatcccgataaataatcataataacgactaaaaaaaaacgacgacgacgctaacttaacacgaacctaaaactcgaaacgaacgcgatacaaccgaaacgacgctcgaaaaaaaaaaaaaacgaacgaaaaaaaccgactcaaccgctccccaacctcatataaaaaacacgtccctctacgtcatcgcccgctacgcctccgaaaacgacgcaaacgataacgtaacacgaaaaaccgcgcgaaaacgaaaccacaacgaaaacgaatcgaaaaaataaacatccgaaaacttaaaacgaaaacacaaaactccgttccactaaacacgccaacgaataaaaataaaaacgaaaaaatacgcgcgcaacgtaaaaaaaaaccaactctcgaaacgc

SEQ ID NO: 29651 - DNA, 1081 bp, Artificial Sequence
  chemically treated genomic DNA (Homo sapiens) CpG-island No: 29651
aagagtgtttgtggtcggaataaaaatggggttataaaaagtgttttagtgcgggtatgtgatgtttcggttggtaagtggggataggataatacgaaaggattttaggttttaaagcgaaagtattatgttcggataatttcgggagaaggatgggcgtttagtcggcgggtttatttttaggattagtttcgtttttagttttttagaaaaatttaagttcggaaagagcgtttttttcgttaggaggcggcggggaggattgtataattttaggcgggggagcggaggaaattcgagttcgttcggttcggatttttttacgcgtaggttcgatcgatttatttttttttttatttttaggtataattcgttcgcgatttttcggattttgtagatgtcggagaatattttatcgtttgtcggatatatagagtcgtttattatcgtgcgtttggcgtcgttatttttcgtatttttcgcgtcggcggtcgtacgcgggatttgttttttcgtagtatattagagttgggcgcgagtttcgggtatcgattttttcgcgttcggttaagatcgtcggcgttttttaggttcgcgacggttgcgtttttttcgtttttattcgtattttagattttcgtgtgcggtagtaaggatagtgtagtgaggatttacggttgatgaggtttcggtagataattatgatggcgattgaagggagacgacgacggcgttagtttagtacgagtttgaaattcggagcgagcgcggtgtagtcggagcggcgttcggggggaggggggagcgggcggaaaaggtcgatttagtcgttttttaattttatatagagggtacgtttttttacgttatcgttcgttgcgttttcggaagcgacgtaggcggtgacgtggtacgaagagtcgcgcgggggcggggttatagcgggggcgagtcggggaggtgagtattcggggatttgaggcggagatataaggtttcgttttattgggtacgttagcgggtaggggtgggggcggggaggtgcgcgcgtagcgtgggaggaggttaattttcggggcgt

SEQ ID NO: 29652 - DNA, 1081 bp, Artificial Sequence
  chemically treated genomic DNA (Homo sapiens) CpG-island No: 29652
acgccccgaaaattaacctcctcccacgctacgcgcgcacctccccgcccccacccctacccgctaacgtacccaataaaacgaaaccttatatctccgcctcaaatccccgaatactcacctccccgactcgcccccgctataaccccgcccccgcgcgactcttcgtaccacgtcaccgcctacgtcgcttccgaaaacgcaacgaacgataacgtaaaaaaacgtaccctctatataaaattaaaaaacgactaaatcgaccttttccgcccgctcccccctccccccgaacgccgctccgactacaccgcgctcgctccgaatttcaaactcgtactaaactaacgccgtcgtcgtctcccttcaatcgccatcataattatctaccgaaacctcatcaaccgtaaatcctcactacactatccttactaccgcacacgaaaatctaaaatacgaataaaaacgaaaaaaacgcaaccgtcgcgaacctaaaaaacgccgacgatcttaaccgaacgcgaaaaaatcgatacccgaaactcgcgcccaactctaatatactacgaaaaaacaaatcccgcgtacgaccgccgacgcgaaaaatacgaaaaataacgacgccaaacgcacgataataaacgactctatatatccgacaaacgataaaatattctccgacatctacaaaatccgaaaaatcgcgaacgaattatacctaaaaataaaaaaaaaaataaatcgatcgaacctacgcgtaaaaaaatccgaaccgaacgaactcgaatttcctccgctcccccgcctaaaattatacaatcctccccgccgcctcctaacgaaaaaaacgctctttccgaacttaaatttttctaaaaaactaaaaacgaaactaatcctaaaaataaacccgccgactaaacgcccatccttctcccgaaattatccgaacataatactttcgctttaaaacctaaaatcctttcgtattatcctatccccacttaccaaccgaaacatcacatacccgcactaaaacactttttataaccccatttttattccgaccacaaacactctt

SEQ ID NO: 29653 - DNA, 613 bp, Artificial Sequence
  chemically treated genomic DNA (Homo sapiens) CpG-island No: 29653
ttttcgcgttgggcgtaggtcgttttatttgtcgagttcgtcggggtcgtttttgttcgttcggttaggttcgttagcgttttgttggcggttattgtcgtagtcgttttggtttaggcgcgtttcggcgttggagtagtagtagcgtaacgcgtagttgtcgtagtagatggtggcgtcgtcgtcgtcgaagcgttcgggatattggaagtcgatgcgttagacgttttgcgcgtttagttagtcgtggtagtattcgtcgttggttttcgttttcgtcgttagtagcgtagttagtagtagttgtaggagcgaagcggcgttttaggatgaggagacggacgagcggcgagcgttttatatggtattattttgggcgcggatagcgcgtttttagagagcgtaggacggttttcgagaagtcgtggtttcggcgattttcgggtttcgttattgattgtttcgcggcgtttttcgcgcgggttatttttttttgtcgcgataaataggaggcgacgacgtcgggttttaggtttaggagtttttaagttattttcgtttttagtcggtggttcggtttttttagggattgttttatgagttgtattcgttg

SEQ ID NO: 29654 - DNA, 613 bp, Artificial Sequence
  chemically treated genomic DNA (Homo sapiens) CpG-island No: 29654
caacgaatacaactcataaaacaatccctaaaaaaaccgaaccaccgactaaaaacgaaaataacttaaaaactcctaaacctaaaacccgacgtcgtcgcctcctatttatcgcgacaaaaaaaaataacccgcgcgaaaaacgccgcgaaacaatcaataacgaaacccgaaaatcgccgaaaccacgacttctcgaaaaccgtcctacgctctctaaaaacgcgctatccgcgcccaaaataataccatataaaacgctcgccgctcgtccgtctcctcatcctaaaacgccgcttcgctcctacaactactactaactacgctactaacgacgaaaacgaaaaccaacgacgaatactaccacgactaactaaacgcgcaaaacgtctaacgcatcgacttccaatatcccgaacgcttcgacgacgacgacgccaccatctactacgacaactacgcgttacgctactactactccaacgccgaaacgcgcctaaaccaaaacgactacgacaataaccgccaacaaaacgctaacgaacctaaccgaacgaacaaaaacgaccccgacgaactcgacaaataaaacgacctacgcccaacgcgaaaa

SEQ ID NO: 29655 - DNA, 613 bp, Artificial Sequence
  chemically treated genomic DNA (Homo sapiens) CpG-island No: 29655
tagcgagtgtaatttataaggtagtttttaaggggatcgggttatcggttgaggacggggatggtttaggagtttttggatttagggttcggcgtcgtcgttttttgtttgtcgcggtagaggggagtggttcgcgcggaaagcgtcgcgggatagttagtgacgaggttcgggggtcgtcggggttacgatttttcggagatcgttttgcgttttttggagacgcgttgttcgcgtttagggtggtgttatgtggggcgttcgtcgttcgttcgtttttttattttggaacgtcgtttcgtttttgtagttgttgttggttgcgttgttggcggcgggggcgagggttagcggcgagtattgttacggttggttggacgcgtagggcgtttggcgtatcggtttttagtgtttcgagcgtttcgacggcggcgacgttattatttgttgcggtagttgcgcgttgcgttattgttgttttagcgtcgaggcgcgtttggattagggcggttgcgataatgatcgttagtagggcgttggcgagtttggtcgggcggataaagacggtttcgacgggttcggtaggtagggcggtttgcgtttagcgcgaaag

SEQ ID NO: 29656 - DNA, 613 bp, Artificial Sequence
  chemically treated genomic DNA (Homo sapiens) CpG-island No: 29656
ctttcgcgctaaacgcaaaccgccctacctaccgaacccgtcgaaaccgtctttatccgcccgaccaaactcgccaacgccctactaacgatcattatcgcaaccgccctaatccaaacgcgcctcgacgctaaaacaacaataacgcaacgcgcaactaccgcaacaaataataacgtcgccgccgtcgaaacgctcgaaacactaaaaaccgatacgccaaacgccctacgcgtccaaccaaccgtaacaatactcgccgctaaccctcgcccccgccgccaacaacgcaaccaacaacaactacaaaaacgaaacgacgttccaaaataaaaaaacgaacgaacgacgaacgccccacataacaccaccctaaacgcgaacaacgcgtctccaaaaaacgcaaaacgatctccgaaaaatcgtaaccccgacgacccccgaacctcgtcactaactatcccgcgacgctttccgcgcgaaccactcccctctaccgcgacaaacaaaaaacgacgacgccgaaccctaaatccaaaaactcctaaaccatccccgtcctcaaccgataacccgatccccttaaaaactaccttataaattacactcgcta

SEQ ID NO: 29657 - DNA, 663 bp, Artificial Sequence
  chemically treated genomic DNA (Homo sapiens) CpG-island No: 29657
agtcgatcgggtcggttcgcgggcgtggttggttttggttttggcggcggtcgggttttttagattttcggtttttttcgtcggttaggttttcgggtcgtcgtttcgatatcgatggaacgcggaggaggaagggggagttaggcgattgatcggcgatatgagtcgttttattttcggttcggtcgattcgcgtttttcgttttttttggggtcgtttggagtttttcgttttttatttattttttcggttcggcgttttttttattttttttattttttttatttttttttttttttttttttttttttcggtcgtggtttttgtttcggttttgcgcggcgatagtagcgggagcggcggcggtaggggtttcgggagcggcggcggcgttttttttagaacgcgtacgtacgtattacgtaggtttcgttttttggttttgtttcgtttttttaagttggcgatggttgggtttcggtttcgttttttttacggcgtttcggagttcgtttaaaggagtcgcgtatattggagtcgggaaagtttggagttatcgggaaggggcggggagttttagttttgcgtagggcgggatgggaggtgggtaagatcggaaaaaagatgaggaagggtttaaagatttaagaagagaatttgga

SEQ ID NO: 29658 - DNA, 663 bp, Artificial Sequence
  chemically treated genomic DNA (Homo sapiens) CpG-island No: 29658
tccaaattctcttcttaaatctttaaacccttcctcatcttttttccgatcttacccacctcccatcccgccctacgcaaaactaaaactccccgccccttcccgataactccaaactttcccgactccaatatacgcgactcctttaaacgaactccgaaacgccgtaaaaaaaacgaaaccgaaacccaaccatcgccaacttaaaaaaacgaaacaaaaccaaaaaacgaaacctacgtaatacgtacgtacgcgttctaaaaaaaacgccgccgccgctcccgaaacccctaccgccgccgctcccgctactatcgccgcgcaaaaccgaaacaaaaaccacgaccgaaaaaaaaaaaaaaaaaaaaaaaaaaataaaaaaaataaaaaaaataaaaaaaacgccgaaccgaaaaaataaataaaaaacgaaaaactccaaacgaccccaaaaaaaacgaaaaacgcgaatcgaccgaaccgaaaataaaacgactcatatcgccgatcaatcgcctaactcccccttcctcctccgcgttccatcgatatcgaaacgacgacccgaaaacctaaccgacgaaaaaaaccgaaaatctaaaaaacccgaccgccgccaaaaccaaaaccaaccacgcccgcgaaccgacccgatcgact

SEQ ID NO: 29659 - DNA, 663 bp, Artificial Sequence
  chemically treated genomic DNA (Homo sapiens) CpG-island No: 29659
tttaaattttttttttgaatttttggatttttttttatttttttttcggttttatttattttttatttcgttttacgtaaagttaaaatttttcgttttttttcggtagttttaggttttttcggttttagtgtgcgcggtttttttaagcggatttcggaacgtcgtggggaaggcggggtcgaagtttagttatcgttaatttggaggggcggggtagaattagggggcggggtttgcgtggtgcgtgcgtgcgcgttttggaggaggcgtcgtcgtcgttttcgaggtttttgtcgtcgtcgttttcgttgttgtcgtcgcgtagagtcggagtaggagttacggtcgagaggagggaggaggaggaggaggaggtggagaaggtggaggaggtggaggaggcgtcggatcgggggggtgagtaaggggcggggagttttagacggttttagagggagcggggggcgcgggtcggtcgagtcgagggtgaggcggtttatgtcgtcggttagtcgtttggttttttttttttttttcgcgttttatcggtgtcggggcggcggttcgggggtttggtcggcgggaggggtcggagatttgggaggttcggtcgtcgttagggttagagttaattacgttcgcggatcgattcggtcgatt

SEQ ID NO: 29660 - DNA, 663 bp, Artificial Sequence
  chemically treated genomic DNA (Homo sapiens) CpG-island No: 29660
aatcgaccgaatcgatccgcgaacgtaattaactctaaccctaacgacgaccgaacctcccaaatctccgacccctcccgccgaccaaacccccgaaccgccgccccgacaccgataaaacgcgaaaaaaaaaaaaaaaaccaaacgactaaccgacgacataaaccgcctcaccctcgactcgaccgacccgcgccccccgctccctctaaaaccgtctaaaactccccgccccttactcacccccccgatccgacgcctcctccacctcctccaccttctccacctcctcctcctcctcctccctcctctcgaccgtaactcctactccgactctacgcgacgacaacaacgaaaacgacgacgacaaaaacctcgaaaacgacgacgacgcctcctccaaaacgcgcacgcacgcaccacgcaaaccccgccccctaattctaccccgcccctccaaattaacgataactaaacttcgaccccgccttccccacgacgttccgaaatccgcttaaaaaaaccgcgcacactaaaaccgaaaaaacctaaaactaccgaaaaaaaacgaaaaattttaactttacgtaaaacgaaataaaaaataaataaaaccgaaaaaaaaataaaaaaaaatccaaaaattcaaaaaaaaaatttaaa

SEQ ID NO: 29661 - DNA, 514 bp, Artificial Sequence
  chemically treated genomic DNA (Homo sapiens) CpG-island No: 29661
taggggaaaaaggcgagggcgggggagtgagaggtgggggaaaagaaagaagtttaggagcgagaagaaacgaggggagaggcgagtcggaaagaatttttagtcgagaaacgaaaaaaacgacgtttacgggagaggtacgggagaggaggagagcggacggagggggtaacgtcgtaaaatttcgaatagtatttaaggtataggatgcgacgagcgagatcgagagggggagcgaaacgggaaagggaaggaacgaagtcgatacggttcggaggattacgaaataacgggtcgggaataagggaggttagtataataagacgggggagtgagcgagggagtaggtcggttcggggcgtagcgcggcggggaggcgggagacggggcggtcgaggggacgaggggggcgggagaggacgatagcgcggagaacgagacgggggcggatcgtacggataaagaaaatcgttaaatagaaaaaaagagattagtaattcgagtattaatatcg

SEQ ID NO: 29662 - DNA, 514 bp, Artificial Sequence
  chemically treated genomic DNA (Homo sapiens) CpG-island No: 29662
cgatattaatactcgaattactaatctctttttttctatttaacgattttctttatccgtacgatccgcccccgtctcgttctccgcgctatcgtcctctcccgcccccctcgtcccctcgaccgccccgtctcccgcctccccgccgcgctacgccccgaaccgacctactccctcgctcactcccccgtcttattatactaacctcccttattcccgacccgttatttcgtaatcctccgaaccgtatcgacttcgttccttccctttcccgtttcgctccccctctcgatctcgctcgtcgcatcctataccttaaatactattcgaaattttacgacgttaccccctccgtccgctctcctcctctcccgtacctctcccgtaaacgtcgtttttttcgtttctcgactaaaaattctttccgactcgcctctcccctcgtttcttctcgctcctaaacttctttcttttcccccacctctcactcccccgccctcgcctttttccccta

SEQ ID NO: 29663 - DNA, 514 bp, Artificial Sequence
  chemically treated genomic DNA (Homo sapiens) CpG-island No: 29663
cggtgttggtgttcgggttattggtttttttttttttatttagcggttttttttgttcgtgcggttcgttttcgtttcgtttttcgcgttgtcgttttttttcgtttttttcgttttttcggtcgtttcgtttttcgttttttcgtcgcgttgcgtttcgggtcggtttgttttttcgtttattttttcgttttgttgtgttggttttttttgttttcggttcgttgtttcgtggtttttcgggtcgtgtcggtttcgttttttttttttttcgtttcgttttttttttcggtttcgttcgtcgtattttgtgttttgggtgttgttcggggttttgcggcgttatttttttcgttcgttttttttttttttcgtgtttttttcgtaggcgtcgtttttttcgtttttcggttgggggtttttttcggttcgttttttttttcgttttttttcgtttttgggtttttttttttttttttattttttattttttcgttttcgtttttttttttta

SEQ ID NO: 29664 - DNA, 514 bp, Artificial Sequence
  chemically treated genomic DNA (Homo sapiens) CpG-island No: 29664
taaaaaaaaaaaacgaaaacgaaaaaataaaaaataaaaaaaaaaaaaaaaacccaaaaacgaaaaaaaacgaaaaaaaaaacgaaccgaaaaaaacccccaaccgaaaaacgaaaaaaacgacgcctacgaaaaaaacacgaaaaaaaaaaaaaacgaacgaaaaaaataacgccgcaaaaccccgaacaacacccaaaacacaaaatacgacgaacgaaaccgaaaaaaaaaacgaaacgaaaaaaaaaaaaaacgaaaccgacacgacccgaaaaaccacgaaacaacgaaccgaaaacaaaaaaaaccaacacaacaaaacgaaaaaataaacgaaaaaacaaaccgacccgaaacgcaacgcgacgaaaaaacgaaaaacgaaacgaccgaaaaaacgaaaaaaacgaaaaaaaacgacaacgcgaaaaacgaaacgaaaacgaaccgcacgaacaaaaaaaaccgctaaataaaaaaaaaaaaaccaataacccgaacaccaacaccg

SEQ ID NO: 29665 - DNA, 2561 bp, Artificial Sequence
  chemically treated genomic DNA (Homo sapiens) CpG-island No: 29665
ggcgtgcgcgtcgcggagtcgttgttgtttttcgaagtgataggcgttttttttagtggcgttgtcgttttttgagttcggtatttcggtcgcggcgatcgtaggcggaggcgcgttcgtcgcggggttgttaaagggcgttttgtcggtgttagggaaggtgagtacgtcgaatatgttgggtttgggttcggtttttcgggcggtttttttcggggagtcgggagtcgaggtttcgtcgttcgtcgtttcgggtcgtttttttcggagggttttttttttgcgtattttttttttgcggcggttgtaggtggtggcgatggcgatgatggcggttagtagtagcgtgtagttttcggttagtacgatgatgacgattagcggcgtgttttattgtagtatcgattcggatatttcgagtcgagagttaggcgggcgggaacgtttcgggttttttgtattggtaggcgtagtcggtttacgttcgttttttgttgttattacgaagttgatagttgcggtggtggtgagcgggggacggtcgtcgtcggatatgattaggagcgttttgaatacgcgatcgggtggtttttgcgagaggtcgtcggtgagtagtatttttttcgtgcggcggtcgatggcgaaggtttcgcgcggtttttgttgttgtagttcgaacgttagtttttcgttggttttttcgtttgtatttcgggtttgtatacgggttataatcgtgttttttgcggtgcgtttaggtatcgttatttttagggagttattggttggcgtcgggtgtattaggattggcgtatggtcgttttggtttagtacgcgtatttgtattagggcgttgttggaaagttgaggggagtcgtcgtcgttagtttggatgcgaacgtcgagttggcgtagcgttttatagtcgaagttgcgtagcgcgtagatggtttcggtagttgggtttatcgagatataagtggatacggcgttttcggcgcggtttatttcggtttttagtagtcggtaggtgatttggtcgttgcggtttaggtttcggtcgcgggcggttatcgtggttaggtaggcgtttggcgggttgttttcgcgtatcgatattttatagatcggtcgcgtgaagagcggcgcgttgtcgttttcgtcgtttatacgtatcgtgtagggtcgtattgtgcgtagcgggggcgcgtcgcgattttcggttattagcgttaagttgtattcggcgatgcgttcgcggtttagcgacgtcgcggttattattaggtagttgttcgcgtaggtcggttgtagtcggaagtgttcgtgtttatagagggcgtagcgtatttgttcgttggcgttcgagtttttgttcgaggtgttgattagggttattaggttttcgcgcgtcgtttttttcggtattagcgaagtggtattagttttcggcgtttcggttttcgtcggcgagttagcgttcgttttttcgagtgtagcggcggcggcggtagcggcgaagggtgaggttgtcggcgcgtttggggcggttagcggggtgatggcgatgtcgggtgcgttgttattgacgtttcggatgcgtacgatgattttgtaggtggtagcgcggggttcgggttcgcggttttgcgttcgtacgtttagttcgtaggtgttttgacgttcgtagtttacgggttcggttagggtgaggcggtttgatcgcgggttaagtcgaaagaggcggcgcgttttcggcggggtgcgggcgttaaatgcgaatattacgtcgtcgttaggtttttcgtcggggtcggttgcgtttaggtcgagaagtagggagtttacgggcgcgtttttcgttagttttatttcggttacggcgttttgcgggaaggtcgggttgtggttattcgtatttaggacgcgtacgttgagggtagtcgtggcggagcgcggcgggcggtcgtcgttttgggttattagttttaggttgtaggcggtttggttttcgcggtttagtttttgtagtagtattaggtttgcgtattgagcgtcgttcgttcgcgtttgtagttttacgcgaaaggggttgtgcggttcggttaggcgtacggtttgtagttcgttggcgtttacgttttcgtttatcggtatttttaaggggatgcgcgtgtttattgtcgtattttcggatatttttatcgggatttgggttttggggaagcgcggcgcgtggtcgttgacgttttttatttttatttttacgtgtattagtcggaattgtttttgcgagaagttgattatatcgaaggttagtacgtattgcggggtttggttatatagtcgttcgcggtttaggtcggcgttttcgacggttagttgttcgtcgttttcgcgtattcggagtagagagttgttgaattgttttattaggcggaagtttgtgttattcgatatttttatatgtaggttttcggttagggtttcgatgatcgtgtcgggggtatttttttcgaaggtgttgtatcggattgttttgttttgggttattgagagta

SEQ ID NO: 29666 - DNA, 2561 bp, Artificial Sequence
  chemically treated genomic DNA (Homo sapiens) CpG-island No: 29666
tactctcaataacccaaaacaaaacaatccgatacaacaccttcgaaaaaaatacccccgacacgatcatcgaaaccctaaccgaaaacctacatataaaaatatcgaataacacaaacttccgcctaataaaacaattcaacaactctctactccgaatacgcgaaaacgacgaacaactaaccgtcgaaaacgccgacctaaaccgcgaacgactatataaccaaaccccgcaatacgtactaaccttcgatataatcaacttctcgcaaaaacaattccgactaatacacgtaaaaataaaaataaaaaacgtcaacgaccacgcgccgcgcttccccaaaacccaaatcccgataaaaatatccgaaaatacgacaataaacacgcgcatccccttaaaaataccgataaacgaaaacgtaaacgccaacgaactacaaaccgtacgcctaaccgaaccgcacaacccctttcgcgtaaaactacaaacgcgaacgaacgacgctcaatacgcaaacctaatactactacaaaaactaaaccgcgaaaaccaaaccgcctacaacctaaaactaataacccaaaacgacgaccgcccgccgcgctccgccacgactaccctcaacgtacgcgtcctaaatacgaataaccacaacccgaccttcccgcaaaacgccgtaaccgaaataaaactaacgaaaaacgcgcccgtaaactccctacttctcgacctaaacgcaaccgaccccgacgaaaaacctaacgacgacgtaatattcgcatttaacgcccgcaccccgccgaaaacgcgccgcctctttcgacttaacccgcgatcaaaccgcctcaccctaaccgaacccgtaaactacgaacgtcaaaacacctacgaactaaacgtacgaacgcaaaaccgcgaacccgaaccccgcgctaccacctacaaaatcatcgtacgcatccgaaacgtcaataacaacgcacccgacatcgccatcaccccgctaaccgccccaaacgcgccgacaacctcacccttcgccgctaccgccgccgccgctacactcgaaaaaacgaacgctaactcgccgacgaaaaccgaaacgccgaaaactaataccacttcgctaataccgaaaaaaacgacgcgcgaaaacctaataaccctaatcaacacctcgaacaaaaactcgaacgccaacgaacaaatacgctacgccctctataaacacgaacacttccgactacaaccgacctacgcgaacaactacctaataataaccgcgacgtcgctaaaccgcgaacgcatcgccgaatacaacttaacgctaataaccgaaaatcgcgacgcgcccccgctacgcacaatacgaccctacacgatacgtataaacgacgaaaacgacaacgcgccgctcttcacgcgaccgatctataaaatatcgatacgcgaaaacaacccgccaaacgcctacctaaccacgataaccgcccgcgaccgaaacctaaaccgcaacgaccaaatcacctaccgactactaaaaaccgaaataaaccgcgccgaaaacgccgtatccacttatatctcgataaacccaactaccgaaaccatctacgcgctacgcaacttcgactataaaacgctacgccaactcgacgttcgcatccaaactaacgacgacgactcccctcaactttccaacaacgccctaatacaaatacgcgtactaaaccaaaacgaccatacgccaatcctaatacacccgacgccaaccaataactccctaaaaataacgatacctaaacgcaccgcaaaaaacacgattataacccgtatacaaacccgaaatacaaacgaaaaaaccaacgaaaaactaacgttcgaactacaacaacaaaaaccgcgcgaaaccttcgccatcgaccgccgcacgaaaaaaatactactcaccgacgacctctcgcaaaaaccacccgatcgcgtattcaaaacgctcctaatcatatccgacgacgaccgtcccccgctcaccaccaccgcaactatcaacttcgtaataacaacaaaaaacgaacgtaaaccgactacgcctaccaatacaaaaaacccgaaacgttcccgcccgcctaactctcgactcgaaatatccgaatcgatactacaataaaacacgccgctaatcgtcatcatcgtactaaccgaaaactacacgctactactaaccgccatcatcgccatcgccaccacctacaaccgccgcaaaaaaaaaatacgcaaaaaaaaaaccctccgaaaaaaacgacccgaaacgacgaacgacgaaacctcgactcccgactccccgaaaaaaaccgcccgaaaaaccgaacccaaacccaacatattcgacgtactcaccttccctaacaccgacaaaacgccctttaacaaccccgcgacgaacgcgcctccgcctacgatcgccgcgaccgaaataccgaactcaaaaaacgacaacgccactaaaaaaaacgcctatcacttcgaaaaacaacaacgactccgcgacgcgcacgcc

SEQ ID NO: 29667 - DNA, 2561 bp, Artificial Sequence
  chemically treated genomic DNA (Homo sapiens) CpG-island No: 29667
tgtttttagtggtttagagtaaaatagttcgatatagtattttcgaggaggatgttttcggtacggttatcgggattttggtcgaggatttgtatatgaaagtatcgggtgatataagttttcgtttgatgaagtaatttaatagttttttgtttcgggtgcgcgaaggcgacgggtagttgatcgtcggggacgtcggtttggatcgcgagcggttgtgtggttaggtttcgtagtgcgtgttggttttcgatgtggttagtttttcgtaggagtagtttcggttggtgtacgtggaggtagaggtgagggacgttaacgattacgcgtcgcgtttttttagggtttagatttcggtagaggtgttcgagggtgcggtagtgggtacgcgtatttttttggaggtgtcggtggacgaggacgtgggcgttaacgggttgtagatcgtgcgtttggtcgagtcgtatagtttttttcgcgtggagttgtagacgcgagcggacggcgtttagtgcgtagatttggtgttgttgtaggagttggatcgcgagagttaggtcgtttatagtttggagttggtggtttaggacggcggtcgttcgtcgcgtttcgttacggttgtttttagcgtgcgcgttttggatgcgaatgattatagttcggttttttcgtagggcgtcgtggtcgaagtggagttggcggaagacgcgttcgtgggttttttgtttttcgatttggacgtagtcgatttcgacgagggatttaacggcgacgtggtgttcgtatttggcgttcgtatttcgtcggaggcgcgtcgtttttttcggtttgattcgcgattaggtcgttttattttggtcgggttcgtggattacgagcgttaggatatttacgagttggacgtgcgggcgtaggatcgcggattcgggtttcgcgttgttatttgtaaggttatcgtgcgtattcgagacgttaatgataacgtattcgatatcgttattatttcgttggtcgttttaggcgcgtcggtaattttatttttcgtcgttgtcgtcgtcgtcgttgtattcgggggagcggacgttagttcgtcggcgggagtcgggacgtcggaggttggtgttatttcgttggtgtcggagggggcggcgcgcgagagtttggtggttttggttagtatttcggatagggattcgggcgttaacgggtaagtgcgttgcgttttttatgggtacgagtattttcggttgtagtcggtttacgcgggtagttatttggtggtgatcgcggcgtcgttggatcgcgaacgtatcgtcgagtataatttgacgttggtggtcgaggatcgcggcgcgttttcgttgcgtatagtgcggttttatacggtgcgtgtgggcgacgagaacgataacgcgtcgttttttacgcggtcggtttatgaggtgtcggtgcgcgagaataattcgttaggcgtttatttggttacggtggtcgttcgcgatcgggatttgggtcgtaacggttaggttatttatcggttgttggaggtcgaggtgggtcgcgtcgggggcgtcgtgtttatttatgtttcggtggatttagttatcggagttatttacgcgttgcgtagtttcgattatgagacgttgcgttaattcgacgttcgtatttaagttagcgacggcggttttttttagttttttagtagcgttttagtgtaagtgcgcgtgttggattagaacgattatgcgttagttttggtgtattcggcgttagttaatggttttttagaagtggcggtgtttgggcgtatcgtaaaggatacggttgtggttcgtgtgtaggttcgggatgtagacgagggagttaacggggagttggcgttcgagttgtagtagtaggagtcgcgcgaagttttcgttatcggtcgtcgtacgggggagatattgtttatcggcgatttttcgtaggagttattcggtcgcgtgtttagggcgtttttggttatattcgacggcggtcgtttttcgtttattattatcgtaattgttagtttcgtggtaatagtagggggcgggcgtgggtcggttgcgtttgttagtgtaggaagttcggagcgttttcgttcgtttggttttcggttcggggtgttcgggtcggtgttgtaatgggatacgtcgttgatcgttattatcgtgttggtcgggagttgtacgttgttgttggtcgttattatcgttatcgttattatttgtaatcgtcgtaagaaggaggtgcgtaaagggggggtttttcgggaagagcggttcggggcggcgggcggcggagtttcggttttcggtttttcggaggaggtcgttcggggagtcgggtttaggtttaatatgttcgacgtgtttattttttttggtatcggtaaagcgttttttggtagtttcgcggcggacgcgttttcgtttgcggtcgtcgcggtcgaagtgtcgggtttagagggcggtagcgttattggggaaagcgtttgttatttcgaggggtagtagcggtttcgcggcgcgtacgtt

SEQ ID NO: 29668 - DNA, 2561 bp, Artificial Sequence
  chemically treated genomic DNA (Homo sapiens) CpG-island No: 29668
aacgtacgcgccgcgaaaccgctactacccctcgaaataacaaacgctttccccaataacgctaccgccctctaaacccgacacttcgaccgcgacgaccgcaaacgaaaacgcgtccgccgcgaaactaccaaaaaacgctttaccgataccaaaaaaaataaacacgtcgaacatattaaacctaaacccgactccccgaacgacctcctccgaaaaaccgaaaaccgaaactccgccgcccgccgccccgaaccgctcttcccgaaaaaccccccctttacgcacctccttcttacgacgattacaaataataacgataacgataataacgaccaacaacaacgtacaactcccgaccaacacgataataacgatcaacgacgtatcccattacaacaccgacccgaacaccccgaaccgaaaaccaaacgaacgaaaacgctccgaacttcctacactaacaaacgcaaccgacccacgcccgccccctactattaccacgaaactaacaattacgataataataaacgaaaaacgaccgccgtcgaatataaccaaaaacgccctaaacacgcgaccgaataactcctacgaaaaatcgccgataaacaatatctcccccgtacgacgaccgataacgaaaacttcgcgcgactcctactactacaactcgaacgccaactccccgttaactccctcgtctacatcccgaacctacacacgaaccacaaccgtatcctttacgatacgcccaaacaccgccacttctaaaaaaccattaactaacgccgaatacaccaaaactaacgcataatcgttctaatccaacacgcgcacttacactaaaacgctactaaaaaactaaaaaaaaccgccgtcgctaacttaaatacgaacgtcgaattaacgcaacgtctcataatcgaaactacgcaacgcgtaaataactccgataactaaatccaccgaaacataaataaacacgacgcccccgacgcgacccacctcgacctccaacaaccgataaataacctaaccgttacgacccaaatcccgatcgcgaacgaccaccgtaaccaaataaacgcctaacgaattattctcgcgcaccgacacctcataaaccgaccgcgtaaaaaacgacgcgttatcgttctcgtcgcccacacgcaccgtataaaaccgcactatacgcaacgaaaacgcgccgcgatcctcgaccaccaacgtcaaattatactcgacgatacgttcgcgatccaacgacgccgcgatcaccaccaaataactacccgcgtaaaccgactacaaccgaaaatactcgtacccataaaaaacgcaacgcacttacccgttaacgcccgaatccctatccgaaatactaaccaaaaccaccaaactctcgcgcgccgccccctccgacaccaacgaaataacaccaacctccgacgtcccgactcccgccgacgaactaacgtccgctcccccgaatacaacgacgacgacgacaacgacgaaaaataaaattaccgacgcgcctaaaacgaccaacgaaataataacgatatcgaatacgttatcattaacgtctcgaatacgcacgataaccttacaaataacaacgcgaaacccgaatccgcgatcctacgcccgcacgtccaactcgtaaatatcctaacgctcgtaatccacgaacccgaccaaaataaaacgacctaatcgcgaatcaaaccgaaaaaaacgacgcgcctccgacgaaatacgaacgccaaatacgaacaccacgtcgccgttaaatccctcgtcgaaatcgactacgtccaaatcgaaaaacaaaaaacccacgaacgcgtcttccgccaactccacttcgaccacgacgccctacgaaaaaaccgaactataatcattcgcatccaaaacgcgcacgctaaaaacaaccgtaacgaaacgcgacgaacgaccgccgtcctaaaccaccaactccaaactataaacgacctaactctcgcgatccaactcctacaacaacaccaaatctacgcactaaacgccgtccgctcgcgtctacaactccacgcgaaaaaaactatacgactcgaccaaacgcacgatctacaacccgttaacgcccacgtcctcgtccaccgacacctccaaaaaaatacgcgtacccactaccgcaccctcgaacacctctaccgaaatctaaaccctaaaaaaacgcgacgcgtaatcgttaacgtccctcacctctacctccacgtacaccaaccgaaactactcctacgaaaaactaaccacatcgaaaaccaacacgcactacgaaacctaaccacacaaccgctcgcgatccaaaccgacgtccccgacgatcaactacccgtcgccttcgcgcacccgaaacaaaaaactattaaattacttcatcaaacgaaaacttatatcacccgatactttcatatacaaatcctcgaccaaaatcccgataaccgtaccgaaaacatcctcctcgaaaatactatatcgaactattttactctaaaccactaaaaaca

SEQ ID NO: 29669 - DNA, 865 bp, Artificial Sequence
  chemically treated genomic DNA (Homo sapiens) CpG-island No: 29669
agaggattcgggttaaggcgttgagtcgttaatatgaaggtcggttttagaagaggattcgggttaaggcgttgagtcgttaatatgaaggtcgggtttagaagaggattcgggttaaggcgttgagttattaacgtgaaggttggttttagaagaggattcgggttaaggcgttgagtcgttaacgtgaaggtcgggtttagaagaggattcgggttaaggcgttgagtcgttaacgtgaaggtcgggtttagaagaggattcgggttaaggcgttgagtcgttaacgtgaaggtcgggtttagaagaggattcgggttaaggcgttgagtcgttaacgtgaaggtcgggtttagaagaggattcgggttaaggcgttgagtcgttaacgtgaaggtcgggtttagaagaggattcgggttaaggcgttgagtcgttaacgtgaaggtcgggtttagaagaggattcgggttaaggcgttgagtcgttaacgtgaaggtcgggtttagaagaggattcgggttaaggcgttgagtcgttaacgtgaaggtcgggtttagaagaggattcgggttaaggcgttgagtcgttaacgtgaaggtcgggtttagaagaggattcgggttaaggcgttgagtcgttaacgtgaaggtcgggtttagaagaggattcgggttaaggcgttgagtcgttaacgtgaaggtcgggtttagaagaggattcgggttaaggcgttgagtcgttaacgtgaaggtcgggtttagaagaggattcgggttaaggcgttgagtttcgtttggggttgttgtgtattttagttggagatgttataggggagggtggaagcggatattgggagttgtag

SEQ ID NO: 29670 - DNA, 865 bp, Artificial Sequence
  chemically treated genomic DNA (Homo sapiens) CpG-island No: 29670
ctacaactcccaatatccgcttccaccctcccctataacatctccaactaaaatacacaacaaccccaaacgaaactcaacgccttaacccgaatcctcttctaaacccgaccttcacgttaacgactcaacgccttaacccgaatcctcttctaaacccgaccttcacgttaacgactcaacgccttaacccgaatcctcttctaaacccgaccttcacgttaacgactcaacgccttaacccgaatcctcttctaaacccgaccttcacgttaacgactcaacgccttaacccgaatcctcttctaaacccgaccttcacgttaacgactcaacgccttaacccgaatcctcttctaaacccgaccttcacgttaacgactcaacgccttaacccgaatcctcttctaaacccgaccttcacgttaacgactcaacgccttaacccgaatcctcttctaaacccgaccttcacgttaacgactcaacgccttaacccgaatcctcttctaaacccgaccttcacgttaacgactcaacgccttaacccgaatcctcttctaaacccgaccttcacgttaacgactcaacgccttaacccgaatcctcttctaaacccgaccttcacgttaacgactcaacgccttaacccgaatcctcttctaaacccgaccttcacgttaacgactcaacgccttaacccgaatcctcttctaaaaccaaccttcacgttaataactcaacgccttaacccgaatcctcttctaaacccgaccttcatattaacgactcaacgccttaacccgaatcctcttctaaaaccgaccttcatattaacgactcaacgccttaacccgaatcctct

SEQ ID NO: 29671 - DNA, 865 bp, Artificial Sequence
  chemically treated genomic DNA (Homo sapiens) CpG-island No: 29671
ttgtagtttttagtattcgtttttatttttttttgtgatatttttaattgaaatgtatagtaattttaaacggaatttagcgttttagttcgaatttttttttgagttcggtttttacgttagcgatttagcgttttagttcgaatttttttttgggttcggtttttacgttagcgatttagcgttttagttcgaatttttttttgggttcggtttttacgttagcgatttagcgttttagttcgaatttttttttgggttcggtttttacgttagcgatttagcgttttagttcgaatttttttttgggttcggtttttacgttagcgatttagcgttttagttcgaatttttttttgggttcggtttttacgttagcgatttagcgttttagttcgaatttttttttgggttcggtttttacgttagcgatttagcgttttagttcgaatttttttttgggttcggtttttacgttagcgatttagcgttttagttcgaatttttttttgggttcggtttttacgttagcgatttagcgttttagttcgaatttttttttgggttcggtttttacgttagcgatttagcgttttagttcgaatttttttttgggttcggtttttacgttagcgatttagcgttttagttcgaatttttttttgggttcggtttttacgttagcgatttagcgttttagttcgaatttttttttgaggttagtttttacgttagtgatttagcgttttagttcgaatttttttttgagttcggtttttatgttagcgatttagcgttttagttcgaatttttttttgaggtcggtttttatgttagcgatttagcgttttagttcgaatttttt

SEQ ID NO: 29672 - DNA, 865 bp, Artificial Sequence
  chemically treated genomic DNA (Homo sapiens) CpG-island No: 29672
aaaaaattcgaactaaaacgctaaatcgctaacataaaaaccgacctcaaaaaaaaattcgaactaaaacgctaaatcgctaacataaaaaccgaactcaaaaaaaaattcgaactaaaacgctaaatcactaacgtaaaaactaacctcaaaaaaaaattcgaactaaaacgctaaatcgctaacgtaaaaaccgaacccaaaaaaaaattcgaactaaaacgctaaatcgctaacgtaaaaaccgaacccaaaaaaaaattcgaactaaaacgctaaatcgctaacgtaaaaaccgaacccaaaaaaaaattcgaactaaaacgctaaatcgctaacgtaaaaaccgaacccaaaaaaaaattcgaactaaaacgctaaatcgctaacgtaaaaaccgaacccaaaaaaaaattcgaactaaaacgctaaatcgctaacgtaaaaaccgaacccaaaaaaaaattcgaactaaaacgctaaatcgctaacgtaaaaaccgaacccaaaaaaaaattcgaactaaaacgctaaatcgctaacgtaaaaaccgaacccaaaaaaaaattcgaactaaaacgctaaatcgctaacgtaaaaaccgaacccaaaaaaaaattcgaactaaaacgctaaatcgctaacgtaaaaaccgaacccaaaaaaaaattcgaactaaaacgctaaatcgctaacgtaaaaaccgaacccaaaaaaaaattcgaactaaaacgctaaatcgctaacgtaaaaaccgaactcaaaaaaaaattcgaactaaaacgctaaattccgtttaaaattactatacatttcaattaaaaatatcacaaaaaaaaataaaaacgaatactaaaaactacaa

SEQ ID NO: 29673 - DNA, 527 bp, Artificial Sequence
  chemically treated genomic DNA (Homo sapiens) CpG-island No: 29673
gttcgcgtcgtcgaattgttcggggattattcggtttatgagaagtcgtcggtagtttatgattggagagcgtcgtcggaggtcgtcgttttgcgatggaaaggaacggtttagacggatgtatttacggtcgatttaaaggttttggcgtggatattcgttttgtaaattatttagaagttaatagtggttattacgtgcgacgggaaaacgggatcgatagatttattattttgttattttaatcggaagttttttatcgtttcgttcggaagtttgatttgagcggaagtttcgtttttgcgtcgagttgggagttcggagttttttggatggcgcgttgtatagggttgtggatgttttgtgtttttaggaaggcgtgttgagtagtcggtacggcgaggttcgtgttggtcgttttttttcggagttttcgtttttgtattttattttgtgtttattgcggtaggaggcgttagttagtttataggttgttcggtttagggggtcgtatttttttaatttta

SEQ ID NO: 29674 - DNA, 527 bp, Artificial Sequence
  chemically treated genomic DNA (Homo sapiens) CpG-island No: 29674
taaaattaaaaaaatacgaccccctaaaccgaacaacctataaactaactaacgcctcctaccgcaataaacacaaaataaaatacaaaaacgaaaactccgaaaaaaaacgaccaacacgaacctcgccgtaccgactactcaacacgccttcctaaaaacacaaaacatccacaaccctatacaacgcgccatccaaaaaactccgaactcccaactcgacgcaaaaacgaaacttccgctcaaatcaaacttccgaacgaaacgataaaaaacttccgattaaaataacaaaataataaatctatcgatcccgttttcccgtcgcacgtaataaccactattaacttctaaataatttacaaaacgaatatccacgccaaaacctttaaatcgaccgtaaatacatccgtctaaaccgttcctttccatcgcaaaacgacgacctccgacgacgctctccaatcataaactaccgacgacttctcataaaccgaataatccccgaacaattcgacgacgcgaac

SEQ ID NO: 29675 - DNA, 527 bp, Artificial Sequence
  chemically treated genomic DNA (Homo sapiens) CpG-island No: 29675
tgaagttaggaaggtacgattttttaggtcgaatagtttgtgggttagttggcgttttttgtcgtagtaaatataaagtggggtatagaaacgaaaatttcgggaagaaacggttagtacgggtttcgtcgtgtcggttatttaatacgtttttttgagagtatagaatatttatagttttatatagcgcgttatttagagagtttcggatttttagttcggcgtaggggcgggattttcgtttaagttagattttcgggcgaggcggtgaggggttttcggttggggtggtagggtggtggatttgtcggtttcgttttttcgtcgtacgtggtggttattgttggtttttgaatggtttgtaaggcggatatttacgttaaggtttttggatcggtcgtgggtatattcgtttgagtcgtttttttttatcgtagagcggcggttttcggcggcgttttttagttatggattatcggcggttttttatgagtcgggtggttttcgggtaattcgacgacgcggat

SEQ ID NO: 29676 - DNA, 527 bp, Artificial Sequence
  chemically treated genomic DNA (Homo sapiens) CpG-island No: 29676
atccgcgtcgtcgaattacccgaaaaccacccgactcataaaaaaccgccgataatccataactaaaaaacgccgccgaaaaccgccgctctacgataaaaaaaaacgactcaaacgaatatacccacgaccgatccaaaaaccttaacgtaaatatccgccttacaaaccattcaaaaaccaacaataaccaccacgtacgacgaaaaaacgaaaccgacaaatccaccaccctaccaccccaaccgaaaacccctcaccgcctcgcccgaaaatctaacttaaacgaaaatcccgcccctacgccgaactaaaaatccgaaactctctaaataacgcgctatataaaactataaatattctatactctcaaaaaaacgtattaaataaccgacacgacgaaacccgtactaaccgtttcttcccgaaattttcgtttctataccccactttatatttactacgacaaaaaacgccaactaacccacaaactattcgacctaaaaaatcgtaccttcctaacttca

SEQ ID NO: 29677 - DNA, 739 bp, Artificial Sequence
  chemically treated genomic DNA (Homo sapiens) CpG-island No: 29677
atagagcggcgataacggtgggcgtcggcgggcgcggggggaagttgttcgggttcgagttaggtaggggttgttacggagttcgggtttcgggttggagagaggtagattgggttcggagcgcggcgttagggaggaggtcggagagggttaggaagggtttaggatcgtcgggggtcggcgttggcgtttttatcgggataggtgttttaggatttgttttttaatgatttcggttatgtcggagtcgcggttcgcgtggaaggcgggtgggtcggtagttgtggtttttttagttgtggagaagaggcggtttttttatttcgtcgcggcgtgagtatcggatatagtcgtcgtcgtcgttatggcgttttttcgtttttttttgggcgtttggcgtttcgttacgattttatttattagcgcggcgtcgcggtcgttcgtttagagcgacgcgaagatcgcgcgttattcgtcggttttgtttgcggcggttagaggcgcgcgcggtgaggggcggcggcgcgcgtagcgtcggggttggttggttcgagtttttttttttcgcgttttcgttcgtttttcgggtttgaaacgtttttttcgtttttgaggggtgtgcggtttttttcgtattcggtagtcgttttgaaatttaggagaaaggcggggtagttgtaatttttgtagaaattcgttagattattgcgtagttttcggatgttagcgttcgtttttt

SEQ ID NO: 29678 - DNA, 739 bp, Artificial Sequence
  chemically treated genomic DNA (Homo sapiens) CpG-island No: 29678
aaaaaacgaacgctaacatccgaaaactacgcaataatctaacgaatttctacaaaaattacaactaccccgcctttctcctaaatttcaaaacgactaccgaatacgaaaaaaaccgcacacccctcaaaaacgaaaaaaacgtttcaaacccgaaaaacgaacgaaaacgcgaaaaaaaaaaactcgaaccaaccaaccccgacgctacgcgcgccgccgcccctcaccgcgcgcgcctctaaccgccgcaaacaaaaccgacgaataacgcgcgatcttcgcgtcgctctaaacgaacgaccgcgacgccgcgctaataaataaaatcgtaacgaaacgccaaacgcccaaaaaaaaacgaaaaaacgccataacgacgacgacgactatatccgatactcacgccgcgacgaaataaaaaaaccgcctcttctccacaactaaaaaaaccacaactaccgacccacccgccttccacgcgaaccgcgactccgacataaccgaaatcattaaaaaacaaatcctaaaacacctatcccgataaaaacgccaacgccgacccccgacgatcctaaacccttcctaaccctctccgacctcctccctaacgccgcgctccgaacccaatctacctctctccaacccgaaacccgaactccgtaacaacccctacctaactcgaacccgaacaacttccccccgcgcccgccgacgcccaccgttatcgccgctctat

SEQ ID NO: 29679 - DNA, 739 bp, Artificial Sequence
  chemically treated genomic DNA (Homo sapiens) CpG-island No: 29679
gagaggcggacgttggtattcgggagttgcgtaatgatttaacgaatttttgtaaaaattataattatttcgttttttttttaggttttaaggcgattgtcgggtgcgaaaggaatcgtatattttttagaggcgaaagaagcgttttagattcgagaggcggacgggagcgcggagggaggaagttcgagttagttagtttcggcgttgcgcgcgtcgtcgttttttatcgcgcgcgtttttggtcgtcgtaagtaaggtcggcgggtggcgcgcgattttcgcgtcgttttgggcgggcggtcgcggcgtcgcgttggtgggtgggatcgtggcggagcgttaggcgtttaaagaggggcgagaaagcgttatggcggcggcggcggttgtgttcggtgtttacgtcgcggcgaggtgaggggatcgttttttttttataattgaggaggttatagttgtcggtttattcgttttttacgcgggtcgcggtttcggtatggtcgggattattaagaagtagattttgaaatatttgtttcggtgagagcgttagcgtcggttttcggcggttttgggttttttttaatttttttcgattttttttttgacgtcgcgtttcgggtttagtttgtttttttttagttcggagttcggatttcgtggtagtttttgtttaattcgagttcggatagttttttttcgcgttcgtcggcgtttatcgttgtcgtcgttttgt

SEQ ID NO: 29680 - DNA, 739 bp, Artificial Sequence
  chemically treated genomic DNA (Homo sapiens) CpG-island No: 29680
acaaaacgacgacaacgataaacgccgacgaacgcgaaaaaaaactatccgaactcgaattaaacaaaaactaccacgaaatccgaactccgaactaaaaaaaaacaaactaaacccgaaacgcgacgtcaaaaaaaaaatcgaaaaaaattaaaaaaaacccaaaaccgccgaaaaccgacgctaacgctctcaccgaaacaaatatttcaaaatctacttcttaataatcccgaccataccgaaaccgcgacccgcgtaaaaaacgaataaaccgacaactataacctcctcaattataaaaaaaaaacgatcccctcacctcgccgcgacgtaaacaccgaacacaaccgccgccgccgccataacgctttctcgcccctctttaaacgcctaacgctccgccacgatcccacccaccaacgcgacgccgcgaccgcccgcccaaaacgacgcgaaaatcgcgcgccacccgccgaccttacttacgacgaccaaaaacgcgcgcgataaaaaacgacgacgcgcgcaacgccgaaactaactaactcgaacttcctccctccgcgctcccgtccgcctctcgaatctaaaacgcttctttcgcctctaaaaaatatacgattcctttcgcacccgacaatcgccttaaaacctaaaaaaaaaacgaaataattataatttttacaaaaattcgttaaatcattacgcaactcccgaataccaacgtccgcctctc

SEQ ID NO: 29681 - DNA, 1501 bp, Artificial Sequence
  chemically treated genomic DNA (Homo sapiens) CpG-island No: 29681
cgtatttcgacgaattcgagacgcgtttcgcgttgcgtaggaggttcggcgggttttgttgttagttcggggtgggtacgtattttttagtcggtagagttgttgttgtcgtttttatttttgaagtagggtacgtaacgtattatttattcgtagatttgggatagagtgagtcgtttgttcggggagttttcgatggcgcgggtgattaggttcgcgtaggataggtttttttaggcgtttcgtcgcgacgaatattttttcggttgttcggagtttttagtcgttttcggttgcggcggtggtagcggttgttgaggttgtagtagcgtttgtgtattttcgtttagttcgttcgtcgcggtggttggtttagattcggggttttgtttttcgggtgttagtattcgggtcgagtttttaaggagtagttcggagtttagcgtgtcgttttcgtcgtcgtcgtcgatcgttatggtcgagtcggttcgtttttcgtcgttttcgtcgtttttatcgttttttttttcggggattatggagtcggcggtcgtttttttcgagggtttggtagggttcgtttggagtttcggtttttgtaggggttacgtataggatcgcggacggttttggggttcgaatttcgggtttagttttatttcgagcggagagagcggggtcggggaagtcggtgtttttgttattttcgtcgttcgttcgttcgcggttggggttttcgcgtttttttttcgcgtcggggcggggtgtagcgggggagggacgtggacgtcgcgaaggtttcggttttcgggcgtcgtcgtcgtcgtttggggaagtattaaagaagagagaaggagagttggttatttcgggtcggagtttcgttttcggcgagttttcgttcgttgtcgttattttttagttttgtcgcgttcgttttttaggaataggaggatttgaagacgtgcggttagcgaatttggcgtagtagatatcgtttttcggttaggtcgcgatggagtcgcgagcgaatcgacggtttcgcgcggggtagtttttttttttcgtcgtttagtcgtaggtttttttcgggttaggcggcggggcggggagaagggggaggggcgttcgggggaggggcggtcgcgtttttaaagcgggtagcggtcggagttggcgtagtcgagtcgcggttagagttcgagttcgggtgtgcgtgcgtttgtttatgtttcgttcgggttcgttttagtgtttttcgcggcgtcgtcgtttaagtttgtgttgttttcggtttttttttttttttttagtttggtcgttttcgcgatttttcgttattttttattcggtcgaatggttcgagttcggggattgcgcgggtagttttttttttttttttcgttcgcgggttagagggcgaacgggggtttgggcgtagatgggtttttgttatttttaaaaaataaaggaaagatagaaagaagggggagtagtagtt

SEQ ID NO: 29682 - DNA, 1501 bp, Artificial Sequence
  chemically treated genomic DNA (Homo sapiens) CpG-island No: 29682
aactactactcccccttctttctatctttcctttattttttaaaaataacaaaaacccatctacgcccaaacccccgttcgccctctaacccgcgaacgaaaaaaaaaaaaaaaactacccgcgcaatccccgaactcgaaccattcgaccgaataaaaaataacgaaaaatcgcgaaaacgaccaaactaaaaaaaaaaaaaaaaaccgaaaacaacacaaacttaaacgacgacgccgcgaaaaacactaaaacgaacccgaacgaaacataaacaaacgcacgcacacccgaactcgaactctaaccgcgactcgactacgccaactccgaccgctacccgctttaaaaacgcgaccgcccctcccccgaacgcccctcccccttctccccgccccgccgcctaacccgaaaaaaacctacgactaaacgacgaaaaaaaaaaactaccccgcgcgaaaccgtcgattcgctcgcgactccatcgcgacctaaccgaaaaacgatatctactacgccaaattcgctaaccgcacgtcttcaaatcctcctattcctaaaaaacgaacgcgacaaaactaaaaaataacgacaacgaacgaaaactcgccgaaaacgaaactccgacccgaaataaccaactctccttctctcttctttaatacttccccaaacgacgacgacgacgcccgaaaaccgaaaccttcgcgacgtccacgtccctcccccgctacaccccgccccgacgcgaaaaaaaaacgcgaaaaccccaaccgcgaacgaacgaacgacgaaaataacaaaaacaccgacttccccgaccccgctctctccgctcgaaataaaactaaacccgaaattcgaaccccaaaaccgtccgcgatcctatacgtaacccctacaaaaaccgaaactccaaacgaaccctaccaaaccctcgaaaaaaacgaccgccgactccataatccccgaaaaaaaaaacgataaaaacgacgaaaacgacgaaaaacgaaccgactcgaccataacgatcgacgacgacgacgaaaacgacacgctaaactccgaactactccttaaaaactcgacccgaatactaacacccgaaaaacaaaaccccgaatctaaaccaaccaccgcgacgaacgaactaaacgaaaatacacaaacgctactacaacctcaacaaccgctaccaccgccgcaaccgaaaacgactaaaaactccgaacaaccgaaaaaatattcgtcgcgacgaaacgcctaaaaaaacctatcctacgcgaacctaatcacccgcgccatcgaaaactccccgaacaaacgactcactctatcccaaatctacgaataaataatacgttacgtaccctacttcaaaaataaaaacgacaacaacaactctaccgactaaaaaatacgtacccaccccgaactaacaacaaaacccgccgaacctcctacgcaacgcgaaacgcgtctcgaattcgtcgaaatacg

SEQ ID NO: 29683 - DNA, 1501 bp, Artificial Sequence
  chemically treated genomic DNA (Homo sapiens) CpG-island No: 29683
ggttgttgtttttttttttttttgttttttttttattttttggaagtgataagggtttatttgcgtttagattttcgttcgttttttggttcgcgggcgaagaggggagagggagttgttcgcgtagttttcgggttcgggttattcgatcgggtggggggtgacggggggtcgcggaggcggttaggttaggaaaggggagaagagtcgaagatagtatagatttgagcggcggcgtcgcgggaggtattagagcgggttcgagcgaaatataaataaacgtacgtatattcgagttcgggttttgatcgcggttcggttgcgttagtttcggtcgttgttcgttttaaaggcgcggtcgtttttttttcgggcgtttttttttttttttttcgtttcgtcgtttagttcgggagggatttgcggttgggcggcggggggagggggttgtttcgcgcgaggtcgtcgattcgttcgcggttttatcgcggtttggtcggggggcggtgtttgttgcgttaggttcgttggtcgtacgtttttaggtttttttgtttttgggaggcgggcgcggtaggattgggaggtggcggtagcgggcgaggattcgtcgaggacggggtttcggttcgggataattaatttttttttttttttttttggtgtttttttaggcggcggcggcggcgttcgggagtcggagttttcgcggcgtttacgtttttttttcgttgtatttcgtttcggcgcgagaggagagcgcgagagttttagtcgcgggcgggcgggcggcgaagatggtagaggtatcggttttttcggtttcgtttttttcgttcgaagtggagttggattcggagttcgagttttagagtcgttcgcgattttgtacgtggtttttgtaaaggtcggagttttaagcgagttttgttaagttttcgggggagacggtcgtcgattttatgattttcgaggaggaggacgatgaagacgacgaggacggcgggggacgggtcggttcggttatggcgatcggcggcggcggcgggagcggtacgttgggtttcgggttgttttttgaggattcggttcgggtgttggtattcggagggtaagatttcgggtttgggttagttatcgcggcgggcgggttgagcgggggtatataggcgttgttgtagttttagtaatcgttgttatcgtcgtagtcgggggcggttgggggtttcgggtagtcgaggaaatgttcgtcgcggcggaacgtttggggaaatttgttttacgcggatttgattattcgcgttatcgagagtttttcggataaacggtttattttgttttagatttacgagtggatggtgcgttgcgtgttttattttaaggataagggcgatagtaatagttttgtcggttggaaggtgcgtatttatttcgggttggtagtaggattcgtcgggttttttgcgtagcgcgagacgcgtttcggattcgtcggagtgcg

SEQ ID NO: 29684 - DNA, 1501 bp, Artificial Sequence
  chemically treated genomic DNA (Homo sapiens) CpG-island No: 29684
cgcactccgacgaatccgaaacgcgtctcgcgctacgcaaaaaacccgacgaatcctactaccaacccgaaataaatacgcaccttccaaccgacaaaactattactatcgcccttatccttaaaataaaacacgcaacgcaccatccactcgtaaatctaaaacaaaataaaccgtttatccgaaaaactctcgataacgcgaataatcaaatccgcgtaaaacaaatttccccaaacgttccgccgcgacgaacatttcctcgactacccgaaacccccaaccgcccccgactacgacgataacaacgattactaaaactacaacaacgcctatatacccccgctcaacccgcccgccgcgataactaacccaaacccgaaatcttaccctccgaataccaacacccgaaccgaatcctcaaaaaacaacccgaaacccaacgtaccgctcccgccgccgccgccgatcgccataaccgaaccgacccgtcccccgccgtcctcgtcgtcttcatcgtcctcctcctcgaaaatcataaaatcgacgaccgtctcccccgaaaacttaacaaaactcgcttaaaactccgacctttacaaaaaccacgtacaaaatcgcgaacgactctaaaactcgaactccgaatccaactccacttcgaacgaaaaaaacgaaaccgaaaaaaccgatacctctaccatcttcgccgcccgcccgcccgcgactaaaactctcgcgctctcctctcgcgccgaaacgaaatacaacgaaaaaaaaacgtaaacgccgcgaaaactccgactcccgaacgccgccgccgccgcctaaaaaaacaccaaaaaaaaaaaaaaaaaaattaattatcccgaaccgaaaccccgtcctcgacgaatcctcgcccgctaccgccacctcccaatcctaccgcgcccgcctcccaaaaacaaaaaaacctaaaaacgtacgaccaacgaacctaacgcaacaaacaccgccccccgaccaaaccgcgataaaaccgcgaacgaatcgacgacctcgcgcgaaacaaccccctccccccgccgcccaaccgcaaatccctcccgaactaaacgacgaaacgaaaaaaaaaaaaaaaaacgcccgaaaaaaaaacgaccgcgcctttaaaacgaacaacgaccgaaactaacgcaaccgaaccgcgatcaaaacccgaactcgaatatacgtacgtttatttatatttcgctcgaacccgctctaatacctcccgcgacgccgccgctcaaatctatactatcttcgactcttctcccctttcctaacctaaccgcctccgcgaccccccgtcaccccccacccgatcgaataacccgaacccgaaaactacgcgaacaactccctctcccctcttcgcccgcgaaccaaaaaacgaacgaaaatctaaacgcaaataaacccttatcacttccaaaaaataaaaaaaaaacaaaaaaaaaaaaaaacaacaacc

SEQ ID NO: 29685 - DNA, 969 bp, Artificial Sequence
  chemically treated genomic DNA (Homo sapiens) CpG-island No: 29685
gagttcggcggggacggttatttcggggttttgtgtggtttgtattttcgcggacgtcgtttttttcgttttttttttagtcgggattcgggggagggagcgagtcggaatataaattttttaataggtcgggaagcgttaagtttttcgggttgttagaaaattcggattagtacgtttattatttttttgttttcgttgttgttattttgatagttttttttttttcgagttttttaaaaatattagcgggcgagaaggggggcgcgtatatcgcggtttagggaggggaaagggaagcgttcggtttagttcggaagtagattcggagttatcgggaaggcggtcgttcgttgtacggtttcggcgtttatttcgtttttttttttttagggacgcggcgggacgacgtacgatttcgcgcgggttcggggtacggcgaggagggggcgcgtaatttcggcgaaggagaagcgttcgggtcgtcgtcgtagttcgttcgaggaatcgtttgttagttcgcgcgtcgttattttttatattttttttttttttttttacgagtagggcggtcgcggtagtagtataaagttatagatatacgtagggcgttttaatttaggttgacggcgggcgggttttcgtttagggggagggttgggcggcgggttgggcggcgggtcgggcgcgcggcgggcgtgcgtgtgtgagtgcgcgtgtgtgagttcgcgcgcgtttgcgcggttcggtttcgcggggttgcgggcgtgggtgttcgggcgcgcgtcgtgggtcgggattcggcgggttttcgttgttgttttcgttgggttttttttttttttcgagagttttaacgataataaagcgcggcgttggttcgggagaggagggagaaggggggagaagggaggagaggaggaagaagtggggagaggagggagaagggggagcggtaggagcgtatag

SEQ ID NO: 29686 - DNA, 969 bp, Artificial Sequence
  chemically treated genomic DNA (Homo sapiens) CpG-island No: 29686
ctatacgctcctaccgctcccccttctccctcctctccccacttcttcctcctctcctcccttctccccccttctccctcctctcccgaaccaacgccgcgctttattatcgttaaaactctcgaaaaaaaaaaaaaacccaacgaaaacaacaacgaaaacccgccgaatcccgacccacgacgcgcgcccgaacacccacgcccgcaaccccgcgaaaccgaaccgcgcaaacgcgcgcgaactcacacacgcgcactcacacacgcacgcccgccgcgcgcccgacccgccgcccaacccgccgcccaaccctccccctaaacgaaaacccgcccgccgtcaacctaaattaaaacgccctacgtatatctataactttatactactaccgcgaccgccctactcgtaaaaaaaaaaaaaaaaaatataaaaaataacgacgcgcgaactaacaaacgattcctcgaacgaactacgacgacgacccgaacgcttctccttcgccgaaattacgcgccccctcctcgccgtaccccgaacccgcgcgaaatcgtacgtcgtcccgccgcgtccctaaaaaaaaaaaaacgaaataaacgccgaaaccgtacaacgaacgaccgccttcccgataactccgaatctacttccgaactaaaccgaacgcttccctttcccctccctaaaccgcgatatacgcgccccccttctcgcccgctaatatttttaaaaaactcgaaaaaaaaaaaactatcaaaataacaacaacgaaaacaaaaaaataataaacgtactaatccgaattttctaacaacccgaaaaacttaacgcttcccgacctattaaaaaatttatattccgactcgctccctcccccgaatcccgactaaaaaaaaaacgaaaaaaacgacgtccgcgaaaatacaaaccacacaaaaccccgaaataaccgtccccgccgaactc

SEQ ID NO: 29687 - DNA, 969 bp, Artificial Sequence
  chemically treated genomic DNA (Homo sapiens) CpG-island No: 29687
ttgtgcgtttttgtcgttttttttttttttttttttttttatttttttttttttttttttttttttttttttttttttttttttttcgggttagcgtcgcgttttgttgtcgttgagattttcgggagggaggaggagtttagcggggatagtagcgggagttcgtcgagtttcggtttacggcgcgcgttcggatatttacgttcgtagtttcgcggagtcgggtcgcgtaggcgcgcgcgagtttatatacgcgtatttatatacgtacgttcgtcgcgcgttcggttcgtcgtttagttcgtcgtttagttttttttttgggcggggattcgttcgtcgttagtttaggttgaggcgttttgcgtgtgtttataattttgtgttgttgtcgcggtcgttttgttcgtggaagggaggaggaggaatgtggaaggtggcggcgcgcgagttgataggcggtttttcgggcgggttgcggcgacggttcgagcgtttttttttcgtcgaggttgcgcgtttttttttcgtcgtgtttcgggttcgcgcgggatcgtgcgtcgtttcgtcgcgtttttgaagggaaggaagcgaggtaggcgtcggagtcgtgtagcgggcggtcgttttttcggtgatttcggatttgttttcgagttgggtcgggcgttttttttttttttttttgagtcgcggtgtgcgcgttttttttttcgttcgttagtgtttttaaaggattcgggaagggggaaattgttaagatggtagtagcgggagtaaggaggtgatgaacgtgttggttcgggttttttagtagttcgggagatttggcgtttttcgatttgttggaagatttatgtttcgattcgttttttttttcggatttcgattgggaagggggcggaggggacgacgttcgcgagaatgtaaattatataaaatttcgaagtggtcgttttcgtcgggttt

SEQ ID NO: 29688 - DNA, 969 bp, Artificial Sequence
  chemically treated genomic DNA (Homo sapiens) CpG-island No: 29688
aaacccgacgaaaacgaccacttcgaaattttatataatttacattctcgcgaacgtcgtcccctccgcccccttcccaatcgaaatccgaaaaaaaaaacgaatcgaaacataaatcttccaacaaatcgaaaaacgccaaatctcccgaactactaaaaaacccgaaccaacacgttcatcacctccttactcccgctactaccatcttaacaatttcccccttcccgaatcctttaaaaacactaacgaacgaaaaaaaaaacgcgcacaccgcgactcaaaaaaaaaaaaaaaaaacgcccgacccaactcgaaaacaaatccgaaatcaccgaaaaaacgaccgcccgctacacgactccgacgcctacctcgcttccttcccttcaaaaacgcgacgaaacgacgcacgatcccgcgcgaacccgaaacacgacgaaaaaaaaacgcgcaacctcgacgaaaaaaaaacgctcgaaccgtcgccgcaacccgcccgaaaaaccgcctatcaactcgcgcgccgccaccttccacattcctcctcctcccttccacgaacaaaacgaccgcgacaacaacacaaaattataaacacacgcaaaacgcctcaacctaaactaacgacgaacgaatccccgcccaaaaaaaaaactaaacgacgaactaaacgacgaaccgaacgcgcgacgaacgtacgtatataaatacgcgtatataaactcgcgcgcgcctacgcgacccgactccgcgaaactacgaacgtaaatatccgaacgcgcgccgtaaaccgaaactcgacgaactcccgctactatccccgctaaactcctcctccctcccgaaaatctcaacgacaacaaaacgcgacgctaacccgaaaaaaaaaaaaaaaaaaaaaaaaaaaaaaaaaaaaaaaaaaaaataaaaaaaaaaaaaaaaaaaaaaaacgacaaaaacgcacaa

SEQ ID NO: 29689 - DNA, 1059 bp, Artificial Sequence
  chemically treated genomic DNA (Homo sapiens) CpG-island No: 29689
agtagggacgttagggatagtcgttatcgttgcgttcgttcggagtcggcgtaaggtttgtcgttcggtttgggagtttagtagtagtagtagtagtagatagttagcgcggcggcgtttttttcgggttatatttaagcgtttttgaatatattttaggggggttcgggttggagggaataggtaggcgcgaggttagacggtcgtttggggcgggcgggttgcgcgtcgttttgcgtttttcggcgtcgtttaggttttatttcgggggttgtatggtgaggtaggtcggtcggttcgatgtttcgtttaggtcggagtcgcggggcgttttggtgtcgttttcgcgtcgttttcgcgtttcgtcgtttttagttcgggcgtcgtcgttcggttcgttaggcgttgttcggcgtttcggttgggggcggtgcggggtattggggcggtggcggttgcggcggcggcgtcgtattttttatagtgtcgggttttttagttgttttcggattcgtgttattttatttcgcgtcggcggtcgttcggttcgtattttaaatcggtcgtttcggttcggcgtagttttgcgttttttagcgtcgtcgtgcgggtttcgtcgtcgcgtttcgtttcgtttttttcgtttcgcgtcgtttcgttttcgttcgttcgttcgttgttcgttttacgtcgttttttgtttcgttcgcgtttttttaggtcggtcggtcggttcgttgtcgggtttttcgggtttcgttcgcgtttcgggtgttcgtcggggttagtttttggcgggtttcgttttggtttcgtattcgttgtttttggagtttcggttcgggcgggttatttggttttcggtagcgttataggcgtcggacgtagatatcgggttttatttagtgcgtttttcgttttcgtttttcgttcgtatcgttgtggttgtagtttagcggtacggtttcgtggttttcgttggttatgtatttttagtttgtcgttatttttcgttgtgcggagaatattttgagagtttttgtgtaagtgtgtttggcg

SEQ ID NO: 29690 - DNA, 1059 bp, Artificial Sequence
  chemically treated genomic DNA (Homo sapiens) CpG-island No: 29690
cgccaaacacacttacacaaaaactctcaaaatattctccgcacaacgaaaaataacgacaaactaaaaatacataaccaacgaaaaccacgaaaccgtaccgctaaactacaaccacaacgatacgaacgaaaaacgaaaacgaaaaacgcactaaataaaacccgatatctacgtccgacgcctataacgctaccgaaaaccaaataacccgcccgaaccgaaactccaaaaacaacgaatacgaaaccaaaacgaaacccgccaaaaactaaccccgacgaacacccgaaacgcgaacgaaacccgaaaaacccgacaacgaaccgaccgaccgacctaaaaaaacgcgaacgaaacaaaaaacgacgtaaaacgaacaacgaacgaacgaacgaaaacgaaacgacgcgaaacgaaaaaaacgaaacgaaacgcgacgacgaaacccgcacgacgacgctaaaaaacgcaaaactacgccgaaccgaaacgaccgatttaaaatacgaaccgaacgaccgccgacgcgaaataaaataacacgaatccgaaaacaactaaaaaacccgacactataaaaaatacgacgccgccgccgcaaccgccaccgccccaataccccgcaccgcccccaaccgaaacgccgaacaacgcctaacgaaccgaacgacgacgcccgaactaaaaacgacgaaacgcgaaaacgacgcgaaaacgacaccaaaacgccccgcgactccgacctaaacgaaacatcgaaccgaccgacctacctcaccatacaacccccgaaataaaacctaaacgacgccgaaaaacgcaaaacgacgcgcaacccgcccgccccaaacgaccgtctaacctcgcgcctacctattccctccaacccgaacccccctaaaatatattcaaaaacgcttaaatataacccgaaaaaaacgccgccgcgctaactatctactactactactactactaaactcccaaaccgaacgacaaaccttacgccgactccgaacgaacgcaacgataacgactatccctaacgtccctact

SEQ ID NO: 29691 - DNA, 1059 bp, Artificial Sequence
  chemically treated genomic DNA (Homo sapiens) CpG-island No: 29691
cgttaaatatatttgtataggggtttttaaggtgtttttcgtatagcggaagatggcgatagattgagggtgtatggttagcgggagttacggggtcgtgtcgttgggttgtagttatagcggtgcgaacgagaggcggaagcgagaggcgtattaagtaaagttcggtgtttgcgttcggcgtttgtggcgttgtcgggagttaggtggttcgttcgagtcggaattttaggagtagcgggtgcggagttagagcggagttcgttagggattggtttcggcgaatattcggagcgcgaacgaagttcgaagggttcggtaacggatcggtcggtcggtttaggagggcgcgagcgaggtagggagcggcgtggagcgggtagcgggcggacgggcgggagcggagcggcgcggggcgaggggagcggagcggagcgcggcggcggggttcgtacggcggcgttgaggggcgtagagttgcgtcgaatcgagacggtcggtttggagtgcgagtcgggcggtcgtcggcgcggagtgaagtggtacggattcgagggtagttgaggggttcgatattatgaggagtgcggcgtcgtcgtcgtagtcgttatcgttttagtgtttcgtatcgtttttagtcgggacgtcgggtagcgtttagcgggtcgggcggcggcgttcgggttgagagcgacggagcgcgggagcggcgcggagacggtattagagcgtttcgcgatttcggtttgagcggggtatcgggtcggtcggtttgttttattatgtagttttcgaggtagagtttggacggcgtcgaggagcgtagagcggcgcgtagttcgttcgttttagacggtcgtttggtttcgcgtttgtttgttttttttagttcggatttttttgaaatatgtttaggggcgtttggatgtggttcgggaaagacgtcgtcgcgttgattatttgttgttgttgttgttgttgggtttttaggtcgagcgataaattttgcgtcgatttcgagcgggcgtagcgatggcgattgtttttggcgtttttgtt

SEQ ID NO: 29692 - DNA, 1059 bp, Artificial Sequence
  chemically treated genomic DNA (Homo sapiens) CpG-island No: 29692
aacaaaaacgccaaaaacaatcgccatcgctacgcccgctcgaaatcgacgcaaaatttatcgctcgacctaaaaacccaacaacaacaacaacaacaaataatcaacgcgacgacgtctttcccgaaccacatccaaacgcccctaaacatatttcaaaaaaatccgaactaaaaaaaacaaacaaacgcgaaaccaaacgaccgtctaaaacgaacgaactacgcgccgctctacgctcctcgacgccgtccaaactctacctcgaaaactacataataaaacaaaccgaccgacccgataccccgctcaaaccgaaatcgcgaaacgctctaataccgtctccgcgccgctcccgcgctccgtcgctctcaacccgaacgccgccgcccgacccgctaaacgctacccgacgtcccgactaaaaacgatacgaaacactaaaacgataacgactacgacgacgacgccgcactcctcataatatcgaacccctcaactaccctcgaatccgtaccacttcactccgcgccgacgaccgcccgactcgcactccaaaccgaccgtctcgattcgacgcaactctacgcccctcaacgccgccgtacgaaccccgccgccgcgctccgctccgctcccctcgccccgcgccgctccgctcccgcccgtccgcccgctacccgctccacgccgctccctacctcgctcgcgccctcctaaaccgaccgaccgatccgttaccgaacccttcgaacttcgttcgcgctccgaatattcgccgaaaccaatccctaacgaactccgctctaactccgcacccgctactcctaaaattccgactcgaacgaaccacctaactcccgacaacgccacaaacgccgaacgcaaacaccgaactttacttaatacgcctctcgcttccgcctctcgttcgcaccgctataactacaacccaacgacacgaccccgtaactcccgctaaccatacaccctcaatctatcgccatcttccgctatacgaaaaacaccttaaaaacccctatacaaatatatttaacg

SEQ ID NO: 29693 - DNA, 750 bp, Artificial Sequence
  chemically treated genomic DNA (Homo sapiens) CpG-island No: 29693
ggtcgacgtcgagtttgtcgttttttttcgcgcgggtataggaaaggtggagttcgtagtcgtgggtttcgtttcgtggcgcggagggtcggggtttcggcgtcgtttcgtttttcgtttcgttattgcggtacggttgagttattatcgttttcgtttcgcggcggggtcgtttaggttagaggtcgggaaggtcgcgtttttcgggtttggatagtcgtcggggtcggagttagggttggggtcggggtttttaggcgagtttcgcgttttgttcgttgtttcggggcggggaatttgcggttcgggttatttacgcggaggttcgggggagtttacgggtggcgtcgggttcggtttttcgaggtcgaagggagtcgggtattaagaagttaggttgggttattcgtcgttttatatcggttcggtttcgcggtcgttttcgtttcggttttttatttttatcgttcgtcgtttcgtttatttggttttgaggcgtagtagttttttaaattgttcggttgagtcgattttttttacggtcgttatagttgttttagtcgttttcgtcgttatgttgtcgtcgttagatagaagtaatttagtgtcggcggtcggatgtgggcggggttacggggagttgagcggttgcgcgagggaaagtttcgtttttgtttgcgttgaggttgtcgagtttgagaaattttaaaaggggtttcggcggcgggttttggatttcgttggggggtt

SEQ ID NO: 29694 - DNA, 750 bp, Artificial Sequence
  chemically treated genomic DNA (Homo sapiens) CpG-island No: 29694
aaccccccaacgaaatccaaaacccgccgccgaaaccccttttaaaatttctcaaactcgacaacctcaacgcaaacaaaaacgaaactttccctcgcgcaaccgctcaactccccgtaaccccgcccacatccgaccgccgacactaaattacttctatctaacgacgacaacataacgacgaaaacgactaaaacaactataacgaccgtaaaaaaaatcgactcaaccgaacaatttaaaaaactactacgcctcaaaaccaaataaacgaaacgacgaacgataaaaataaaaaaccgaaacgaaaacgaccgcgaaaccgaaccgatataaaacgacgaataacccaacctaacttcttaatacccgactcccttcgacctcgaaaaaccgaacccgacgccacccgtaaactcccccgaacctccgcgtaaataacccgaaccgcaaattccccgccccgaaacaacgaacaaaacgcgaaactcgcctaaaaaccccgaccccaaccctaactccgaccccgacgactatccaaacccgaaaaacgcgaccttcccgacctctaacctaaacgaccccgccgcgaaacgaaaacgataataactcaaccgtaccgcaataacgaaacgaaaaacgaaacgacgccgaaaccccgaccctccgcgccacgaaacgaaacccacgactacgaactccacctttcctatacccgcgcgaaaaaaaacgacaaactcgacgtcgacc

SEQ ID NO: 29695 - DNA, 750 bp, Artificial Sequence
  chemically treated genomic DNA (Homo sapiens) CpG-island No: 29695
agttttttagcgggatttagagttcgtcgtcgaggttttttttgggattttttaggttcggtagttttagcgtaggtaggggcggggttttttttcgcgtagtcgtttagtttttcgtggtttcgtttatattcggtcgtcggtattggattgtttttgtttggcggcggtagtatggcggcgggggcggttgaggtagttgtagcggtcgtggaggaggtcggtttagtcgggtagtttgaggagttgttgcgttttaaagttaagtaagcggggcggcgagcggtaggagtgaggagtcggagcgggagcggtcgcgagatcgggtcggtgtggggcggcgggtggtttagtttggttttttggtgttcggtttttttcggtttcgggggatcgggttcggcgttattcgtagattttttcgagttttcgcgtgagtggttcgagtcgtaggtttttcgtttcggaatagcgagtagggcgcgaggttcgtttggaagtttcggttttagttttggtttcgatttcgacggttgtttaagttcgggggacgcgattttttcggtttttggtttgggcggtttcgtcgcgggacggaggcggtggtgatttagtcgtgtcgtagtggcggggcgggggacggggcggcgtcgagatttcggtttttcgcgttacggagcgggatttacggttgcgggttttattttttttgtgttcgcgcgggggggagcggtaggttcggcgtcggtt

SEQ ID NO: 29696 - DNA, 750 bp, Artificial Sequence
  chemically treated genomic DNA (Homo sapiens) CpG-island No: 29696
aaccgacgccgaacctaccgctcccccccgcgcgaacacaaaaaaaataaaacccgcaaccgtaaatcccgctccgtaacgcgaaaaaccgaaatctcgacgccgccccgtcccccgccccgccactacgacacgactaaatcaccaccgcctccgtcccgcgacgaaaccgcccaaaccaaaaaccgaaaaaatcgcgtcccccgaacttaaacaaccgtcgaaatcgaaaccaaaactaaaaccgaaacttccaaacgaacctcgcgccctactcgctattccgaaacgaaaaacctacgactcgaaccactcacgcgaaaactcgaaaaaatctacgaataacgccgaacccgatcccccgaaaccgaaaaaaaccgaacaccaaaaaaccaaactaaaccacccgccgccccacaccgacccgatctcgcgaccgctcccgctccgactcctcactcctaccgctcgccgccccgcttacttaactttaaaacgcaacaactcctcaaactacccgactaaaccgacctcctccacgaccgctacaactacctcaaccgcccccgccgccatactaccgccgccaaacaaaaacaatccaataccgacgaccgaatataaacgaaaccacgaaaaactaaacgactacgcgaaaaaaaaccccgcccctacctacgctaaaactaccgaacctaaaaaatcccaaaaaaaacctcgacgacgaactctaaatcccgctaaaaaact

SEQ ID NO: 29697 - DNA, 669 bp, Artificial Sequence
  chemically treated genomic DNA (Homo sapiens) CpG-island No: 29697
gttacgtaggtatcgcggattttatttcgttttcgtaggtagagtacggtgcgtgtaggtaacgttcgagtcggtcgtagtattaggtgagtttcgtatacgtgtgtaggtatgcgttttcggtttggcgcgttttcgagacgttttagtcgtttcgtttgcgaaggaggttcggataggtcggtcgcgcgttttggatttagtatacggcggggcgcgcgtttcggtattcgcgggtttatttttgcgtttttttcggttttcgtacgttttttggcgttaggagatcgtttttgtagaaggcgaggtcgggttgaagcgcggtgcgtagcgttttcgcgtggatacgcgtcgttatcgttcgtcgtcgaggtttgtagtcgacgtggtttatttgggatttgtcgcgcgttgatttcgatggtgtagtagcgattagggtacgagggtattatggatcgttttgtatacgtggaaattgaggttttcgaggttttggagatggtgtattgatttcgtatatgatagtagatttagttcgcgtttcggttttgtttttttaaatttatataaggtcgtagcggtagtaaagtttttagttggcgcggggttttggatattatttgtcgtcgttggtttcggggtgtttttgtagttttaacgtttagg

SEQ ID NO: 29698 - DNA, 669 bp, Artificial Sequence
  chemically treated genomic DNA (Homo sapiens) CpG-island No: 29698
cctaaacgttaaaactacaaaaacaccccgaaaccaacgacgacaaataatatccaaaaccccgcgccaactaaaaactttactaccgctacgaccttatataaatttaaaaaaacaaaaccgaaacgcgaactaaatctactatcatatacgaaatcaatacaccatctccaaaacctcgaaaacctcaatttccacgtatacaaaacgatccataataccctcgtaccctaatcgctactacaccatcgaaatcaacgcgcgacaaatcccaaataaaccacgtcgactacaaacctcgacgacgaacgataacgacgcgtatccacgcgaaaacgctacgcaccgcgcttcaacccgacctcgccttctacaaaaacgatctcctaacgccaaaaaacgtacgaaaaccgaaaaaaacgcaaaaataaacccgcgaataccgaaacgcgcgccccgccgtatactaaatccaaaacgcgcgaccgacctatccgaacctccttcgcaaacgaaacgactaaaacgtctcgaaaacgcgccaaaccgaaaacgcatacctacacacgtatacgaaactcacctaatactacgaccgactcgaacgttacctacacgcaccgtactctacctacgaaaacgaaataaaatccgcgatacctacgtaac

SEQ ID NO: 29699 - DNA, 669 bp, Artificial Sequence
  chemically treated genomic DNA (Homo sapiens) CpG-island No: 29699
tttggacgttggggttgtagggatatttcggggttagcgacggtaggtgatgtttagggtttcgcgttaattgggagttttgttgtcgttgcggttttgtgtgaatttggagggataaggtcggggcgcgaattgaatttattgttatatgcggagttaatgtattatttttaggatttcgaaagttttagtttttacgtatgtaaaacggtttatggtgttttcgtattttggtcgttgttgtattatcgaggttagcgcgcggtaagttttaggtaggttacgtcggttgtagatttcggcggcgggcggtggcggcgcgtgtttacgcgagggcgttgcgtatcgcgttttagttcgatttcgttttttgtaggggcggttttttggcgttagggggcgtgcgaggatcgaggagagcgtaagagtaagttcgcgggtgtcggagcgcgcgtttcgtcgtgtgttgggtttagggcgcgcggtcggtttgttcgggtttttttcgtagacgaagcggttggaacgtttcgggggcgcgttaagtcgggggcgtatgtttgtatacgtgtgcggggtttatttggtgttgcggtcggttcgggcgttgtttgtacgtatcgtgttttatttgcgggagcggagtggagttcgcggtgtttgcgtggt

SEQ ID NO: 29700 - DNA, 669 bp, Artificial Sequence
  chemically treated genomic DNA (Homo sapiens) CpG-island No: 29700
accacgcaaacaccgcgaactccactccgctcccgcaaataaaacacgatacgtacaaacaacgcccgaaccgaccgcaacaccaaataaaccccgcacacgtatacaaacatacgcccccgacttaacgcgcccccgaaacgttccaaccgcttcgtctacgaaaaaaacccgaacaaaccgaccgcgcgccctaaacccaacacacgacgaaacgcgcgctccgacacccgcgaacttactcttacgctctcctcgatcctcgcacgccccctaacgccaaaaaaccgcccctacaaaaaacgaaatcgaactaaaacgcgatacgcaacgccctcgcgtaaacacgcgccgccaccgcccgccgccgaaatctacaaccgacgtaacctacctaaaacttaccgcgcgctaacctcgataatacaacaacgaccaaaatacgaaaacaccataaaccgttttacatacgtaaaaactaaaactttcgaaatcctaaaaataatacattaactccgcatataacaataaattcaattcgcgccccgaccttatccctccaaattcacacaaaaccgcaacgacaacaaaactcccaattaacgcgaaaccctaaacatcacctaccgtcgctaaccccgaaatatccctacaaccccaacgtccaaa

SEQ ID NO: 29701 - DNA, 986 bp, Artificial Sequence
  chemically treated genomic DNA (Homo sapiens) CpG-island No: 29701
tatcgtttcgcgggagtttaggaattgttttataatagtcgaaattcgggtcgtttattttaacggatttttttttcgttggatacgggggtcgtgagaggttaaataattttcgcgaggttattttcgtagcgatcgttcggcgggcgttttatttttttatcggattgtatatttcgttttttggggtttgaggcgggaattcgggtcgcgttgtttcgaggtttcggcggatcgcgaaaggatggtttattattcggttagggttagtttttgtaataagtttagtttcgttcgttttcgcgtttaggagcggtcggcggggcggggtggttgggtcggtttcgggggcgggggttcgggggcgggggtttaggggcggggttacgtggtttttttttgcgggcggaggtaggcggtgtcgcggcgtcgggattcgatttattcggtgtttgcgtgtggtggtgagcgtagcgtcgaggatgaggaggtgtaatagcggtttcgggtcgtcgtcgtcgttgttgttgttgttgttgtggttgttcgcggttttcggcgttaacgcggtttcgcggtcggcgttttattcgtttttcgattcgttgacgttgttgtaggcggatacggtgcgcggcgcggtgttgggttttcgtagcgtttgggtcgtggagtttttcgttttttggtgcggttattgtatcgttttcgtttcgacgtggaaggcgttggtcgaagacgttaaaggtgagaagcgggggcggttcgttttttcgtgtttcgtcgttcggatttttttatttgttcggtgggtagttttttatttcgggagcgcgttttttttttagttattttcgtttattttttttttttcgcgtattttacgtttattatttttatgttttttagttttatttttgtttttcgtttttttgttttttttttttggtttttatttcgagttttttttttttttcgcggtttgg

SEQ ID NO: 29702 - DNA, 986 bp, Artificial Sequence
  chemically treated genomic DNA (Homo sapiens) CpG-island No: 29702
ccaaaccgcgaaaaaaaaaaaaaactcgaaataaaaaccaaaaaaaaaaaacaaaaaaacgaaaaacaaaaataaaactaaaaaacataaaaataataaacgtaaaatacgcgaaaaaaaaaaaataaacgaaaataactaaaaaaaaaacgcgctcccgaaataaaaaactacccaccgaacaaataaaaaaatccgaacgacgaaacacgaaaaaacgaaccgcccccgcttctcacctttaacgtcttcgaccaacgccttccacgtcgaaacgaaaacgatacaataaccgcaccaaaaaacgaaaaactccacgacccaaacgctacgaaaacccaacaccgcgccgcgcaccgtatccgcctacaacaacgtcaacgaatcgaaaaacgaataaaacgccgaccgcgaaaccgcgttaacgccgaaaaccgcgaacaaccacaacaacaacaacaacaacgacgacgacgacccgaaaccgctattacacctcctcatcctcgacgctacgctcaccaccacacgcaaacaccgaataaatcgaatcccgacgccgcgacaccgcctacctccgcccgcaaaaaaaaaccacgtaaccccgcccctaaacccccgcccccgaacccccgcccccgaaaccgacccaaccaccccgccccgccgaccgctcctaaacgcgaaaacgaacgaaactaaacttattacaaaaactaaccctaaccgaataataaaccatcctttcgcgatccgccgaaacctcgaaacaacgcgacccgaattcccgcctcaaaccccaaaaaacgaaatatacaatccgataaaaaaataaaacgcccgccgaacgatcgctacgaaaataacctcgcgaaaattatttaacctctcacgacccccgtatccaacgaaaaaaaaatccgttaaaataaacgacccgaatttcgactattataaaacaattcctaaactcccgcgaaacgata

SEQ ID NO: 29703 - DNA, 986 bp, Artificial Sequence
  chemically treated genomic DNA (Homo sapiens) CpG-island No: 29703
ttaggtcgcggagagggaaagaagttcgggatgagggttaagaggaaaaggtaagggagcgggaggtaaaaatggagttgagaaatatgaaggtggtgggcgtgggatgcgcggagaggaagaggtgggcggaggtgattggaagagggacgcgttttcggagtaggaggttgtttatcgggtaggtggaggggttcgggcggcggggtacgggggagcgggtcgttttcgttttttatttttgacgttttcggttagcgttttttacgtcggggcgaaggcgatgtagtggtcgtattaggaggcgaagaattttacggtttaggcgttgcgggagtttagtatcgcgtcgcgtatcgtgttcgtttgtagtagcgttagcgggtcggaaggcgaatagagcgtcgatcgcggggtcgcgttagcgtcgggaatcgcgagtagttatagtagtagtagtagtagcgacggcggcggttcggagtcgttgttgtatttttttattttcggcgttgcgtttattattatacgtaagtatcggatgagtcgggtttcggcgtcgcggtatcgtttgttttcgttcgtaaggaggagttacgtggtttcgtttttgagttttcgttttcgagttttcgttttcgaggtcggtttagttatttcgtttcgtcggtcgtttttgggcgcgggagcgggcggggttgagtttgttgtaggggttggttttggtcgggtggtgagttattttttcgcggttcgtcgaggtttcggagtagcgcgattcgggttttcgttttaggttttaggaggcgaggtgtatagttcggtaaaggaatggagcgttcgtcgagcggtcgttgcgggggtagtttcgcggaggttgtttggttttttacggttttcgtatttaacggaagaggagttcgttggaatagacgattcggatttcggttgttgtagggtagtttttgggttttcgcggagcgatg

SEQ ID NO: 29704 - DNA, 986 bp, Artificial Sequence
  chemically treated genomic DNA (Homo sapiens) CpG-island No: 29704
catcgctccgcgaaaacccaaaaactaccctacaacaaccgaaatccgaatcgtctattccaacgaactcctcttccgttaaatacgaaaaccgtaaaaaaccaaacaacctccgcgaaactacccccgcaacgaccgctcgacgaacgctccattcctttaccgaactatacacctcgcctcctaaaacctaaaacgaaaacccgaatcgcgctactccgaaacctcgacgaaccgcgaaaaaataactcaccacccgaccaaaaccaacccctacaacaaactcaaccccgcccgctcccgcgcccaaaaacgaccgacgaaacgaaataactaaaccgacctcgaaaacgaaaactcgaaaacgaaaactcaaaaacgaaaccacgtaactcctccttacgaacgaaaacaaacgataccgcgacgccgaaacccgactcatccgatacttacgtataataataaacgcaacgccgaaaataaaaaaatacaacaacgactccgaaccgccgccgtcgctactactactactactataactactcgcgattcccgacgctaacgcgaccccgcgatcgacgctctattcgccttccgacccgctaacgctactacaaacgaacacgatacgcgacgcgatactaaactcccgcaacgcctaaaccgtaaaattcttcgcctcctaatacgaccactacatcgccttcgccccgacgtaaaaaacgctaaccgaaaacgtcaaaaataaaaaacgaaaacgacccgctcccccgtaccccgccgcccgaacccctccacctacccgataaacaacctcctactccgaaaacgcgtccctcttccaatcacctccgcccacctcttcctctccgcgcatcccacgcccaccaccttcatatttctcaactccatttttacctcccgctcccttaccttttcctcttaaccctcatcccgaacttctttccctctccgcgacctaa

SEQ ID NO: 29705 - DNA, 706 bp, Artificial Sequence
  chemically treated genomic DNA (Homo sapiens) CpG-island No: 29705
gcgtgacggttagcgtttgtaggatcgttagtgtaattttattttagttggcgggaagttggagagcgcgtttttcgtttttggggttggcggcggagaagtttcggttatatttttagtttttgcggttcgcgtttcgggcgtgcgtgtcgggtgagtttttagtcgttattgttcgcggcgttcgtcgcgtgcgtcgcgggaaattgattgttttttgtgagggaatttgttcgcgtattttagttagtttaggaatgtaggggagggagaagcgatcgtaagttgtgaatttcgggtttagtttttgcgtacgcgagggtaggtgtttagggtggttcgggtttggaggggtagagacgcgggtgtgtgggagttttgttagtttgttcgttcgtttttttttcgcgttcgaaattagcgagatagtcggagttcgcggcgtgtttatttttaagtttttttttgtgtgtatgggtgtgcgcgcgtagagattttttcgaagggaattcgtttttgtgttttatttttgagcgagagttttcgagagggaatttgtgtagaggttagaataggtgtttagtcgtcgcgcgcgcgcgcgcgcgcgcgataagcgtcgggagagttttgtttttgtggtttgtacgtttagtagggcgtttcgggtattttggagagattaaggagtttttcgtttcgtttgtta

SEQ ID NO: 29706 - DNA, 706 bp, Artificial Sequence
  chemically treated genomic DNA (Homo sapiens) CpG-island No: 29706
taacaaacgaaacgaaaaactccttaatctctccaaaatacccgaaacgccctactaaacgtacaaaccacaaaaacaaaactctcccgacgcttatcgcgcgcgcgcgcgcgcgcgcgacgactaaacacctattctaacctctacacaaattccctctcgaaaactctcgctcaaaaataaaacacaaaaacgaattcccttcgaaaaaatctctacgcgcgcacacccatacacacaaaaaaaaacttaaaaataaacacgccgcgaactccgactatctcgctaatttcgaacgcgaaaaaaaaacgaacgaacaaactaacaaaactcccacacacccgcgtctctacccctccaaacccgaaccaccctaaacacctaccctcgcgtacgcaaaaactaaacccgaaattcacaacttacgatcgcttctccctcccctacattcctaaactaactaaaatacgcgaacaaattccctcacaaaaaacaatcaatttcccgcgacgcacgcgacgaacgccgcgaacaataacgactaaaaactcacccgacacgcacgcccgaaacgcgaaccgcaaaaactaaaaatataaccgaaacttctccgccgccaaccccaaaaacgaaaaacgcgctctccaacttcccgccaactaaaataaaattacactaacgatcctacaaacgctaaccgtcacgc

SEQ ID NO: 29707 - DNA, 706 bp, Artificial Sequence
  chemically treated genomic DNA (Homo sapiens) CpG-island No: 29707
tggtaagcggagcgaggaattttttggtttttttagggtgttcggggcgttttgttgagcgtgtaagttataggggtaggattttttcggcgtttgtcgcgcgcgcgcgcgcgcgcgcgacgattgggtatttgttttggtttttgtatagattttttttcggggattttcgtttaggagtgaagtatagagacggatttttttcgggaaaatttttgcgcgcgtatatttatatatatagagagagatttggggataaatacgtcgcgagtttcggttgtttcgttaatttcgggcgcgggaagaaagcgggcgggtaggttagtaaagtttttatatattcgcgtttttatttttttaaattcgagttattttgagtatttgttttcgcgtgcgtaaaggttgaattcggaatttataatttgcggtcgttttttttttttttgtatttttaggttagttggaatgcgcgagtagatttttttataaggagtagttagtttttcgcggcgtacgcggcgggcgtcgcgggtagtagcggttggggatttattcggtacgtacgttcggggcgcgggtcgtagggattaagagtgtggtcggggttttttcgtcgttagttttaggggcgagagacgcgttttttaatttttcgttagttggggtgaagttgtattagcggttttgtaagcgttgatcgttacgt

SEQ ID NO: 29708 - DNA, 706 bp, Artificial Sequence
  chemically treated genomic DNA (Homo sapiens) CpG-island No: 29708
acgtaacgatcaacgcttacaaaaccgctaatacaacttcaccccaactaacgaaaaattaaaaaacgcgtctctcgcccctaaaactaacgacgaaaaaaccccgaccacactcttaatccctacgacccgcgccccgaacgtacgtaccgaataaatccccaaccgctactacccgcgacgcccgccgcgtacgccgcgaaaaactaactactccttataaaaaaatctactcgcgcattccaactaacctaaaaatacaaaaaaaaaaaaaacgaccgcaaattataaattccgaattcaacctttacgcacgcgaaaacaaatactcaaaataactcgaatttaaaaaaataaaaacgcgaatatataaaaactttactaacctacccgcccgctttcttcccgcgcccgaaattaacgaaacaaccgaaactcgcgacgtatttatccccaaatctctctctatatatataaatatacgcgcgcaaaaattttcccgaaaaaaatccgtctctatacttcactcctaaacgaaaatccccgaaaaaaaatctatacaaaaaccaaaacaaatacccaatcgtcgcgcgcgcgcgcgcgcgcgcgacaaacgccgaaaaaatcctacccctataacttacacgctcaacaaaacgccccgaacaccctaaaaaaaccaaaaaattcctcgctccgcttacca

SEQ ID NO: 29709 - DNA, 549 bp, Artificial Sequence
  chemically treated genomic DNA (Homo sapiens) CpG-island No: 29709
tcgttttcgtaggttttcgtgcggatttagtagttcgcgtcgtagtttttttggatttttatcgcgttttggtcgcgcggttttcggtgcgggtttcgtcgtttcgatagttttatagttgtttttacggttcgtatcgatagttcgttttcgttattttttttcgggttgtagggacgtcgagattcgaatttttatagcgtttgattcggggtcgtgttgggtacgggtacggcgagagtttttcgagtcgtttttaaaatttttttcgcggattttagtagtttttttacgcgtcggggttttgttggtcggttatgttttttgaggagacgcggaaaagcgcgaggtatataggaaggtggggcgttttattcgtttcggttttgatttatttgttatgtagtttttttaggtatcgagggaaaggacgacggaagttcgtcgttcggatcgttggcgggagagagggtagttcgtacgggagaaggaggagtttcgcggggttttcgttgggggtggtaattggaatgtaggtttgggggtttt

SEQ ID NO: 29710 - DNA, 549 bp, Artificial Sequence
  chemically treated genomic DNA (Homo sapiens) CpG-island No: 29710
aaaacccccaaacctacattccaattaccacccccaacgaaaaccccgcgaaactcctccttctcccgtacgaactaccctctctcccgccaacgatccgaacgacgaacttccgtcgtcctttccctcgatacctaaaaaaactacataacaaataaatcaaaaccgaaacgaataaaacgccccaccttcctatatacctcgcgcttttccgcgtctcctcaaaaaacataaccgaccaacaaaaccccgacgcgtaaaaaaactactaaaatccgcgaaaaaaattttaaaaacgactcgaaaaactctcgccgtacccgtacccaacacgaccccgaatcaaacgctataaaaattcgaatctcgacgtccctacaacccgaaaaaaaataacgaaaacgaactatcgatacgaaccgtaaaaacaactataaaactatcgaaacgacgaaacccgcaccgaaaaccgcgcgaccaaaacgcgataaaaatccaaaaaaactacgacgcgaactactaaatccgcacgaaaacctacgaaaacga

SEQ ID NO: 29711 - DNA, 549 bp, Artificial Sequence
  chemically treated genomic DNA (Homo sapiens) CpG-island No: 29711
gagatttttaggtttgtattttaattattatttttagcggagatttcgcggggtttttttttttttcgtgcgggttgttttttttttcgttagcgattcgggcggcgggttttcgtcgttttttttttcggtgtttggggagattatatggtagatgggttaaaatcgaggcggataaaacgttttatttttttatatgtttcgcgttttttcgcgtttttttagagggtatggtcggttagtagggtttcgacgcgtggagggattgttgaggttcgcggggagagttttggaggcggttcggaaggttttcgtcgtattcgtatttaatacggtttcgggttaggcgttgtgaggattcggatttcgacgtttttatagttcggagggaggtggcggggacgagttgtcggtgcgggtcgtagggatagttgtagggttgtcggagcgacgaggttcgtatcgggggtcgcgcgattaaggcgcggtaaaaatttaggagggttacggcgcgaattgttaagttcgtacgggagtttgcgggggcgg

SEQ ID NO: 29712 - DNA, 549 bp, Artificial Sequence
  chemically treated genomic DNA (Homo sapiens) CpG-island No: 29712
ccgcccccgcaaactcccgtacgaacttaacaattcgcgccgtaaccctcctaaatttttaccgcgccttaatcgcgcgacccccgatacgaacctcgtcgctccgacaaccctacaactatccctacgacccgcaccgacaactcgtccccgccacctccctccgaactataaaaacgtcgaaatccgaatcctcacaacgcctaacccgaaaccgtattaaatacgaatacgacgaaaaccttccgaaccgcctccaaaactctccccgcgaacctcaacaatccctccacgcgtcgaaaccctactaaccgaccataccctctaaaaaaacgcgaaaaaacgcgaaacatataaaaaaataaaacgttttatccgcctcgattttaacccatctaccatataatctccccaaacaccgaaaaaaaaaacgacgaaaacccgccgcccgaatcgctaacgaaaaaaaaaacaacccgcacgaaaaaaaaaaaaaccccgcgaaatctccgctaaaaataataattaaaatacaaacctaaaaatctc

SEQ ID NO: 29713 - DNA, 520 bp, Artificial Sequence
  chemically treated genomic DNA (Homo sapiens) CpG-island No: 29713
aacgtaaagggtttgcgcgcgatgatttttagggttttttttaggtttagtgtggaattttttaatattttcgttcgttttttttttgcggagaattttttcgtatcgttgcggtcgggttcggttagagtttttcggtttttagagtattttgaggggaggagttttcgcgataggaaacgcgttaaaggggagggttggcggtaggaatcggttgaagaggggttgggttgtcggtagtgcgcgtcgtagagatttggagtttttcggttacggagttcgaagcgcgggaagttcggcggcgggacgggatgttcggtcggaatttatttcggtcgagtttcgaggtcgcgggagtcggcgcggcgaacgtcgggagtcgtagttttttcgttcgggcgtttcgggttagcggggtttatttcggttttatttaatttttcggtgttcggttttttaagttttcgtggggggcgtgtgtataaatttattttagaatttatttcgtttgttatgattt

SEQ ID NO: 29714 - DNA, 520 bp, Artificial Sequence
  chemically treated genomic DNA (Homo sapiens) CpG-island No: 29714
aaatcataacaaacgaaataaattctaaaataaatttatacacacgccccccacgaaaacttaaaaaaccgaacaccgaaaaattaaataaaaccgaaataaaccccgctaacccgaaacgcccgaacgaaaaaactacgactcccgacgttcgccgcgccgactcccgcgacctcgaaactcgaccgaaataaattccgaccgaacatcccgtcccgccgccgaacttcccgcgcttcgaactccgtaaccgaaaaactccaaatctctacgacgcgcactaccgacaacccaacccctcttcaaccgattcctaccgccaaccctcccctttaacgcgtttcctatcgcgaaaactcctcccctcaaaatactctaaaaaccgaaaaactctaaccgaacccgaccgcaacgatacgaaaaaattctccgcaaaaaaaaaacgaacgaaaatattaaaaaattccacactaaacctaaaaaaaaccctaaaaatcatcgcgcgcaaaccctttacgtt

SEQ ID NO: 29715 - DNA, 520 bp, Artificial Sequence
  chemically treated genomic DNA (Homo sapiens) CpG-island No: 29715
aagttatgataggcgaggtgggttttgaggtgagtttatgtatacgttttttacgggggtttagaaggtcgggtatcgagaggttaggtggggtcggggtagatttcgttgattcgaggcgttcgggcgggaggattgcggttttcggcgttcgtcgcgtcggttttcgcggtttcgagattcggtcgggatgggtttcgatcgggtatttcgtttcgtcgtcgggtttttcgcgtttcgggtttcgtggtcggagagttttaggtttttgcggcgcgtattgtcggtagtttagtttttttttagtcggtttttgtcgttagtttttttttttggcgcgttttttgtcgcggaagtttttttttttagggtgttttgaaagtcgggaggttttagtcgaattcggtcgtagcggtgcggggggatttttcgtagagagagggcgagcgagggtgttagggagttttatattgggtttgggaggggttttggaggttatcgcgcgtaggttttttgcgtt

SEQ ID NO: 29716 - DNA, 520 bp, Artificial Sequence
  chemically treated genomic DNA (Homo sapiens) CpG-island No: 29716
aacgcaaaaaacctacgcgcgataacctccaaaacccctcccaaacccaatataaaactccctaacaccctcgctcgccctctctctacgaaaaatccccccgcaccgctacgaccgaattcgactaaaacctcccgactttcaaaacaccctaaaaaaaaaaacttccgcgacaaaaaacgcgccaaaaaaaaaaactaacgacaaaaaccgactaaaaaaaaactaaactaccgacaatacgcgccgcaaaaacctaaaactctccgaccacgaaacccgaaacgcgaaaaacccgacgacgaaacgaaatacccgatcgaaacccatcccgaccgaatctcgaaaccgcgaaaaccgacgcgacgaacgccgaaaaccgcaatcctcccgcccgaacgcctcgaatcaacgaaatctaccccgaccccacctaacctctcgatacccgaccttctaaacccccgtaaaaaacgtatacataaactcacctcaaaacccacctcgcctatcataactt

SEQ ID NO: 29717 - DNA, 958 bp, Artificial Sequence
  chemically treated genomic DNA (Homo sapiens) CpG-island No: 29717
ggacggttttttcgggtggacggggtagagcgggttagcgggcgcgtgttcgatacgtttatcgggttttgtatttttcgggcgcgcgttcgtttttcgattcgtttcgtcgtttgtcgggttttgtggatttcgcgttcggggtcgcgtacgtttttttcgttcgtcgggattttgggttcgcgtatttcgcgtttttttttttttcggcgggcgcgcgcgttggttttcgttttcgttttcgttggcggcggcggcggcggcggcggcggggattgtttttgttgtcgttgaggtcggaagagtcggagtcgggtttttgttttcgggtcgggcgtcgtcgtcgttttttgtttagcgttcgcgttttcgcggcgttattttagcgttaatatttcggagattaagcgttacgcggcggcggcggcggcggcggcggggttcggagcgggaggcgtcggggatcggggcgaggcggttttcgtcgtcgttatggaggcgttgggattcggtgaggagcgagttcgggtcggggcgggattcgggattcgggattcggggcgggcggtcgggattttcgttgtttcgtcgtttcgtcgggttcgggtcgttaggtttcggggaaggggattcgagtttcgtagtacgaagcggagggagttgattcgggtttggggggcggtgatcgcgttttagtcggtcgttgggtggatttcgaggtttaggggggaggttcgggaaggtgatcggcgttgtcgggcggaggttatttttggttttatttcggggagacgatatgtgttcggggtcgcgacgagggtagtttgggttttagaagggggcgattcgttatttagtgcgcgcggaggtttggtttagatcgggaaaagggtttcgttgtttattattagtcggtagttttggtttggggtcgcgtttttatttttttttgtattgg

SEQ ID NO: 29718 - DNA, 958 bp, Artificial Sequence
  chemically treated genomic DNA (Homo sapiens) CpG-island No: 29718
ccaatacaaaaaaaaataaaaacgcgaccccaaaccaaaactaccgactaataataaacaacgaaacccttttcccgatctaaaccaaacctccgcgcgcactaaataacgaatcgcccccttctaaaacccaaactaccctcgtcgcgaccccgaacacatatcgtctccccgaaataaaaccaaaaataacctccgcccgacaacgccgatcaccttcccgaacctcccccctaaacctcgaaatccacccaacgaccgactaaaacgcgatcaccgccccccaaacccgaatcaactccctccgcttcgtactacgaaactcgaatccccttccccgaaacctaacgacccgaacccgacgaaacgacgaaacaacgaaaatcccgaccgcccgccccgaatcccgaatcccgaatcccgccccgacccgaactcgctcctcaccgaatcccaacgcctccataacgacgacgaaaaccgcctcgccccgatccccgacgcctcccgctccgaaccccgccgccgccgccgccgccgccgcgtaacgcttaatctccgaaatattaacgctaaaataacgccgcgaaaacgcgaacgctaaacaaaaaacgacgacgacgcccgacccgaaaacaaaaacccgactccgactcttccgacctcaacgacaacaaaaacaatccccgccgccgccgccgccgccgccgccaacgaaaacgaaaacgaaaaccaacgcgcgcgcccgccgaaaaaaaaaaaaacgcgaaatacgcgaacccaaaatcccgacgaacgaaaaaaacgtacgcgaccccgaacgcgaaatccacaaaacccgacaaacgacgaaacgaatcgaaaaacgaacgcgcgcccgaaaaatacaaaacccgataaacgtatcgaacacgcgcccgctaacccgctctaccccgtccacccgaaaaaaccgtcc

SEQ ID NO: 29719 - DNA, 958 bp, Artificial Sequence
  chemically treated genomic DNA (Homo sapiens) CpG-island No: 29719
ttagtgtaaagaaaaataggggcgcggttttaaattaggattatcggttggtagtaggtagcggggtttttttttcggtttgggttaggttttcgcgcgtattgggtagcggatcgtttttttttgaggtttaaattattttcgtcgcgatttcgggtatatatcgttttttcgaggtggggttaagagtggttttcgttcggtagcgtcggttattttttcgaattttttttttggatttcgggatttatttaacggtcggttggggcgcggttatcgttttttaggttcgggttagtttttttcgtttcgtgttgcggggttcgggttttttttttcgaggtttggcggttcgaattcggcgaggcgacggggtagcgaaagtttcggtcgttcgtttcgggtttcgggtttcgggtttcgtttcgattcgagttcgttttttatcgggttttagcgtttttatggcggcggcgggggtcgtttcgtttcggttttcggcgtttttcgtttcgggtttcgtcgtcgtcgtcgtcgtcgtcgcgtaacgtttgattttcggaatattggcgttggggtggcgtcgcggagacgcgggcgttgggtagggggcggcggcggcgttcggttcggggatagggattcggtttcggttttttcggttttagcgataataaaaataattttcgtcgtcgtcgtcgtcgtcgtcgttaacgggagcgggagcgggagttagcgcgcgcgttcgtcgggagggaagggggcgcggggtgcgcggatttagggtttcggcgggcggagggggcgtgcgcggtttcgggcgcggggtttatagagttcggtaggcggcgaggcgggtcggggaacgagcgcgcgttcggagggtgtagagttcggtggacgtgtcgggtacgcgttcgttggttcgttttgtttcgtttattcgaggaggtcgttt

SEQ ID NO: 29720 - DNA, 958 bp, Artificial Sequence
  chemically treated genomic DNA (Homo sapiens) CpG-island No: 29720
aaacgacctcctcgaataaacgaaacaaaacgaaccaacgaacgcgtacccgacacgtccaccgaactctacaccctccgaacgcgcgctcgttccccgacccgcctcgccgcctaccgaactctataaaccccgcgcccgaaaccgcgcacgccccctccgcccgccgaaaccctaaatccgcgcaccccgcgcccccttccctcccgacgaacgcgcgcgctaactcccgctcccgctcccgttaacgacgacgacgacgacgacgacgaaaattatttttattatcgctaaaaccgaaaaaaccgaaaccgaatccctatccccgaaccgaacgccgccgccgccccctacccaacgcccgcgtctccgcgacgccaccccaacgccaatattccgaaaatcaaacgttacgcgacgacgacgacgacgacgacgaaacccgaaacgaaaaacgccgaaaaccgaaacgaaacgacccccgccgccgccataaaaacgctaaaacccgataaaaaacgaactcgaatcgaaacgaaacccgaaacccgaaacccgaaacgaacgaccgaaactttcgctaccccgtcgcctcgccgaattcgaaccgccaaacctcgaaaaaaaaaacccgaaccccgcaacacgaaacgaaaaaaactaacccgaacctaaaaaacgataaccgcgccccaaccgaccgttaaataaatcccgaaatccaaaaaaaaaattcgaaaaaataaccgacgctaccgaacgaaaaccactcttaaccccacctcgaaaaaacgatatatacccgaaatcgcgacgaaaataatttaaacctcaaaaaaaaacgatccgctacccaatacgcgcgaaaacctaacccaaaccgaaaaaaaaaccccgctacctactaccaaccgataatcctaatttaaaaccgcgcccctatttttctttacactaa

SEQ ID NO: 29721 - DNA, 628 bp, Artificial Sequence
  chemically treated genomic DNA (Homo sapiens) CpG-island No: 29721
tgcgtttcggtttttttacgacgtacgttttggtgattgcggttcggggtattttttttgcgttcggatttttatttatcgtttacgtttattcgcgtcgtcgagttcgggagcgggggtttttgcggttgtcgtatgttttcggggtcgagcgcgacggggcgatcgggcgtcgggttttagtcgggcgcggagaagtagcggaggacgcggcgggcgggcggagcgttttttttttagcgatttttgcgacgcgtttagagttaaaggaaagtttggcggtgcgagggagggatttagggatagcggttttttttttgtttcgtttcgtttcgtcgggtgcgttcgacgtttttattggagagcgtttttaatttgtaaggtcgcgagttgcgtttaaaggggttcgtgcgagtcgcgggagggtagcgtttttgtagacgcgtttttgtttgggatcgtttttaggtgggtggtcggtcggtttcgagagggaaaagcgtttattaaaggatcgttagtatttataagttttacggagttatatttcggagtttcgtattagaacgtagtttttttgtttttttgtttttagagatttgtttgaagtggttgcgggaagtgtagt

SEQ ID NO: 29722 - DNA, 628 bp, Artificial Sequence
  chemically treated genomic DNA (Homo sapiens) CpG-island No: 29722
actacacttcccgcaaccacttcaaacaaatctctaaaaacaaaaaaacaaaaaaactacgttctaatacgaaactccgaaatataactccgtaaaacttataaatactaacgatcctttaataaacgcttttccctctcgaaaccgaccgaccacccacctaaaaacgatcccaaacaaaaacgcgtctacaaaaacgctaccctcccgcgactcgcacgaacccctttaaacgcaactcgcgaccttacaaattaaaaacgctctccaataaaaacgtcgaacgcacccgacgaaacgaaacgaaacaaaaaaaaaaccgctatccctaaatccctccctcgcaccgccaaactttcctttaactctaaacgcgtcgcaaaaatcgctaaaaaaaaaacgctccgcccgcccgccgcgtcctccgctacttctccgcgcccgactaaaacccgacgcccgatcgccccgtcgcgctcgaccccgaaaacatacgacaaccgcaaaaacccccgctcccgaactcgacgacgcgaataaacgtaaacgataaataaaaatccgaacgcaaaaaaaataccccgaaccgcaatcaccaaaacgtacgtcgtaaaaaaaccgaaacgca

SEQ ID NO: 29723 - DNA, 628 bp, Artificial Sequence
  chemically treated genomic DNA (Homo sapiens) CpG-island No: 29723
gttgtatttttcgtagttattttaaataaatttttgaggatagaggggtagagggattgcgttttaatacggagtttcgaggtatggtttcgtgaggtttgtgggtattagcggttttttagtgggcgtttttttttttcggggtcggtcgattatttatttggggacgattttaggtaggaacgcgtttgtaagagcgttgttttttcgcggttcgtacgggtttttttgagcgtagttcgcggttttgtaggttggggacgttttttagtgggaacgtcgaacgtattcggcggggcggggcggggtagggaaggggtcgttgtttttaggtttttttttcgtatcgttaaatttttttttggttttggacgcgtcgtaggggtcgttggagaggaggcgtttcgttcgttcgtcgcgtttttcgttgttttttcgcgttcggttggagttcggcgttcggtcgtttcgtcgcgttcgatttcgagggtatgcggtagtcgtaggggttttcgttttcgggttcggcggcgcgggtgaacgtgagcggtgagtgagggttcgggcgtagggagggtatttcgagtcgtagttattagggcgtgcgtcgtggggaggtcggggcgta

SEQ ID NO: 29724 - DNA, 628 bp, Artificial Sequence
  chemically treated genomic DNA (Homo sapiens) CpG-island No: 29724
tacgccccgacctccccacgacgcacgccctaataactacgactcgaaataccctccctacgcccgaaccctcactcaccgctcacgttcacccgcgccgccgaacccgaaaacgaaaacccctacgactaccgcataccctcgaaatcgaacgcgacgaaacgaccgaacgccgaactccaaccgaacgcgaaaaaacaacgaaaaacgcgacgaacgaacgaaacgcctcctctccaacgacccctacgacgcgtccaaaaccaaaaaaaaatttaacgatacgaaaaaaaaacctaaaaacaacgaccccttccctaccccgccccgccccgccgaatacgttcgacgttcccactaaaaaacgtccccaacctacaaaaccgcgaactacgctcaaaaaaacccgtacgaaccgcgaaaaaacaacgctcttacaaacgcgttcctacctaaaatcgtccccaaataaataatcgaccgaccccgaaaaaaaaaaacgcccactaaaaaaccgctaatacccacaaacctcacgaaaccatacctcgaaactccgtattaaaacgcaatccctctacccctctatcctcaaaaatttatttaaaataactacgaaaaatacaac

SEQ ID NO: 29725 - DNA, 665 bp, Artificial Sequence
  chemically treated genomic DNA (Homo sapiens) CpG-island No: 29725
cgtcgttttcgtttttatttgatttttttttttttttcgcgcgttttttttcgtttatttgttttcgcgtagttttttgagtttttttttaattgttttcggatttcgacgtttcgtgtcgttttttatcgggttttagtcgttagttttagtttcggtttttcggtgtttacgtcgttttttcgcgtttttttcggtcggtattaatttttatggtcgcgttttagttttaggttgagtcgaaggcggcggtcgagtttatttatggtttttggagtgttcggttttcgtttttagtttcgcgttggtttcgtttttttatttttgattttcgcgggttcgatatttttatttttacgcggggggaggtttaggggataggttcggggcggcgcggcgtatttttcggatttcggtttaattttcgggcgtatttgggcgggttcgttttgttttcgttttgggtagggtagcgtggggtggaagagggcgttcgacgcgcgttcgggattgggcggcgttatttcgtttttatttttcgtggggttttcggggaggtttgatttagcgaatattttgtagttcgtaaaagcgtatgttttggttgaaattatcgttttttaggtggttttaaacgaattttaaaaggggtagagtttttagtt

SEQ ID NO: 29726 - DNA, 665 bp, Artificial Sequence
  chemically treated genomic DNA (Homo sapiens) CpG-island No: 29726
aactaaaaactctaccccttttaaaattcgtttaaaaccacctaaaaaacgataatttcaaccaaaacatacgcttttacgaactacaaaatattcgctaaatcaaacctccccgaaaaccccacgaaaaataaaaacgaaataacgccgcccaatcccgaacgcgcgtcgaacgccctcttccaccccacgctaccctacccaaaacgaaaacaaaacgaacccgcccaaatacgcccgaaaattaaaccgaaatccgaaaaatacgccgcgccgccccgaacctatcccctaaacctccccccgcgtaaaaataaaaatatcgaacccgcgaaaatcaaaaataaaaaaacgaaaccaacgcgaaactaaaaacgaaaaccgaacactccaaaaaccataaataaactcgaccgccgccttcgactcaacctaaaactaaaacgcgaccataaaaattaataccgaccgaaaaaaacgcgaaaaaacgacgtaaacaccgaaaaaccgaaactaaaactaacgactaaaacccgataaaaaacgacacgaaacgtcgaaatccgaaaacaattaaaaaaaaactcaaaaaactacgcgaaaacaaataaacgaaaaaaaacgcgcgaaaaaaaaaaaaaaatcaaataaaaacgaaaacgacg

SEQ ID NO: 29727 - DNA, 665 bp, Artificial Sequence
  chemically treated genomic DNA (Homo sapiens) CpG-island No: 29727
gattgaaaattttgttttttttgggattcgtttggggttatttggaagacggtgattttagttaggatatgcgtttttgcggattgtagggtgttcgttaagttaagttttttcgggagttttacggagggtgggaacgaggtggcgtcgtttagtttcggacgcgcgtcgagcgtttttttttattttacgttgttttgtttagggcgagggtagagcgggttcgtttaggtgcgttcgggggttgggtcggagttcggaaggtgcgtcgcgtcgtttcgaatttgttttttaggttttttttcgcgtgaaagtgaaagtgtcggattcgcggaggttaaggataggggggcggggttagcgcggagttgggagcgggagtcgggtattttaggggttatggatgggttcggtcgtcgttttcgatttagtttgagattgaagcgcggttatgggggttagtgtcggtcggggagagcgcggggggacggcgtgggtatcggggagtcggggttagggttggcggttggggttcggtggagggcggtacggggcgtcgagattcgggagtagttggaaggggatttaggaggttgcgcgggggtaggtgagcgggaaggagcgcgcggagaggggaagagggttaggtgggggcggggacggcg

SEQ ID NO: 29728 - DNA, 665 bp, Artificial Sequence
  chemically treated genomic DNA (Homo sapiens) CpG-island No: 29728
cgccgtccccgcccccacctaaccctcttcccctctccgcgcgctccttcccgctcacctacccccgcgcaacctcctaaatccccttccaactactcccgaatctcgacgccccgtaccgccctccaccgaaccccaaccgccaaccctaaccccgactccccgatacccacgccgtccccccgcgctctccccgaccgacactaacccccataaccgcgcttcaatctcaaactaaatcgaaaacgacgaccgaacccatccataacccctaaaatacccgactcccgctcccaactccgcgctaaccccgcccccctatccttaacctccgcgaatccgacactttcactttcacgcgaaaaaaaacctaaaaaacaaattcgaaacgacgcgacgcaccttccgaactccgacccaacccccgaacgcacctaaacgaacccgctctaccctcgccctaaacaaaacaacgtaaaataaaaaaaaacgctcgacgcgcgtccgaaactaaacgacgccacctcgttcccaccctccgtaaaactcccgaaaaaacttaacttaacgaacaccctacaatccgcaaaaacgcatatcctaactaaaatcaccgtcttccaaataaccccaaacgaatcccaaaaaaaacaaaattttcaatc

SEQ ID NO: 29729 - DNA, 831 bp, Artificial Sequence
  chemically treated genomic DNA (Homo sapiens) CpG-island No: 29729
ttcgtttgcgttttttagggtagtttcgcgttcggtggcgcggttgaattattggggtgagttattttttgtagggtttcggagttttttatcgggaggaggcggggtaggggtgtggattcgtcgggggtcgtttatcgcgacggtaagtgattcgggtcgggggcggggagtcgggaggagcggcgggggcgggcgtcgggggcgggtagaggcgcgggagagcgcgtcgtcggttttttatagcgcgcggggtatcggttttttaagattgcgagtttttcgtattttttcgtattttttttggtcggtttagggcgtttttagtttaatttttttagttttacgggcgttacggaattcgttcgatttcgtcgttaattggtagatatggagatttttgtttggtttcgggtttcgcgtttcgagatcgtcgtcgttcggacgtttttgttcggttgggttttcgtttaggtggtcggcgttttaggtgagtggtattagtttttggaagttcggggcgcgttatacgtaggagggaggcgatagttttggttggtagcgggttcgttttggtttttcggggcgtttatgttgtttttcgcgtttacgggattcggttgcgtttatttagttcggtttgaatgaatcgagttcgtcgggcgtcggcgggagttgtagggagggagttggcgttttagatttcgttgtttttttcgttggagagttttgttcggggtgttcgagtaattggattgttgttgtataagcggatttttagttttcgttttaattttggggaaagggttttttagtgagttgcgattttta

SEQ ID NO: 29730 - DNA, 831 bp, Artificial Sequence
  chemically treated genomic DNA (Homo sapiens) CpG-island No: 29730
taaaaatcgcaactcactaaaaaaccctttccccaaaattaaaacgaaaactaaaaatccgcttatacaacaacaatccaattactcgaacaccccgaacaaaactctccaacgaaaaaaacaacgaaatctaaaacgccaactccctccctacaactcccgccgacgcccgacgaactcgattcattcaaaccgaactaaataaacgcaaccgaatcccgtaaacgcgaaaaacaacataaacgccccgaaaaaccaaaacgaacccgctaccaaccaaaactatcgcctccctcctacgtataacgcgccccgaacttccaaaaactaataccactcacctaaaacgccgaccacctaaacgaaaacccaaccgaacaaaaacgtccgaacgacgacgatctcgaaacgcgaaacccgaaaccaaacaaaaatctccatatctaccaattaacgacgaaatcgaacgaattccgtaacgcccgtaaaactaaaaaaattaaactaaaaacgccctaaaccgaccaaaaaaaatacgaaaaaatacgaaaaactcgcaatcttaaaaaaccgataccccgcgcgctataaaaaaccgacgacgcgctctcccgcgcctctacccgcccccgacgcccgcccccgccgctcctcccgactccccgcccccgacccgaatcacttaccgtcgcgataaacgacccccgacgaatccacacccctaccccgcctcctcccgataaaaaactccgaaaccctacaaaaaataactcaccccaataattcaaccgcgccaccgaacgcgaaactaccctaaaaaacgcaaacgaa

SEQ ID NO: 29731 - DNA, 831 bp, Artificial Sequence
  chemically treated genomic DNA (Homo sapiens) CpG-island No: 29731
tgaaggtcgtaatttattgggaagttttttttttagagttaaagcgggagttaaaagttcgtttatgtaataatagtttaattattcggatatttcgagtaaaattttttagcggaaggggtagcggggtttggggcgttaattttttttttgtaattttcgtcggcgttcgacggattcggtttatttaagtcgggttgggtgagcgtagtcgagtttcgtaggcgcgggggataatatgggcgtttcggggaattagggcgagttcgttgttagttaggattgtcgttttttttttgcgtgtggcgcgtttcgggtttttaggggttggtgttatttatttgaagcgtcggttatttgggcgaagatttagtcgagtaggagcgttcgagcgacggcggtttcggggcgcgggattcggggttaggtaggggtttttatgtttattagttggcggcgagatcgagcgggtttcgtggcgttcgtggggttggggaggttgggttgaaggcgttttgggtcggttagagggagtgcgagggggtgcggggagttcgtagttttggggagtcggtgtttcgcgcgttataaagggtcggcggcgcgttttttcgcgtttttgttcgttttcggcgttcgttttcgtcgtttttttcgatttttcgttttcggttcgggttatttgtcgtcgcggtgggcggttttcggcgagtttatatttttgtttcgttttttttcggtaggaaatttcgggattttgtaagggatgatttattttagtgatttaatcgcgttatcgagcgcggagttgttttggaggacgtaggcggg

SEQ ID NO: 29732 - DNA, 831 bp, Artificial Sequence
  chemically treated genomic DNA (Homo sapiens) CpG-island No: 29732
cccgcctacgtcctccaaaacaactccgcgctcgataacgcgattaaatcactaaaataaatcatcccttacaaaatcccgaaatttcctaccgaaaaaaaacgaaacaaaaatataaactcgccgaaaaccgcccaccgcgacgacaaataacccgaaccgaaaacgaaaaatcgaaaaaaacgacgaaaacgaacgccgaaaacgaacaaaaacgcgaaaaaacgcgccgccgaccctttataacgcgcgaaacaccgactccccaaaactacgaactccccgcaccccctcgcactccctctaaccgacccaaaacgccttcaacccaacctccccaaccccacgaacgccacgaaacccgctcgatctcgccgccaactaataaacataaaaacccctacctaaccccgaatcccgcgccccgaaaccgccgtcgctcgaacgctcctactcgactaaatcttcgcccaaataaccgacgcttcaaataaataacaccaacccctaaaaacccgaaacgcgccacacgcaaaaaaaaaacgacaatcctaactaacaacgaactcgccctaattccccgaaacgcccatattatcccccgcgcctacgaaactcgactacgctcacccaacccgacttaaataaaccgaatccgtcgaacgccgacgaaaattacaaaaaaaaaattaacgccccaaaccccgctaccccttccgctaaaaaattttactcgaaatatccgaataattaaactattattacataaacgaacttttaactcccgctttaactctaaaaaaaaaacttcccaataaattacgaccttca

SEQ ID NO: 29733 - DNA, 862 bp, Artificial Sequence
  chemically treated genomic DNA (Homo sapiens) CpG-island No: 29733
gcgtgattttattacgattatagtcgatgagtcgtttaagttgggagaaggagcgagaaggttgtagcggcgtaggttagatatttttgggtttaacgtttatttttaattagcgtttttgttagtagcgtttttttcggagttatagtttttatttcgagattttttttttttggaatttcggagcgcggtcgggtattaggggttcgcgtaggattgtagaatcgttgtcgttcgtcgttttagttttagttgttcgcgcggtatttatttgggttttagtgttcgggagaaggtgtgttcgcgcgaggcgtgaagttagagttcgttcgatttcgttcgtatcggacgcgtttttagggtagaggaggtcggcggagttgtgacgttgggattagaggaaggagaaggaaagtcgagacgggtcgggtagacgcgtcgaggagcgtttagtgtacgttggtagtcgcgggaggcgaggcgggcgcggtgagtagtcgcgtcggaatcgagtcgcgaattcgcgtcgtttcgcgttcgtagtcgttaggattcgcgggaattttggttcgtcggtagcggtattgaggagggaggggcgcggggttgagtcgtttttcggagttcgagcgtttttcggagtcggtaatttttgttgttcgggcgggatgcgggcgggaatttagttcgcgtggaatgtgggatcggtcgggttcggagtttttagcgttgggggaaagcggggtttatatagttaggacgagagggggtgcggttttagggttattttcgcgttattttttacgtggcggtcgcgttttcggggcgtgagtgtgtacgcggacggtaggggggtcgtgaa

SEQ ID NO: 29734 - DNA, 862 bp, Artificial Sequence
  chemically treated genomic DNA (Homo sapiens) CpG-island No: 29734
ttcacgacccccctaccgtccgcgtacacactcacgccccgaaaacgcgaccgccacgtaaaaaataacgcgaaaataaccctaaaaccgcaccccctctcgtcctaactatataaaccccgctttcccccaacgctaaaaactccgaacccgaccgatcccacattccacgcgaactaaattcccgcccgcatcccgcccgaacaacaaaaattaccgactccgaaaaacgctcgaactccgaaaaacgactcaaccccgcgcccctccctcctcaataccgctaccgacgaaccaaaattcccgcgaatcctaacgactacgaacgcgaaacgacgcgaattcgcgactcgattccgacgcgactactcaccgcgcccgcctcgcctcccgcgactaccaacgtacactaaacgctcctcgacgcgtctacccgacccgtctcgactttccttctccttcctctaatcccaacgtcacaactccgccgacctcctctaccctaaaaacgcgtccgatacgaacgaaatcgaacgaactctaacttcacgcctcgcgcgaacacaccttctcccgaacactaaaacccaaataaataccgcgcgaacaactaaaactaaaacgacgaacgacaacgattctacaatcctacgcgaacccctaatacccgaccgcgctccgaaattccaaaaaaaaaaaatctcgaaataaaaactataactccgaaaaaaacgctactaacaaaaacgctaattaaaaataaacgttaaacccaaaaatatctaacctacgccgctacaaccttctcgctccttctcccaacttaaacgactcatcgactataatcgtaataaaatcacgc

SEQ ID NO: 29735 - DNA, 862 bp, Artificial Sequence
  chemically treated genomic DNA (Homo sapiens) CpG-island No: 29735
tttacggtttttttatcgttcgcgtatatatttacgtttcgggggcgcggtcgttacgtggggagtggcgcgggggtggttttgggatcgtattttttttcgttttggttgtgtgggtttcgtttttttttagcgttggagatttcgagttcggtcggttttatattttacgcgagttgaattttcgttcgtatttcgttcgggtagtagggattgtcggtttcgggaggcgttcgggtttcgagaagcggtttagtttcgcgtttttttttttttagtatcgttgtcggcggattaggattttcgcgggttttggcggttgcgagcgcgaggcggcgcggattcgcggttcggtttcggcgcgattgtttatcgcgttcgtttcgtttttcgcggttgttagcgtgtattgggcgtttttcggcgcgtttgttcggttcgtttcggtttttttttttttttttttagttttagcgttataatttcgtcgattttttttgttttgagagcgcgttcggtgcgggcggagtcggacggattttggttttacgtttcgcgcgggtatattttttttcgggtattgaggtttaggtgagtatcgcgcgggtagttggggttgggacggcgggcggtagcggttttatagttttacgcgagtttttggtattcggtcgcgtttcggggttttagaaggagaagatttcgaggtggagattgtggtttcggggaaaacgttgttggtaagggcgttagttgggggtggacgttgggtttaggggtatttgatttgcgtcgttgtagttttttcgtttttttttttagtttgaacggtttatcggttgtggtcgtggtgggattacgt

SEQ ID NO: 29736 - DNA, 862 bp, Artificial Sequence
  chemically treated genomic DNA (Homo sapiens) CpG-island No: 29736
acgtaatcccaccacgaccacaaccgataaaccgttcaaactaaaaaaaaaaacgaaaaaactacaacgacgcaaatcaaatacccctaaacccaacgtccacccccaactaacgcccttaccaacaacgttttccccgaaaccacaatctccacctcgaaatcttctccttctaaaaccccgaaacgcgaccgaataccaaaaactcgcgtaaaactataaaaccgctaccgcccgccgtcccaaccccaactacccgcgcgatactcacctaaacctcaatacccgaaaaaaaatatacccgcgcgaaacgtaaaaccaaaatccgtccgactccgcccgcaccgaacgcgctctcaaaacaaaaaaaatcgacgaaattataacgctaaaactaaaaaaaaaaaaaaaaaaaccgaaacgaaccgaacaaacgcgccgaaaaacgcccaatacacgctaacaaccgcgaaaaacgaaacgaacgcgataaacaatcgcgccgaaaccgaaccgcgaatccgcgccgcctcgcgctcgcaaccgccaaaacccgcgaaaatcctaatccgccgacaacgatactaaaaaaaaaaaaacgcgaaactaaaccgcttctcgaaacccgaacgcctcccgaaaccgacaatccctactacccgaacgaaatacgaacgaaaattcaactcgcgtaaaatataaaaccgaccgaactcgaaatctccaacgctaaaaaaaaacgaaacccacacaaccaaaacgaaaaaaaatacgatcccaaaaccacccccgcgccactccccacgtaacgaccgcgcccccgaaacgtaaatatatacgcgaacgataaaaaaaccgtaaa

SEQ ID NO: 29737 - DNA, 693 bp, Artificial Sequence
  chemically treated genomic DNA (Homo sapiens) CpG-island No: 29737
ttattacgacgtttatgcgggggtgtttttttacgtgttttttttcggcgttttcggggtttacgaatattttttcgagttagtttttatttagaagcgtaacgagcgcgagaggtagcgagttaagtgcgttaacgagggttacgttcgttttcgcggttattttttcggcgttttggttgagaagcgatttagtaaggtggagacgttgcgcgtcgttattcgttatataaagtatttgtaagagttgttgagttcggttttcgacggttcgacgtttttcgtttttcgcggtttttcgggtatcgggttttgtttcgcgtcgttcgttatttttcgtttcgatcgttttggcgacggcgaggttcgggcgtttttttttttggtgtcggagttattcgagtttttttgttttttttcgtcgttttttttggagtcggaggaattttggtattgatcgggtttgtggtcgttttcggtttggaggatgattcgtcggtttcgttttattttcgggagtagcgggaggttgttgggttattcgcgatgcgtcgtaggacggtgattgtaggaggttcgcggcgttttcgtgtttgcgatatttttttttttttattagtttggggcggaagtgtagggtagcgggtacgatgggtacgatagagatttaggagtttcgtgggtgaagcgagg

SEQ ID NO: 29738 - DNA, 693 bp, Artificial Sequence
  chemically treated genomic DNA (Homo sapiens) CpG-island No: 29738
cctcgcttcacccacgaaactcctaaatctctatcgtacccatcgtacccgctaccctacacttccgccccaaactaataaaaaaaaaaaaatatcgcaaacacgaaaacgccgcgaacctcctacaatcaccgtcctacgacgcatcgcgaataacccaacaacctcccgctactcccgaaaataaaacgaaaccgacgaatcatcctccaaaccgaaaacgaccacaaacccgatcaataccaaaattcctccgactccaaaaaaaacgacgaaaaaaaacaaaaaaactcgaataactccgacaccaaaaaaaaaaacgcccgaacctcgccgtcgccaaaacgatcgaaacgaaaaataacgaacgacgcgaaacaaaacccgatacccgaaaaaccgcgaaaaacgaaaaacgtcgaaccgtcgaaaaccgaactcaacaactcttacaaatactttatataacgaataacgacgcgcaacgtctccaccttactaaatcgcttctcaaccaaaacgccgaaaaaataaccgcgaaaacgaacgtaaccctcgttaacgcacttaactcgctacctctcgcgctcgttacgcttctaaataaaaactaactcgaaaaaatattcgtaaaccccgaaaacgccgaaaaaaaacacgtaaaaaaacacccccgcataaacgtcgtaataa

SEQ ID NO: 29739 - DNA, 693 bp, Artificial Sequence
  chemically treated genomic DNA (Homo sapiens) CpG-island No: 29739
tttcgttttatttacggagtttttaggtttttatcgtgtttatcgtattcgttgttttgtattttcgttttaagttggtggaggagggagggtgtcgtagatacgggagcgtcgcggattttttatagttatcgttttgcggcgtatcgcgggtgatttaatagtttttcgttgttttcgaaagtgggacggggtcggcggattattttttaagtcgggggcggttataggttcgattaatgttaggattttttcgattttaagaaaggcgacggggagaagtaggaggattcggatgatttcggtattagggaggagggcgttcgggtttcgtcgtcgttagggcggtcgggacggggggtggcgggcggcgcggggtagggttcggtgttcgggaggtcgcgggaagcggggggcgtcgagtcgtcgggggtcgagtttagtagtttttgtaggtattttatgtagcggatggcggcgcgtagcgtttttattttgttgagtcgttttttagttagggcgtcggggaggtggtcgcggaggcgagcgtagttttcgttgacgtatttgattcgttgtttttcgcgttcgttgcgtttttggatgaaggttggttcgaaggggtattcgtagatttcgaaggcgtcggggaagggtacgtaggggaatattttcgtataggcgtcgtagtag

SEQ ID NO: 29740 - DNA, 693 bp, Artificial Sequence
  chemically treated genomic DNA (Homo sapiens) CpG-island No: 29740
ctactacgacgcctatacgaaaatattcccctacgtacccttccccgacgccttcgaaatctacgaataccccttcgaaccaaccttcatccaaaaacgcaacgaacgcgaaaaacaacgaatcaaatacgtcaacgaaaactacgctcgcctccgcgaccacctccccgacgccctaactaaaaaacgactcaacaaaataaaaacgctacgcgccgccatccgctacataaaatacctacaaaaactactaaactcgacccccgacgactcgacgccccccgcttcccgcgacctcccgaacaccgaaccctaccccgcgccgcccgccaccccccgtcccgaccgccctaacgacgacgaaacccgaacgccctcctccctaataccgaaatcatccgaatcctcctacttctccccgtcgcctttcttaaaatcgaaaaaatcctaacattaatcgaacctataaccgcccccgacttaaaaaataatccgccgaccccgtcccactttcgaaaacaacgaaaaactattaaatcacccgcgatacgccgcaaaacgataactataaaaaatccgcgacgctcccgtatctacgacaccctccctcctccaccaacttaaaacgaaaatacaaaacaacgaatacgataaacacgataaaaacctaaaaactccgtaaataaaacgaaa

SEQ ID NO: 29741 - DNA, 575 bp, Artificial Sequence
  chemically treated genomic DNA (Homo sapiens) CpG-island No: 29741
gaattttaattttcgttgagggtaggcggcgtcgtgagttttgagttcgtggcggcggcggcggcgcgggtgtggggtcgcgcggtcgggagcgggcggaagagagcgcgaatttgaattttaaaggtatttggaatttaagtgtttttgcgttgttcgattgtgtgtgtggcgtttttgtgtgttcgcgaatgcgcgcgtgcgtgtgtggcgtgtgtttgggtgttttatgattgtttttcgtgaggtcgtgtgtgagtttttgcgtgggtcgtgagtgcggtagggagcgcggtgttcgggggtcgtttgtcggtgtgtttgtgcgtgtttgtgcgttagtttttgtttttgcgagtgcgtatttttaggatcgagtttgtttatatgagtttgtgtttgtgtgtgtgcgttttcggttttgcgtgtgtttgtgagcgtttgtcggggcgcgtgtgtgttcggaatttcgcggtggtgtgcgggtgtgttcgtgtgtttgtgtacgtgtaggcgagcgtttttatttgtgtgtgtgtatttgagtttgggttatgtgtgatttagggattagt

SEQ ID NO: 29742 - DNA, 575 bp, Artificial Sequence
  chemically treated genomic DNA (Homo sapiens) CpG-island No: 29742
actaatccctaaatcacacataacccaaactcaaatacacacacacaaataaaaacgctcgcctacacgtacacaaacacacgaacacacccgcacaccaccgcgaaattccgaacacacacgcgccccgacaaacgctcacaaacacacgcaaaaccgaaaacgcacacacacaaacacaaactcatataaacaaactcgatcctaaaaatacgcactcgcaaaaacaaaaactaacgcacaaacacgcacaaacacaccgacaaacgacccccgaacaccgcgctccctaccgcactcacgacccacgcaaaaactcacacacgacctcacgaaaaacaatcataaaacacccaaacacacgccacacacgcacgcgcgcattcgcgaacacacaaaaacgccacacacacaatcgaacaacgcaaaaacacttaaattccaaatacctttaaaattcaaattcgcgctctcttccgcccgctcccgaccgcgcgaccccacacccgcgccgccgccgccgccacgaactcaaaactcacgacgccgcctaccctcaacgaaaattaaaattc

SEQ ID NO: 29743 - DNA, 575 bp, Artificial Sequence
  chemically treated genomic DNA (Homo sapiens) CpG-island No: 29743
attggtttttgagttatatatagtttagatttagatgtatatatatagatgggaacgttcgtttgtacgtgtatagatatacggatatattcgtatattatcgcggggtttcgagtatatacgcgtttcggtagacgtttatagatatacgtagggtcgggagcgtatatatatagatataggtttatatagatagattcggttttaaaaatacgtattcgtagaggtaaaggttagcgtataagtacgtatagatatatcgataggcggttttcggatatcgcgttttttgtcgtatttacggtttacgtaagggtttatatacggttttacggaggatagttataaaatatttagatatacgttatatacgtacgcgcgtattcgcggatatataaaagcgttatatatataatcgggtaacgtagaagtatttgggttttagatgtttttgaaatttaaattcgcgttttttttcgttcgttttcggtcgcgcggttttatattcgcgtcgtcgtcgtcgttacgggtttaggatttacgacgtcgtttgtttttagcggaaattaaaattt

SEQ ID NO: 29744 - DNA, 575 bp, Artificial Sequence
  chemically treated genomic DNA (Homo sapiens) CpG-island No: 29744
aaattttaatttccgctaaaaacaaacgacgtcgtaaatcctaaacccgtaacgacgacgacgacgcgaatataaaaccgcgcgaccgaaaacgaacgaaaaaaaacgcgaatttaaatttcaaaaacatctaaaacccaaatacttctacgttacccgattatatatataacgcttttatatatccgcgaatacgcgcgtacgtatataacgtatatctaaatattttataactatcctccgtaaaaccgtatataaacccttacgtaaaccgtaaatacgacaaaaaacgcgatatccgaaaaccgcctatcgatatatctatacgtacttatacgctaacctttacctctacgaatacgtatttttaaaaccgaatctatctatataaacctatatctatatatatacgctcccgaccctacgtatatctataaacgtctaccgaaacgcgtatatactcgaaaccccgcgataatatacgaatatatccgtatatctatacacgtacaaacgaacgttcccatctatatatatacatctaaatctaaactatatataactcaaaaaccaat

SEQ ID NO: 29745 - DNA, 621 bp, Artificial Sequence
  chemically treated genomic DNA (Homo sapiens) CpG-island No: 29745
  unsure (95, 108..)
agtttggcgtttgcgaggattttaggagcgatagtagggatcgacgtagagaggtttttagtttggttttcggagaagaggtcgtttcgtttttntcgttcgtatttnncggtgttttggaggttcgcgtggtttcgttttattggtcgtcgcggagttcgaggtttcggggaggcggggcggttttcgtagttgtagttttcgagttttttcgtttagcggtttcgtttttttgtcgcggcgtttaggcgatcgtttaggattataatttttataaggtttcgcgtttgggggcgtggtcgaggagttaagcgagtcgggggcggggtcgtttgggggatgaagtgggggcgttcgttttttttgttttattcgtagttgtcgggtgttggggaaagagtcgtttgttttcggatcggagtgtagatttttgattttggagtcgttcggtcgttgggaatcgtttttttgggtcgtcgtttgggtcgttcgtcgtttttcggtttcgaggggttcggttggtcgcggtgtgggtagaggttagtatgagttaaggggttcgtcgggtaggcgttgggtagggggtagcggtcgcggtgtagttgttggttattttgagtt

SEQ ID NO: 29746 - DNA, 621 bp, Artificial Sequence
  chemically treated genomic DNA (Homo sapiens) CpG-island No: 29746
  unsure (513..514, 527)
aactcaaaataaccaacaactacaccgcgaccgctaccccctacccaacgcctacccgacgaaccccttaactcatactaacctctacccacaccgcgaccaaccgaacccctcgaaaccgaaaaacgacgaacgacccaaacgacgacccaaaaaaacgattcccaacgaccgaacgactccaaaatcaaaaatctacactccgatccgaaaacaaacgactctttccccaacacccgacaactacgaataaaacaaaaaaaacgaacgcccccacttcatcccccaaacgaccccgcccccgactcgcttaactcctcgaccacgcccccaaacgcgaaaccttataaaaattataatcctaaacgatcgcctaaacgccgcgacaaaaaaacgaaaccgctaaacgaaaaaactcgaaaactacaactacgaaaaccgccccgcctccccgaaacctcgaactccgcgacgaccaataaaacgaaaccacgcgaacctccaaaacaccgnnaaatacgaacganaaaaacgaaacgacctcttctccgaaaaccaaactaaaaacctctctacgtcgatccctactatcgctcctaaaatcctcgcaaacgccaaact

SEQ ID NO: 29747 - DNA, 621 bp, Artificial Sequence
  chemically treated genomic DNA (Homo sapiens) CpG-island No: 29747
  unsure (513..514, 527)
agtttagggtgattagtagttgtatcgcggtcgttattttttgtttagcgtttgttcggcggattttttggtttatgttgatttttatttatatcgcggttagtcggatttttcggggtcggggaacgacgggcggtttaggcgacgatttaaggggacggtttttagcggtcgagcgattttagggttagaggtttgtatttcggttcggaggtaggcgattttttttttaatattcggtagttgcgagtgaggtaggaaaggcgagcgtttttattttattttttaggcggtttcgttttcggttcgtttggtttttcggttacgtttttaagcgcggggttttgtgggagttgtggttttgggcggtcgtttaggcgtcgcggtaggaaggcggagtcgttgaacgagaggattcgggaattataattgcgaaggtcgtttcgttttttcgaggtttcgggtttcgcggcggttaatgaggcgggattacgcgggtttttaaaatatcgnngggtgcgggcggnggaagcggggcgatttttttttcgggaattaggttgaggatttttttgcgtcggtttttgttgtcgtttttggagttttcgtagacgttaggtt

SEQ ID NO: 29748 - DNA, 621 bp, Artificial Sequence
  chemically treated genomic DNA (Homo sapiens) CpG-island No: 29748
  unsure (95, 108..)
aacctaacgtctacgaaaactccaaaaacgacaacaaaaaccgacgcaaaaaaatcctcaacctaattcccgaaaaaaaaatcgccccgcttccnccgcccgcacccnncgatattttaaaaacccgcgtaatcccgcctcattaaccgccgcgaaacccgaaacctcgaaaaaacgaaacgaccttcgcaattataattcccgaatcctctcgttcaacgactccgccttcctaccgcgacgcctaaacgaccgcccaaaaccacaactcccacaaaaccccgcgcttaaaaacgtaaccgaaaaaccaaacgaaccgaaaacgaaaccgcctaaaaaataaaataaaaacgctcgcctttcctacctcactcgcaactaccgaatattaaaaaaaaaatcgcctacctccgaaccgaaatacaaacctctaaccctaaaatcgctcgaccgctaaaaaccgtccccttaaatcgtcgcctaaaccgcccgtcgttccccgaccccgaaaaatccgactaaccgcgatataaataaaaatcaacataaaccaaaaaatccgccgaacaaacgctaaacaaaaaataacgaccgcgatacaactactaatcaccctaaact

SEQ ID NO: 29749 - DNA, 780 bp, Artificial Sequence
  chemically treated genomic DNA (Homo sapiens) CpG-island No: 29749
agattcgggtgtttattatttagcggaaaaagcgatttattgagaaggtgaggtcgtagcgcgcggatttgtttcggcgtagttcgtcgtcggcgtttatgttgtatagggatagcgttttgacggttgttagcgcgtagttttcggttagcgtttagttgtgtattaggcgtacggcgttttgtattttaaagcgggtgtatttggcgtgtagtacgtttaggcgttgcgtttcgcgggttacgcggattagtgttttgcggagtagttcggttaggcgttttatcgtttcggcggagaattggggtagtcgtcggtcgttagcgtttttgcggagtattcgggttacgtttttttcggtttaggggaatttttttagttcggggagtcgcggatagcgcgagaagaggtcggttatttcggggttttcgggtagtatcgtgtttatcgtgttttagttgttgtggcggttgtttatggagtcggagtagtattattaggtcgtttcgcggtgttgttgcgtcgaagagttgagcgtttgcgagttggatttggaggacgagaggttgagcgagcggtacgagttttcggttttatattcggagtttaaggttaagttttttagcgtttttagagtcgagttgtacgtttcggttatggggagtttgtcgagggcggcgtcgtcgagcgaggggtatttataattttatgtttttttttttaagtgggtagaaataagttttaggtttttcgggttatttttttttttttttgcgtcgt

SEQ ID NO: 29750 - DNA, 780 bp, Artificial Sequence
  chemically treated genomic DNA (Homo sapiens) CpG-island No: 29750
acgacgcaaaaaaaaaaaaaaataacccgaaaaacctaaaacttatttctacccacttaaaaaaaaaaacataaaattataaatacccctcgctcgacgacgccgccctcgacaaactccccataaccgaaacgtacaactcgactctaaaaacgctaaaaaacttaaccttaaactccgaatataaaaccgaaaactcgtaccgctcgctcaacctctcgtcctccaaatccaactcgcaaacgctcaactcttcgacgcaacaacaccgcgaaacgacctaataatactactccgactccataaacaaccgccacaacaactaaaacacgataaacacgatactacccgaaaaccccgaaataaccgacctcttctcgcgctatccgcgactccccgaactaaaaaaattcccctaaaccgaaaaaaacgtaacccgaatactccgcaaaaacgctaacgaccgacgactaccccaattctccgccgaaacgataaaacgcctaaccgaactactccgcaaaacactaatccgcgtaacccgcgaaacgcaacgcctaaacgtactacacgccaaatacacccgctttaaaatacaaaacgccgtacgcctaatacacaactaaacgctaaccgaaaactacgcgctaacaaccgtcaaaacgctatccctatacaacataaacgccgacgacgaactacgccgaaacaaatccgcgcgctacgacctcaccttctcaataaatcgctttttccgctaaataataaacacccgaatct

SEQ ID NO: 29751 - DNA, 780 bp, Artificial Sequence
  chemically treated genomic DNA (Homo sapiens) CpG-island No: 29751
gcgacgtagagaggaaggagggtggttcggagggtttagagtttgtttttgtttatttgggaaagagggtatggagttgtgagtgtttttcgttcggcgacgtcgttttcggtaggttttttatggtcgggacgtatagttcgattttgaagacgttggaggatttgattttggatttcgggtatggggtcggggattcgtgtcgttcgtttagtttttcgttttttaagtttaattcgtaggcgtttaatttttcggcgtagtagtatcgcggggcggtttggtggtgttatttcggttttatgaatagtcgttataatagttgggatacggtgaatacggtgttgttcgaggatttcgaagtggtcgattttttttcgcgttgttcgcggtttttcgagttggaggagtttttttggatcgaaggagacgtggttcgggtgtttcgtaaaggcgttggcggtcggcggttgttttagtttttcgtcgaggcggtgaggcgtttggtcgggttgtttcgtagggtattgattcgcgtggttcgcgaggcgtagcgtttgagcgtgttgtacgttaagtgtattcgttttgaggtgtagagcgtcgtgcgtttggtgtatagttgggcgttggtcgagagttgcgcgttggtagtcgttaaggcgttgtttttgtatagtatgagcgtcggcgacgggttgcgtcggggtaagttcgcgcgttgcggttttatttttttagtgggtcgtttttttcgttggatggtggatattcgaattt

SEQ ID NO: 29752 - DNA, 780 bp, Artificial Sequence
  chemically treated genomic DNA (Homo sapiens) CpG-island No: 29752
aaattcgaatatccaccatccaacgaaaaaaacgacccactaaaaaaataaaaccgcaacgcgcgaacttaccccgacgcaacccgtcgccgacgctcatactatacaaaaacaacgccttaacgactaccaacgcgcaactctcgaccaacgcccaactatacaccaaacgcacgacgctctacacctcaaaacgaatacacttaacgtacaacacgctcaaacgctacgcctcgcgaaccacgcgaatcaataccctacgaaacaacccgaccaaacgcctcaccgcctcgacgaaaaactaaaacaaccgccgaccgccaacgcctttacgaaacacccgaaccacgtctccttcgatccaaaaaaactcctccaactcgaaaaaccgcgaacaacgcgaaaaaaaatcgaccacttcgaaatcctcgaacaacaccgtattcaccgtatcccaactattataacgactattcataaaaccgaaataacaccaccaaaccgccccgcgatactactacgccgaaaaattaaacgcctacgaattaaacttaaaaaacgaaaaactaaacgaacgacacgaatccccgaccccatacccgaaatccaaaatcaaatcctccaacgtcttcaaaatcgaactatacgtcccgaccataaaaaacctaccgaaaacgacgtcgccgaacgaaaaacactcacaactccataccctctttcccaaataaacaaaaacaaactctaaaccctccgaaccaccctccttcctctctacgtcgc

SEQ ID NO: 29753 - DNA, 598 bp, Artificial Sequence
  chemically treated genomic DNA (Homo sapiens) CpG-island No: 29753
agtttcgggtaatcggttatttttttttatcgaagaaaatttgttggttgttttcgtatttgtttcggggttatcgtatttttttattttttttgtatacgtattcgtttatacgcggatatacgtatatatgcgcgaatatatagattttttttttcggttggtttttttttcgggtttcggagtttaagttttcggagtttatttttcgggatggattcggttttttagtttcgcgggttatttttttttcgattttaaagtgtttttttcgggtgttggttcgttttttcgttttttttagcggggtttttattcggagcgcgttttttcgtttttcgagttttgcggagtaggttacgattttttttcgttttcgggatatcgttcggcgttatagattagttttgtcggtgtcgggaggttggtcgtggaatttaggttttggggagcgtacgaacgcggatagtagcgttgagaggggtttttaggcgttcgcgcgttcggggtagggggttgtggttttagtaaaggcgtcgtttttttttttttcgtttttttcgtttcgaggttcggtttttttatattttatagtagt

SEQ ID NO: 29754 - DNA, 598 bp, Artificial Sequence
  chemically treated genomic DNA (Homo sapiens) CpG-island No: 29754
actactataaaatataaaaaaaccgaacctcgaaacgaaaaaaacgaaaaaaaaaaaaacgacgcctttactaaaaccacaaccccctaccccgaacgcgcgaacgcctaaaaacccctctcaacgctactatccgcgttcgtacgctccccaaaacctaaattccacgaccaacctcccgacaccgacaaaactaatctataacgccgaacgatatcccgaaaacgaaaaaaaatcgtaacctactccgcaaaactcgaaaaacgaaaaaacgcgctccgaataaaaaccccgctaaaaaaaacgaaaaaacgaaccaacacccgaaaaaaacactttaaaatcgaaaaaaaaataacccgcgaaactaaaaaaccgaatccatcccgaaaaataaactccgaaaacttaaactccgaaacccgaaaaaaaaaccaaccgaaaaaaaaaatctatatattcgcgcatatatacgtatatccgcgtataaacgaatacgtatacaaaaaaaataaaaaaatacgataaccccgaaacaaatacgaaaacaaccaacaaattttcttcgataaaaaaaaataaccgattacccgaaact

SEQ ID NO: 29755 - DNA, 598 bp, Artificial Sequence
  chemically treated genomic DNA (Homo sapiens) CpG-island No: 29755
gttgttgtgggatgtgggaaagtcgagtttcggggcggaggggacgagagggaggaggacggcgtttttgttggagttatagttttttgtttcgggcgcgcgggcgtttggagattttttttagcgttgttgttcgcgttcgtgcgttttttaggatttgggttttacggttagtttttcggtatcgatagggttgatttgtggcgtcgagcggtgtttcgggggcggggggaggtcgtgatttgtttcgtagggttcggggagcggggagacgcgtttcgggtgagggtttcgttgggaaaggcgagggagcggattagtattcgaggagggtattttgaggtcgggagggaaatgattcgcgaagttgagagatcgggtttatttcgggggatgggtttcggggatttgagtttcgaagttcggaggggaagttagtcgaggggaggggtttgtgtgttcgcgtatgtgtgcgtgtgttcgcgtgtgagcgagtgcgtgtgtaaaggaaataaaggggtacggtggtttcggggtagatgcgagggtaattagtaggtttttttcggtagggggaggtgatcgattgttcgagatt

SEQ ID NO: 29756 - DNA, 598 bp, Artificial Sequence
  chemically treated genomic DNA (Homo sapiens) CpG-island No: 29756
aatctcgaacaatcgatcacctccccctaccgaaaaaaacctactaattaccctcgcatctaccccgaaaccaccgtacccctttatttcctttacacacgcactcgctcacacgcgaacacacgcacacatacgcgaacacacaaacccctcccctcgactaacttcccctccgaacttcgaaactcaaatccccgaaacccatcccccgaaataaacccgatctctcaacttcgcgaatcatttccctcccgacctcaaaataccctcctcgaatactaatccgctccctcgcctttcccaacgaaaccctcacccgaaacgcgtctccccgctccccgaaccctacgaaacaaatcacgacctccccccgcccccgaaacaccgctcgacgccacaaatcaaccctatcgataccgaaaaactaaccgtaaaacccaaatcctaaaaaacgcacgaacgcgaacaacaacgctaaaaaaaatctccaaacgcccgcgcgcccgaaacaaaaaactataactccaacaaaaacgccgtcctcctccctctcgtcccctccgccccgaaactcgactttcccacatcccacaacaac

SEQ ID NO: 29757 - DNA, 580 bp, Artificial Sequence
  chemically treated genomic DNA (Homo sapiens) CpG-island No: 29757
gcgcggggattcggtttcggtggaaagatttgttttcggcgtataagataggcgggcggtcgggcgtgggcgagcgcgtagtcggcgtgttttttcgtgcgtttaggcggcgcgggcgcggtcggcgattttgtagagggagttgtgcgtcggttttagcgtacgttcggtgtcgttcgtttttttttgtcgtcgtcgtcgtcgttgggttcgttcgtcggggaggggttttcggtttcgtagatagcggttttttgttttttgtacgttttcgtcgtcgcgtcgttagttcgtttgtgttagttttggtcgtgagtcggtcgttcgttgtcgtcggtcgtttcgtagttgtttgcgttttagtcgcgtttcgcggttagttcggttagtttaggttcgttttcggagttcgcgtttttttacgttgttttttgtttgttttcggttatgttgtttttttagtatttcgacgtgtatcgcgacgagatcgtcgtaagtatttttgttttcgtttagagggttttcgggtaaaggtgtttagtttgtttgattcgtggtattcgtagtttttttttttgta

SEQ ID NO: 29758 - DNA, 580 bp, Artificial Sequence
  chemically treated genomic DNA (Homo sapiens) CpG-island No: 29758
tacaaaaaaaaaaactacgaataccacgaatcaaacaaactaaacacctttacccgaaaaccctctaaacgaaaacaaaaatacttacgacgatctcgtcgcgatacacgtcgaaatactaaaaaaacaacataaccgaaaacaaacaaaaaacaacgtaaaaaaacgcgaactccgaaaacgaacctaaactaaccgaactaaccgcgaaacgcgactaaaacgcaaacaactacgaaacgaccgacgacaacgaacgaccgactcacgaccaaaactaacacaaacgaactaacgacgcgacgacgaaaacgtacaaaaaacaaaaaaccgctatctacgaaaccgaaaacccctccccgacgaacgaacccaacgacgacgacgacgacaaaaaaaaacgaacgacaccgaacgtacgctaaaaccgacgcacaactccctctacaaaatcgccgaccgcgcccgcgccgcctaaacgcacgaaaaaacacgccgactacgcgctcgcccacgcccgaccgcccgcctatcttatacgccgaaaacaaatctttccaccgaaaccgaatccccgcgc

SEQ ID NO: 29759 - DNA, 580 bp, Artificial Sequence
  chemically treated genomic DNA (Homo sapiens) CpG-island No: 29759
tataggaagaggagttgcgggtgttacgggttaggtaggttgggtatttttgttcgggagttttttgggcggaggtagagatatttacggcggtttcgtcgcggtatacgtcggggtattgaagggatagtatggtcggggataggtagggggtagcgtggaggggcgcgggtttcgggagcggatttgagttagtcgggttggtcgcgaggcgcggttggggcgtaggtagttgcggggcggtcggcggtagcgggcggtcggtttacggttagagttagtataaacggattggcggcgcggcggcgaggacgtgtagaaagtaggaagtcgttgtttgcgaggtcgggagttttttttcggcgggcgggtttagcggcggcggcggcggtaagagggagcgggcggtatcgagcgtgcgttaaggtcggcgtatagttttttttgtaggatcgtcggtcgcgttcgcgtcgtttgggcgtacggaggagtacgtcggttacgcgttcgtttacgttcggtcgttcgtttgttttatgcgtcggggataagtttttttatcgaggtcgggttttcgcgt

SEQ ID NO: 29760 - DNA, 580 bp, Artificial Sequence
  chemically treated genomic DNA (Homo sapiens) CpG-island No: 29760
acgcgaaaacccgacctcgataaaaaaacttatccccgacgcataaaacaaacgaacgaccgaacgtaaacgaacgcgtaaccgacgtactcctccgtacgcccaaacgacgcgaacgcgaccgacgatcctacaaaaaaaactatacgccgaccttaacgcacgctcgataccgcccgctccctcttaccgccgccgccgccgctaaacccgcccgccgaaaaaaaactcccgacctcgcaaacaacgacttcctactttctacacgtcctcgccgccgcgccgccaatccgtttatactaactctaaccgtaaaccgaccgcccgctaccgccgaccgccccgcaactacctacgccccaaccgcgcctcgcgaccaacccgactaactcaaatccgctcccgaaacccgcgcccctccacgctaccccctacctatccccgaccatactatcccttcaataccccgacgtataccgcgacgaaaccgccgtaaatatctctacctccgcccaaaaaactcccgaacaaaaatacccaacctacctaacccgtaacacccgcaactcctcttcctata

SEQ ID NO: 29761 - DNA, 623 bp, Artificial Sequence
  chemically treated genomic DNA (Homo sapiens) CpG-island No: 29761
taattcggtgtatagcgagtgtaaaaatcgagaagcgaatgtagttgcgtttggagaaggcggttgagaagcgatattttagtagggttttgaagaatgggagttttagagtcgggtggcgggtgggattgggttttcggatagattacgtgtaaattcgttaggatatagggagcgaggggcgggggggcggtagagcgcggcgttttatttttttagtttgggattgcggttattggatacgagggtcgggaagttttttttcggcgtcgattggagtttagcgtgttggcggtagtaagaagttgaggtaagcgggtttcgggttttaacgacgcgttttagtttttttttgggtttcgggtttttttcgggtaataagaggtcgttgttcgaacgggatttttttaggcgttttagacgggcgggttttcgggtttcggacggttaattcgagtattttttatttgtttttgaggttttattttattacgttcggttttcgtagacgttcggttagttgtttcgcgattgagttgcggtagtcgttgttaaggttttgcgggggacgggggcggagtttatttcgaggtagagggttaggtttcgtttttttaaatttt

SEQ ID NO: 29762 - DNA, 623 bp, Artificial Sequence
  chemically treated genomic DNA (Homo sapiens) CpG-island No: 29762
aaaatttaaaaaaacgaaacctaaccctctacctcgaaataaactccgcccccgtcccccgcaaaaccttaacaacgactaccgcaactcaatcgcgaaacaactaaccgaacgtctacgaaaaccgaacgtaataaaataaaacctcaaaaacaaataaaaaatactcgaattaaccgtccgaaacccgaaaacccgcccgtctaaaacgcctaaaaaaatcccgttcgaacaacgacctcttattacccgaaaaaaacccgaaacccaaaaaaaaactaaaacgcgtcgttaaaacccgaaacccgcttacctcaacttcttactaccgccaacacgctaaactccaatcgacgccgaaaaaaaacttcccgaccctcgtatccaataaccgcaatcccaaactaaaaaaataaaacgccgcgctctaccgcccccccgcccctcgctccctatatcctaacgaatttacacgtaatctatccgaaaacccaatcccacccgccacccgactctaaaactcccattcttcaaaaccctactaaaatatcgcttctcaaccgccttctccaaacgcaactacattcgcttctcgatttttacactcgctatacaccgaatta

SEQ ID NO: 29763 - DNA, 623 bp, Artificial Sequence
  chemically treated genomic DNA (Homo sapiens) CpG-island No: 29763
ggagtttgggggggcggggtttggttttttgtttcggggtgggtttcgttttcgtttttcgtagggttttagtagcggttgtcgtagtttaatcgcggagtaattagtcgggcgtttgcgggagtcgagcgtggtgaggtggggttttaggggtaggtgggaggtgttcgggttaatcgttcgaggttcggagattcgttcgtttagggcgtttgagggaatttcgttcgggtagcggttttttgttattcgggaggaattcgaggtttagagaggggttgggacgcgtcgttagggttcggggttcgtttgttttagttttttgttgtcgttagtacgttaagttttagtcggcgtcgaaggagagtttttcgattttcgtgtttagtagtcgtaattttaggttgggagggtgaggcgtcgcgttttgtcgttttttcgtttttcgttttttgtgttttggcggatttgtacgtaatttattcgaaagtttagttttattcgttattcgattttggagtttttattttttaggattttgttgaagtatcgttttttagtcgttttttttaggcgtagttgtattcgtttttcggtttttgtattcgttgtgtatcgagtta

SEQ ID NO: 29764 - DNA, 623 bp, Artificial Sequence
  chemically treated genomic DNA (Homo sapiens) CpG-island No: 29764
taactcgatacacaacgaatacaaaaaccgaaaaacgaatacaactacgcctaaaaaaaacgactaaaaaacgatacttcaacaaaatcctaaaaaataaaaactccaaaatcgaataacgaataaaactaaactttcgaataaattacgtacaaatccgccaaaacacaaaaaacgaaaaacgaaaaaacgacaaaacgcgacgcctcaccctcccaacctaaaattacgactactaaacacgaaaatcgaaaaactctccttcgacgccgactaaaacttaacgtactaacgacaacaaaaaactaaaacaaacgaaccccgaaccctaacgacgcgtcccaacccctctctaaacctcgaattcctcccgaataacaaaaaaccgctacccgaacgaaattccctcaaacgccctaaacgaacgaatctccgaacctcgaacgattaacccgaacacctcccacctacccctaaaaccccacctcaccacgctcgactcccgcaaacgcccgactaattactccgcgattaaactacgacaaccgctactaaaaccctacgaaaaacgaaaacgaaacccaccccgaaacaaaaaaccaaaccccgcccccccaaactcc

SEQ ID NO: 29765 - DNA, 892 bp, Artificial Sequence
  chemically treated genomic DNA (Homo sapiens) CpG-island No: 29765
  unsure (760)
tgacgtaattagttaaatcggttaaggatttgattgcgattgagaattagtgaggatttttaggaatttaattttttgcgtttatatacgcgttcgcgcgtatacgtacgtatatatatatatatatatatatatatacggtaagtaagttattttcggttatattttagatatcgtcgttttttcgggacgggcgtttttttacgcgtgttttttggacgcgttagttttttttttatttcgggatcgttgttttttttttttcgggtttttgttgtagtcggtcggtcgttttcgtcgttcgtttagttttcgaacgtttttttttttatttttaaggtttagggaaggggttagtcggcgtttgagcgcgttacgtggagcgcgcgcgtttgtagttaaattttagtcggtttttaaagtggggttttcgtttttttcgttttgtttttcgattttttaaggtcgagttcgttttcgcgttttcgagtttttgttttgtttggttggggtttgtggcgcggaaaacgtggtaggttatttgcgattcggggtcgtcgggttgcgttttgattaggtaggtaaagtaggtgaggtcgtggttgttgtggatgaagcgcgagatatgttgcgttttgtgttcgaagatgaatatcgtcgggttgggttgcgtggtcgatagattagtgtttttcgaggttttagcgttcggcgcggggacgtaacgtatgaagggcgcgttgagtattaggattatttntcgggtcgacggcgtttcgtagacgttcgtttcgggtttttggttgcgtttgcggatttcggttatgagttagggtagtataggtagcgtggttttgtggtttaggtacgaattttaacgtattatagaagg

SEQ ID NO: 29766 - DNA, 892 bp, Artificial Sequence
  chemically treated genomic DNA (Homo sapiens) CpG-island No: 29766
  unsure (133)
ccttctataatacgttaaaattcgtacctaaaccacaaaaccacgctacctatactaccctaactcataaccgaaatccgcaaacgcaaccaaaaacccgaaacgaacgtctacgaaacgccgtcgacccganaaataatcctaatactcaacgcgcccttcatacgttacgtccccgcgccgaacgctaaaacctcgaaaaacactaatctatcgaccacgcaacccaacccgacgatattcatcttcgaacacaaaacgcaacatatctcgcgcttcatccacaacaaccacgacctcacctactttacctacctaatcaaaacgcaacccgacgaccccgaatcgcaaataacctaccacgttttccgcgccacaaaccccaaccaaacaaaacaaaaactcgaaaacgcgaaaacgaactcgaccttaaaaaatcgaaaaacaaaacgaaaaaaacgaaaaccccactttaaaaaccgactaaaatttaactacaaacgcgcgcgctccacgtaacgcgctcaaacgccgactaaccccttccctaaaccttaaaaataaaaaaaaaaacgttcgaaaactaaacgaacgacgaaaacgaccgaccgactacaacaaaaacccgaaaaaaaaaaaacaacgatcccgaaataaaaaaaaaactaacgcgtccaaaaaacacgcgtaaaaaaacgcccgtcccgaaaaaacgacgatatctaaaatataaccgaaaataacttacttaccgtatatatatatatatatatatatatatacgtacgtatacgcgcgaacgcgtatataaacgcaaaaaattaaattcctaaaaatcctcactaattctcaatcgcaatcaaatccttaaccgatttaactaattacgtca

SEQ ID NO: 29767 - DNA, 892 bp, Artificial Sequence
  chemically treated genomic DNA (Homo sapiens) CpG-island No: 29767
  unsure (133)
ttttttgtggtacgttggggttcgtgtttggattataggattacgttgtttatgttgttttggtttatggtcgagattcgtaggcgtagttagaagttcgaggcgggcgtttgcggggcgtcgtcggttcganaggtgattttggtgtttagcgcgttttttatgcgttgcgttttcgcgtcggacgttggggtttcggggggtattagtttgtcggttacgtagtttaattcggcggtatttattttcgagtataaggcgtagtatatttcgcgttttatttataatagttacgattttatttattttgtttatttgattaaggcgtagttcgacgatttcgagtcgtagatggtttgttacgtttttcgcgttatagattttagttaggtaagataggggttcggaggcgcgggggcgggttcggttttgggggatcggggagtagggcgggaggggcggggattttattttaaggatcgattgaggtttggttgtaggcgcgcgcgttttacgtggcgcgtttaagcgtcggttggttttttttttggattttgggagtgggagagaaggcgttcgggggttgggcgagcggcgggagcggtcggtcggttatagtagggattcggagggaaaaggataacggtttcgggatggagggggagttggcgcgtttaaggagtacgcgtggaggagcgttcgtttcgggaggacggcggtgtttggggtgtgatcggagatggtttgtttgtcgtgtgtgtgtgtgtgtgtgtgtgtgtgtgcgtgcgtgtgcgcgcgagcgcgtgtatgaacgtagaaggttgggtttttagaggtttttattagtttttaatcgtagttaaatttttaatcggtttggttggttgcgtta

SEQ ID NO: 29768 - DNA, 892 bp, Artificial Sequence
  chemically treated genomic DNA (Homo sapiens) CpG-island No: 29768
  unsure (760)
taacgcaaccaaccaaaccgattaaaaatttaactacgattaaaaactaataaaaacctctaaaaacccaaccttctacgttcatacacgcgctcgcgcgcacacgcacgcacacacacacacacacacacacacacacgacaaacaaaccatctccgatcacaccccaaacaccgccgtcctcccgaaacgaacgctcctccacgcgtactccttaaacgcgccaactccccctccatcccgaaaccgttatccttttccctccgaatccctactataaccgaccgaccgctcccgccgctcgcccaacccccgaacgccttctctcccactcccaaaatccaaaaaaaaaaccaaccgacgcttaaacgcgccacgtaaaacgcgcgcgcctacaaccaaacctcaatcgatccttaaaataaaatccccgcccctcccgccctactccccgatcccccaaaaccgaacccgcccccgcgcctccgaacccctatcttacctaactaaaatctataacgcgaaaaacgtaacaaaccatctacgactcgaaatcgtcgaactacgccttaatcaaataaacaaaataaataaaatcgtaactattataaataaaacgcgaaatatactacgccttatactcgaaaataaataccgccgaattaaactacgtaaccgacaaactaataccccccgaaaccccaacgtccgacgcgaaaacgcaacgcataaaaaacgcgctaaacaccaaaatcacctntcgaaccgacgacgccccgcaaacgcccgcctcgaacttctaactacgcctacgaatctcgaccataaaccaaaacaacataaacaacgtaatcctataatccaaacacgaaccccaacgtaccacaaaaaa

SEQ ID NO: 29769 - DNA, 799 bp, Artificial Sequence
  chemically treated genomic DNA (Homo sapiens) CpG-island No: 29769
tcgaggcgggcgggggttcgttatttttgcgttttatcgtggtcgtcgtttcggcgggaatcgagcggaggagtcgggtggatttttgtttggagggcgtttgtttcgggcgatttttatttcgcgggggtagttagggaaacggaagatggcggcggcggtcgggtacggggtttcgggtttcgttcgggtagagtttattcgttgattaacgtcgtcgttttcgtcgggcggtgttgtgttttcgtaggagtcggagaggatggtaggggtcggaggttagtattatttttcgggcgtcgttggaggagcggtcgtcggagtcggcgtcgcggttattttcgtcgttgtttcggcggtgtcgggagaggattcgtttgatagcgaagcggagtaagagggattttagaatttgattcgtaaagtgtttatttcggggtagattcggattaaggtagggcggaggaggcgggtttgagggtcgcgtggaaagcgggaggtggagagggcgcggtggcgtttggacgcgtcgggcgatttcgggaaggcggtgaaggcggtgttggcggtgtatgttgggaatgcggggatagcggtgaaggttgggtaggcggggaaggttgggatggtgaaacgttaagttgggcggggtttgtgtcgcggtcggttcggtaggagtgggtcgtttttcgtggcgttggatttgggtgtttgcgggatcgattttcggttgttgttcggaaagttgcgattttggtttttaggagtttgatgttaaagacggagtagggaattcggt

SEQ ID NO: 29770 - DNA, 799 bp, Artificial Sequence
  chemically treated genomic DNA (Homo sapiens) CpG-island No: 29770
accgaattccctactccgtctttaacatcaaactcctaaaaaccaaaatcgcaactttccgaacaacaaccgaaaatcgatcccgcaaacacccaaatccaacgccacgaaaaacgacccactcctaccgaaccgaccgcgacacaaaccccgcccaacttaacgtttcaccatcccaaccttccccgcctacccaaccttcaccgctatccccgcattcccaacatacaccgccaacaccgccttcaccgccttcccgaaatcgcccgacgcgtccaaacgccaccgcgccctctccacctcccgctttccacgcgaccctcaaacccgcctcctccgccctaccttaatccgaatctaccccgaaataaacactttacgaatcaaattctaaaatccctcttactccgcttcgctatcaaacgaatcctctcccgacaccgccgaaacaacgacgaaaataaccgcgacgccgactccgacgaccgctcctccaacgacgcccgaaaaataatactaacctccgacccctaccatcctctccgactcctacgaaaacacaacaccgcccgacgaaaacgacgacgttaatcaacgaataaactctacccgaacgaaacccgaaaccccgtacccgaccgccgccgccatcttccgtttccctaactacccccgcgaaataaaaatcgcccgaaacaaacgccctccaaacaaaaatccacccgactcctccgctcgattcccgccgaaacgacgaccacgataaaacgcaaaaataacgaacccccgcccgcctcga

SEQ ID NO: 29771 - DNA, 799 bp, Artificial Sequence
  chemically treated genomic DNA (Homo sapiens) CpG-island No: 29771
atcgggttttttgtttcgtttttgatattaaatttttgggaattaagatcgtagtttttcgaataataatcgggaatcggtttcgtaagtatttaggtttagcgttacggggaacggtttatttttatcggatcggtcgcggtataggtttcgtttagtttaacgttttattattttagtttttttcgtttatttagtttttatcgttattttcgtatttttagtatatatcgttaatatcgtttttatcgttttttcgggatcgttcggcgcgtttaagcgttatcgcgttttttttatttttcgttttttacgcggtttttaggttcgtttttttcgttttattttggttcggatttgtttcgaggtagatattttgcggattagattttggggttttttttgtttcgtttcgttgttagacgaattttttttcggtatcgtcgaggtagcggcggaggtgatcgcggcgtcggtttcggcggtcgtttttttagcggcgttcggagggtggtgttggttttcggtttttgttatttttttcgatttttgcggggatatagtatcgttcggcgggggcggcggcgttggttagcgggtgggttttgttcgagcggagttcggaatttcgtgttcggtcgtcgtcgttatttttcgtttttttagttattttcgcgaggtaagggtcgttcgggataggcgttttttaggtaggggtttattcggttttttcgttcggttttcgtcggagcggcggttacggtgggacgtagaggtaacggattttcgttcgtttcgg

SEQ ID NO: 29772 - DNA, 799 bp, Artificial Sequence
  chemically treated genomic DNA (Homo sapiens) CpG-island No: 29772
ccgaaacgaacgaaaatccgttacctctacgtcccaccgtaaccgccgctccgacgaaaaccgaacgaaaaaaccgaataaacccctacctaaaaaacgcctatcccgaacgacccttacctcgcgaaaataactaaaaaaacgaaaaataacgacgacgaccgaacacgaaattccgaactccgctcgaacaaaacccacccgctaaccaacgccgccgcccccgccgaacgatactatatccccgcaaaaatcgaaaaaaataacaaaaaccgaaaaccaacaccaccctccgaacgccgctaaaaaaacgaccgccgaaaccgacgccgcgatcacctccgccgctacctcgacgataccgaaaaaaaattcgtctaacaacgaaacgaaacaaaaaaaaccccaaaatctaatccgcaaaatatctacctcgaaacaaatccgaaccaaaataaaacgaaaaaaacgaacctaaaaaccgcgtaaaaaacgaaaaataaaaaaaacgcgataacgcttaaacgcgccgaacgatcccgaaaaaacgataaaaacgatattaacgatatatactaaaaatacgaaaataacgataaaaactaaataaacgaaaaaaactaaaataataaaacgttaaactaaacgaaacctataccgcgaccgatccgataaaaataaaccgttccccgtaacgctaaacctaaatacttacgaaaccgattcccgattattattcgaaaaactacgatcttaattcccaaaaatttaatatcaaaaacgaaacaaaaaacccgat

SEQ ID NO: 29773 - DNA, 515 bp, Artificial Sequence
  chemically treated genomic DNA (Homo sapiens) CpG-island No: 29773
  unsure (342, 345, 348..349, 351..352, 356, 359, 361..362, 365..366)
  unsure (369, 371, 397)
gttattttcgcggttaagtttggggttgatattatgtagtatacggcgttatttataatgtatcggtttttttttgttatatataggtacgtatatttattttcgcgttcggagggagtttagggttcggttcgtgggcgtttaggcgtcgattttttcgatttcgtatttatttagaagttgtatcggtcgcgatttcgttttggcgttttcgggggtttggggttcggtcggcggcggtcgcggcgagcgatttcgggtaggatttagttagcgtcgaataaaggttgcgcgtaggtagcgggcgtcgtttgtattttcgtttcgcgtttcggcggcggnggnggnnnnnnggnttngnnggnnntngngttcgttcgtttcgcgttgttcgttntcggggcgtttcggttttcgcgttttcgttcgttgttgttcgtgttcgttgttttcgttttgtttttgttttttttttttttgtttttttgtttgtttttttttttttcgtttttttt

SEQ ID NO: 29774 - DNA, 515 bp, Artificial Sequence
  chemically treated genomic DNA (Homo sapiens) CpG-island No: 29774
  unsure (119, 145, 147, 149..150, 154..155, 157, 160, 163..164, 166..167)
  unsure (171, 174)
aaaaaaaacgaaaaaaaaaaaaacaaacaaaaaaacaaaaaaaaaaaaaacaaaaacaaaacgaaaacaacgaacacgaacaacaacgaacgaaaacgcgaaaaccgaaacgccccganaacgaacaacgcgaaacgaacgaacncnannnccnncnaanccnnnnnnccnccnccgccgccgaaacgcgaaacgaaaatacaaacgacgcccgctacctacgcgcaacctttattcgacgctaactaaatcctacccgaaatcgctcgccgcgaccgccgccgaccgaaccccaaacccccgaaaacgccaaaacgaaatcgcgaccgatacaacttctaaataaatacgaaatcgaaaaaatcgacgcctaaacgcccacgaaccgaaccctaaactccctccgaacgcgaaaataaatatacgtacctatatataacaaaaaaaaaccgatacattataaataacgccgtatactacataatatcaaccccaaacttaaccgcgaaaataac

SEQ ID NO: 29775 - DNA, 515 bp, Artificial Sequence
  chemically treated genomic DNA (Homo sapiens) CpG-island No: 29775
  unsure (119, 145, 147, 149..150, 154..155, 157, 160, 163..164, 166..167)
  unsure (171, 174)
agagagagcgagaaaaggagagataggtaagagaataaggaaagagggaataaagatagaacggagatagcgaatacggataatagcgagcgggagcgcgggagtcggagcgtttcggnagcgggtagcgcggaacgaacgggtntngnnnttnntnggnttnnnnnnttnttntcgtcgtcggggcgcggagcggggatgtaggcggcgttcgttgtttgcgcgtagtttttgttcggcgttggttgaattttattcggagtcgttcgtcgcggtcgtcgtcggtcgggttttaagttttcgagggcgttagggcgggatcgcgatcggtgtaatttttaggtaagtgcggggtcggaggggtcggcgtttgggcgtttacgggtcgggttttgggtttttttcgggcgcgggggtgagtgtgcgtgtttgtgtgtgatagaggagggtcggtgtattgtgggtagcgtcgtgtgttgtatggtgttagttttaggtttggtcgcgagagtggt

SEQ ID NO: 29776 - DNA, 515 bp, Artificial Sequence
  chemically treated genomic DNA (Homo sapiens) CpG-island No: 29776
  unsure (342, 345, 348..349, 351..352, 356, 359, 361..362, 365..366)
  unsure (369, 371, 397)
accactctcgcgaccaaacctaaaactaacaccatacaacacacgacgctacccacaatacaccgaccctcctctatcacacacaaacacgcacactcacccccgcgcccgaaaaaaacccaaaacccgacccgtaaacgcccaaacgccgacccctccgaccccgcacttacctaaaaattacaccgatcgcgatcccgccctaacgccctcgaaaacttaaaacccgaccgacgacgaccgcgacgaacgactccgaataaaattcaaccaacgccgaacaaaaactacgcgcaaacaacgaacgccgcctacatccccgctccgcgccccgacgacganaanaannnnnnaanccnannaannncnanacccgttcgttccgcgctacccgctnccgaaacgctccgactcccgcgctcccgctcgctattatccgtattcgctatctccgttctatctttattccctctttccttattctcttacctatctctccttttctcgctctctct

SEQ ID NO: 29777 - DNA, 1126 bp, Artificial Sequence
  chemically treated genomic DNA (Homo sapiens) CpG-island No: 29777
tacgtattcgaagcgtcgtagttcggttattacgtacgcgtgttttcgttataggtttcgtagttttacggtttgtcgggcggttgggttatgggcgcgtttcgttgtttttagtttcgtttaggtttcgcggtttttattattttatcgttgttaggacgttcgggtaaggagttagggacgcgtttatcgttttgcgtttattcggttttattttttcggttatcgtatgttttaggatgtacgcgtttacgcgagtaaggtttatcgtgtttatggcggtcgttgttagttttggttttcggtttttcgattttttgtttttcgttttcggtttttcgtttttggattttcgttttcggtttatagatttagttttaagtttcgtttcgagatgtttcggtttcgttttttttgttgtcgtcgaggtttcgttttttcgggttcgttttcgtttcgggttcgtttttaagatggtcgtagcgcgtttcggttacgttttcgatcgtatttcgagttttgtttcgttttttcggattcgtttttagtttcgttttgtttttttttttattttaggttaagtttcgagatcgcggcgttaaattttgggttcgtttgtttcggtttttttcgtttttttaattcgggttttgcgggatagttgttgtttcgcgttttggtttcgtttttagtttcgttttttcgttgggtcgtcgatttggatttcgtcggttattggcgtagtaggcggagttgggcggtgcggttttcggtgcgcggtgcgtttgtgcggaatgcggcgggaggcgggtagtcggttcggggtcgtttcggggggcgtcggggagcggttgggtacggtgggtttaggggtggtttagggagcggcgggggtttttttgcggtttcgcgcgagattgggttggatttagggttgaggggagagggtgagcgtaggggtcgcgggtataggggatcgcgggtcggggtttttcgcggggcgggggttttagtagtggggggcgggggggtgcgagggtttagtttttttacgtggtttggttttcgtttgaaaattttcgtaaatgcggtagtattttaattatatatggacgcgatgttttta

SEQ ID NO: 29778 - DNA, 1126 bp, Artificial Sequence
  chemically treated genomic DNA (Homo sapiens) CpG-island No: 29778
taaaaacatcgcgtccatatataattaaaatactaccgcatttacgaaaattttcaaacgaaaaccaaaccacgtaaaaaaactaaaccctcgcacccccccgccccccactactaaaacccccgccccgcgaaaaaccccgacccgcgatcccctatacccgcgacccctacgctcaccctctcccctcaaccctaaatccaacccaatctcgcgcgaaaccgcaaaaaaacccccgccgctccctaaaccacccctaaacccaccgtacccaaccgctccccgacgccccccgaaacgaccccgaaccgactacccgcctcccgccgcattccgcacaaacgcaccgcgcaccgaaaaccgcaccgcccaactccgcctactacgccaataaccgacgaaatccaaatcgacgacccaacgaaaaaacgaaactaaaaacgaaaccaaaacgcgaaacaacaactatcccgcaaaacccgaattaaaaaaacgaaaaaaaccgaaacaaacgaacccaaaatttaacgccgcgatctcgaaacttaacctaaaataaaaaaaaaaacaaaacgaaactaaaaacgaatccgaaaaaacgaaacaaaactcgaaatacgatcgaaaacgtaaccgaaacgcgctacgaccatcttaaaaacgaacccgaaacgaaaacgaacccgaaaaaacgaaacctcgacgacaacaaaaaaaacgaaaccgaaacatctcgaaacgaaacttaaaactaaatctataaaccgaaaacgaaaatccaaaaacgaaaaaccgaaaacgaaaaacaaaaaatcgaaaaaccgaaaaccaaaactaacaacgaccgccataaacacgataaaccttactcgcgtaaacgcgtacatcctaaaacatacgataaccgaaaaaataaaaccgaataaacgcaaaacgataaacgcgtccctaactccttacccgaacgtcctaacaacgataaaataataaaaaccgcgaaacctaaacgaaactaaaaacaacgaaacgcgcccataacccaaccgcccgacaaaccgtaaaactacgaaacctataacgaaaacacgcgtacgtaataaccgaactacgacgcttcgaatacgta

SEQ ID NO: 29779 - DNA, 1126 bp, Artificial Sequence
  chemically treated genomic DNA (Homo sapiens) CpG-island No: 29779
taaagatatcgcgtttatgtataattgagatgttgtcgtatttgcggggatttttaagcgaaaattaggttacgtggaaaggttaagttttcgtattttttcgttttttattgttgggattttcgtttcgcgggagatttcggttcgcggttttttatgttcgcgatttttgcgtttattttttttttttaattttgagtttagtttagtttcgcgcgaggtcgtagggagattttcgtcgttttttggattatttttgggtttatcgtatttagtcgtttttcggcgtttttcgggacgatttcgagtcggttgttcgtttttcgtcgtatttcgtataggcgtatcgcgtatcgagggtcgtatcgtttagtttcgtttgttgcgttaatggtcgacggggtttaagtcggcggtttaacggagaggcggggttaggggcgggattaggacgcgggatagtaattgtttcgtaaggttcggattgaggaggcgggagggatcgaagtaggcggatttaggatttggcgtcgcgatttcgaggtttggtttggagtaggaggggaaataaggcgggattaggggcgaattcgagggggcggagtagggttcggggtgcggtcgggggcgtggtcggggcgcgttgcggttattttgggggcgggttcggggcggagacgagttcgaaggggcggggtttcggcggtagtaagaaaggcgggatcggggtatttcggggcggggtttggggttggatttatgagtcgggagcggggatttaggagcgaggagtcgggagcggggaatagggagtcggggagtcgggaattagggttggtagcggtcgttatgagtacggtggattttgttcgcgtgggcgcgtgtattttgaagtatgcggtgatcggggaggtgaggtcgggtggacgtagggcggtgggcgcgtttttggttttttgttcgggcgttttggtagcgatggggtggtgggggtcgcggggtttgggcggggttgggggtaacggggcgcgtttatgatttagtcgttcggtaggtcgtggagttgcggagtttgtggcgggagtacgcgtgcgtggtggtcgggttgcggcgtttcgggtgcgtg

SEQ ID NO: 29780 - DNA, 1126 bp, Artificial Sequence
  chemically treated genomic DNA (Homo sapiens) CpG-island No: 29780
cacgcacccgaaacgccgcaacccgaccaccacgcacgcgtactcccgccacaaactccgcaactccacgacctaccgaacgactaaatcataaacgcgccccgttacccccaaccccgcccaaaccccgcgacccccaccaccccatcgctaccaaaacgcccgaacaaaaaaccaaaaacgcgcccaccgccctacgtccacccgacctcacctccccgatcaccgcatacttcaaaatacacgcgcccacgcgaacaaaatccaccgtactcataacgaccgctaccaaccctaattcccgactccccgactccctattccccgctcccgactcctcgctcctaaatccccgctcccgactcataaatccaaccccaaaccccgccccgaaataccccgatcccgcctttcttactaccgccgaaaccccgccccttcgaactcgtctccgccccgaacccgcccccaaaataaccgcaacgcgccccgaccacgcccccgaccgcaccccgaaccctactccgccccctcgaattcgcccctaatcccgccttatttcccctcctactccaaaccaaacctcgaaatcgcgacgccaaatcctaaatccgcctacttcgatccctcccgcctcctcaatccgaaccttacgaaacaattactatcccgcgtcctaatcccgcccctaaccccgcctctccgttaaaccgccgacttaaaccccgtcgaccattaacgcaacaaacgaaactaaacgatacgaccctcgatacgcgatacgcctatacgaaatacgacgaaaaacgaacaaccgactcgaaatcgtcccgaaaaacgccgaaaaacgactaaatacgataaacccaaaaataatccaaaaaacgacgaaaatctccctacgacctcgcgcgaaactaaactaaactcaaaattaaaaaaaaaaaataaacgcaaaaatcgcgaacataaaaaaccgcgaaccgaaatctcccgcgaaacgaaaatcccaacaataaaaaacgaaaaaatacgaaaacttaacctttccacgtaacctaattttcgcttaaaaatccccgcaaatacgacaacatctcaattatacataaacgcgatatcttta

SEQ ID NO: 29781 - DNA, 652 bp, Artificial Sequence
  chemically treated genomic DNA (Homo sapiens) CpG-island No: 29781
tggagcgagcggtagcgggagtagcggggatagtttggataagagtattacgttgtttttcgacgagatttttcgtaatttggagaacgttaagcgtttcgttatcgatataggtagtcgtaggtcgggcgtcgggcgcgggttgcgggggcgggcggggcgtcggcggtgggtcggcgagcgggggcggcgggaaggacgaagggcgggggcgcgggtttcgcgtatagttttacgggttttgtagttcgcgggttcgcgtatagttttacgggttttgtagttcgtagggtcgttgatgcgcgggttcggggcgacggtcggattatagttatcggtaggcgtcgtagggattagagcggggtttgtcgggtttggtagttcgcgcggtcgttttgggtggttgggggtcggggtttagcgttattcgtcgcgaggtgggagggtcggcggaattttatgttttcggttatatcggtatttgggcgtttcggtttcgtcgtttggttggtggttggtttgagatttggggtttttagttttggtcgagacgaggacgagttcggcgggaagtttttggtagagtggtttcgaaaaggtcgcgcgttttcgcggcgtggttagttgtggttcgcgggtcggatagttcgtg

SEQ ID NO: 29782 - DNA, 652 bp, Artificial Sequence
  chemically treated genomic DNA (Homo sapiens) CpG-island No: 29782
cacgaactatccgacccgcgaaccacaactaaccacgccgcgaaaacgcgcgaccttttcgaaaccactctaccaaaaacttcccgccgaactcgtcctcgtctcgaccaaaactaaaaaccccaaatctcaaaccaaccaccaaccaaacgacgaaaccgaaacgcccaaataccgatataaccgaaaacataaaattccgccgaccctcccacctcgcgacgaataacgctaaaccccgacccccaaccacccaaaacgaccgcgcgaactaccaaacccgacaaaccccgctctaatccctacgacgcctaccgataactataatccgaccgtcgccccgaacccgcgcatcaacgaccctacgaactacaaaacccgtaaaactatacgcgaacccgcgaactacaaaacccgtaaaactatacgcgaaacccgcgcccccgcccttcgtccttcccgccgcccccgctcgccgacccaccgccgacgccccgcccgcccccgcaacccgcgcccgacgcccgacctacgactacctatatcgataacgaaacgcttaacgttctccaaattacgaaaaatctcgtcgaaaaacaacgtaatactcttatccaaactatccccgctactcccgctaccgctcgctcca

SEQ ID NO: 29783 - DNA, 652 bp, Artificial Sequence
  chemically treated genomic DNA (Homo sapiens) CpG-island No: 29783
tacggattgttcggttcgcgggttatagttggttacgtcgcgggaacgcgcggttttttcggggttattttgttaagggtttttcgtcgagttcgttttcgtttcgattagaattaaggattttaaattttaggttagttattagttaagcggcggagtcggggcgtttagatgtcgatgtggtcgaagatataaaatttcgtcgatttttttatttcgcggcgggtaacgttggatttcggtttttagttatttaggacggtcgcgcgaattattaggttcggtaggtttcgttttggtttttgcggcgtttgtcggtagttgtagttcggtcgtcgtttcgagttcgcgtattagcgattttgcggattataaggttcgtgaggttgtgcgcgggttcgcggattataaggttcgtgaggttgtgcgcgaggttcgcgttttcgtttttcgtttttttcgtcgttttcgttcgtcggtttatcgtcggcgtttcgttcgttttcgtagttcgcgttcggcgttcggtttgcggttatttatgtcgatggcgaagcgtttggcgttttttaggttgcggaagatttcgtcggggggtagcgtgatgtttttgtttagattgttttcgttgttttcgttgtcgttcgtttta

SEQ ID NO: 29784 - DNA, 652 bp, Artificial Sequence
  chemically treated genomic DNA (Homo sapiens) CpG-island No: 29784
taaaacgaacgacaacgaaaacaacgaaaacaatctaaacaaaaacatcacgctaccccccgacgaaatcttccgcaacctaaaaaacgccaaacgcttcgccatcgacataaataaccgcaaaccgaacgccgaacgcgaactacgaaaacgaacgaaacgccgacgataaaccgacgaacgaaaacgacgaaaaaaacgaaaaacgaaaacgcgaacctcgcgcacaacctcacgaaccttataatccgcgaacccgcgcacaacctcacgaaccttataatccgcaaaatcgctaatacgcgaactcgaaacgacgaccgaactacaactaccgacaaacgccgcaaaaaccaaaacgaaacctaccgaacctaataattcgcgcgaccgtcctaaataactaaaaaccgaaatccaacgttacccgccgcgaaataaaaaaatcgacgaaattttatatcttcgaccacatcgacatctaaacgccccgactccgccgcttaactaataactaacctaaaatttaaaatccttaattctaatcgaaacgaaaacgaactcgacgaaaaacccttaacaaaataaccccgaaaaaaccgcgcgttcccgcgacgtaaccaactataacccgcgaaccgaacaatccgta

SEQ ID NO: 29785 - DNA, 512 bp, Artificial Sequence
  chemically treated genomic DNA (Homo sapiens) CpG-island No: 29785
gttttcgttcgggcggtttttttaagaagcgcgcgttagtttttagttcgttttgtatgtaaatgtagcggcgcggcgggagcgcgcggttgatattcgggattgggttgcggcggttagttttttttcggtcgtcgtcgttttcgatatattgttcgtaggagttgcggcggcgaagcggagagtatcggggggaggagatgggtgagtagagcggtttaggttcggtttggtaacgagcgggcgtacgggttaggatggttaggttgttaattgttgttttacgcggataggagttcggtgacgggagggggaggggatgcgagcgtagacgggattcgtttttttttgtcgttttgcggggtggggtttttgttgtgggggcgggatattggacggtgggcggtgtttttaagacgaagttttgtgggggtttgggttttcgtgaggattagttcgtcggggttagaaagggggggcgggatttattagtgggttgtggttttagcgtt

SEQ ID NO: 29786 - DNA, 512 bp, Artificial Sequence
  chemically treated genomic DNA (Homo sapiens) CpG-island No: 29786
aacgctaaaaccacaacccactaataaatcccgccccccctttctaaccccgacgaactaatcctcacgaaaacccaaacccccacaaaacttcgtcttaaaaacaccgcccaccgtccaatatcccgcccccacaacaaaaaccccaccccgcaaaacgacaaaaaaaaacgaatcccgtctacgctcgcatcccctccccctcccgtcaccgaactcctatccgcgtaaaacaacaattaacaacctaaccatcctaacccgtacgcccgctcgttaccaaaccgaacctaaaccgctctactcacccatctcctccccccgatactctccgcttcgccgccgcaactcctacgaacaatatatcgaaaacgacgacgaccgaaaaaaaactaaccgccgcaacccaatcccgaatatcaaccgcgcgctcccgccgcgccgctacatttacatacaaaacgaactaaaaactaacgcgcgcttcttaaaaaaaccgcccgaacgaaaac

SEQ ID NO: 29787 - DNA, 512 bp, Artificial Sequence
  chemically treated genomic DNA (Homo sapiens) CpG-island No: 29787
agcgttgaagttatagtttattggtaagtttcgttttttttttttagtttcgacgagttggtttttacgaaagtttaagtttttatagggtttcgttttagaagtatcgtttatcgtttaatgtttcgtttttataatagaggttttatttcgtaaaacgataggagggggcggatttcgtttgcgttcgtattttttttttttttcgttatcgggtttttgttcgcgtggagtagtaattagtagtttggttattttaattcgtgcgttcgttcgttgttaggtcgagtttgagtcgttttgtttatttatttttttttttcggtgtttttcgtttcgtcgtcgtagtttttgcgggtaatatgtcggaggcgacggcggtcgggagaggattaatcgtcgtagtttagtttcgggtattagtcgcgcgttttcgtcgcgtcgttatatttgtatataaggcgggttggaagttggcgcgcgttttttaaaggggtcgttcggacggaggt

SEQ ID NO: 29788 - DNA, 512 bp, Artificial Sequence
  chemically treated genomic DNA (Homo sapiens) CpG-island No: 29788
acctccgtccgaacgacccctttaaaaaacgcgcgccaacttccaacccgccttatatacaaatataacgacgcgacgaaaacgcgcgactaatacccgaaactaaactacgacgattaatcctctcccgaccgccgtcgcctccgacatattacccgcaaaaactacgacgacgaaacgaaaaacaccgaaaaaaaaaaataaataaacaaaacgactcaaactcgacctaacaacgaacgaacgcacgaattaaaataaccaaactactaattactactccacgcgaacaaaaacccgataacgaaaaaaaaaaaaaatacgaacgcaaacgaaatccgccccctcctatcgttttacgaaataaaacctctattataaaaacgaaacattaaacgataaacgatacttctaaaacgaaaccctataaaaacttaaactttcgtaaaaaccaactcgtcgaaactaaaaaaaaaaaacgaaacttaccaataaactataacttcaacgct

SEQ ID NO: 29789 - DNA, 638 bp, Artificial Sequence
  chemically treated genomic DNA (Homo sapiens) CpG-island No: 29789
gtatgcggttagcgattttagggtatatcgtggtgtttttcgatatgacgttgttggtatataggttttttttgatgtcgatgttatattttatgatgttgttgtaggtggtttcgtgaatgttcgtcgattttatatttggggatcgcggcggggagcgtgagtagaagttcggggcgtcgggggtcggcggggtttgggggtcggggcgagggcgagcggggtttatcgatgaaggagggttggaagagcgttttcgggtagcggaagcgttcgttgtcgatggtgatgatttgttcgtttggtagttcgtagtttttttttagggaggaggaggaggcggtcgtcgttatttcgttttcgaagtttagggttacgtagtatagtttttttttgatgtcgcgtacgatttcgcgtttagttgcggagggtagaagtaggagaggagtttttatttaggggtcgtcgtcggttttttcgttcggggtgtaggggcgtcgcgtatttgtggttacgaaggagtagttacgtttagtgaggatttttattaggtagtcggtgagatcgcggttcgttaggtttaggcgtatgatggcgtgcggtagcgcgtagtttttataaatgggtacgttgtgggt

SEQ ID NO: 29790 - DNA, 638 bp, Artificial Sequence
  chemically treated genomic DNA (Homo sapiens) CpG-island No: 29790
acccacaacgtacccatttataaaaactacgcgctaccgcacgccatcatacgcctaaacctaacgaaccgcgatctcaccgactacctaataaaaatcctcactaaacgtaactactccttcgtaaccacaaatacgcgacgcccctacaccccgaacgaaaaaaccgacgacgacccctaaataaaaactcctctcctacttctaccctccgcaactaaacgcgaaatcgtacgcgacatcaaaaaaaaactatactacgtaaccctaaacttcgaaaacgaaataacgacgaccgcctcctcctcctccctaaaaaaaaactacgaactaccaaacgaacaaatcatcaccatcgacaacgaacgcttccgctacccgaaaacgctcttccaaccctccttcatcgataaaccccgctcgccctcgccccgacccccaaaccccgccgacccccgacgccccgaacttctactcacgctccccgccgcgatccccaaatataaaatcgacgaacattcacgaaaccacctacaacaacatcataaaatataacatcgacatcaaaaaaaacctatataccaacaacgtcatatcgaaaaacaccacgatataccctaaaatcgctaaccgcatac

SEQ ID NO: 29791 - DNA, 638 bp, Artificial Sequence
  chemically treated genomic DNA (Homo sapiens) CpG-island No: 29791
atttataacgtgtttatttatgagggttacgcgttgtcgtacgttattatgcgtttggatttggcgggtcgcgattttatcgattatttgatgaagatttttattgagcgtggttattttttcgtgattataggtgcgcggcgtttttgtatttcgggcgggagggtcggcggcggtttttgagtgagggttttttttttgtttttgtttttcgtagttgagcgcgagatcgtgcgcgatattaaggagaagttgtgttacgtggttttggatttcgagaacgagatggcgacggtcgttttttttttttttttggaaaagagttacgagttgttagacgggtaggttattattatcggtaacgagcgttttcgttgttcggagacgtttttttagtttttttttatcggtgagtttcgttcgttttcgtttcggtttttaggtttcgtcggttttcggcgtttcgagtttttgtttacgtttttcgtcgcggtttttaggtatggagtcggcgggtatttacgagattatttataatagtattatgaagtgtgatatcgatattaggaaggatttgtatgttaataacgttatgtcggggggtattacgatgtattttgggatcgttgatcgtatgt

SEQ ID NO: 29792 - DNA, 638 bp, Artificial Sequence
  chemically treated genomic DNA (Homo sapiens) CpG-island No: 29792
acatacgatcaacgatcccaaaatacatcgtaataccccccgacataacgttattaacatacaaatccttcctaatatcgatatcacacttcataatactattataaataatctcgtaaatacccgccgactccatacctaaaaaccgcgacgaaaaacgtaaacaaaaactcgaaacgccgaaaaccgacgaaacctaaaaaccgaaacgaaaacgaacgaaactcaccgataaaaaaaaactaaaaaaacgtctccgaacaacgaaaacgctcgttaccgataataataacctacccgtctaacaactcgtaactcttttccaaaaaaaaaaaaaaaacgaccgtcgccatctcgttctcgaaatccaaaaccacgtaacacaacttctccttaatatcgcgcacgatctcgcgctcaactacgaaaaacaaaaacaaaaaaaaaaccctcactcaaaaaccgccgccgaccctcccgcccgaaatacaaaaacgccgcgcacctataatcacgaaaaaataaccacgctcaataaaaatcttcatcaaataatcgataaaatcgcgacccgccaaatccaaacgcataataacgtacgacaacgcgtaaccctcataaataaacacgttataaat

SEQ ID NO: 29793 - DNA, 674 bp, Artificial Sequence
  chemically treated genomic DNA (Homo sapiens) CpG-island No: 29793
tgagcggaattaggaggggacgttaaaatcggtttttacgacgcgtagcgggtgggggttagggtttggtttgggcgggcgtttttttttgcgcgtttttttttagtcgttggtcgattgattcggtcgtttcgcgtttttcgttgtcgtagaggttagagttttttttcgttgtttgttagggatatatgtcgtaatttcggttttttttatcgtttcgatttagtttcgttttttttagtttttttatcgtttttcggcgcgacggtcggtagtcgatcgaggtttttgtttttttttgtttaaggtgtcggtcgtttttattgtttcggcggtttttgcgttttttttaaacgcgcgttttcggttttgtttttttcgttttagtttttttttcgggagttttgtttcggtttttgttattttcggtttttagcgtatttttttttttttatttttgcgttttagtttttttttgtagtcgtcggttttttttattgttttcgcgtttttggagtttttttcggagtttttttgcgttttcgtttttttggggtttttttagttttcgcgcggatcgtttaggtttggtaaatttttttttaagttaagtaataatgaaaagttcgtgcgattcgaatattttagtttttttcgtaggaatgggatttttt

SEQ ID NO: 29794 - DNA, 674 bp, Artificial Sequence
  chemically treated genomic DNA (Homo sapiens) CpG-island No: 29794
aaaaaatcccattcctacgaaaaaaactaaaatattcgaatcgcacgaacttttcattattacttaacttaaaaaaaaatttaccaaacctaaacgatccgcgcgaaaactaaaaaaaccccaaaaaaacgaaaacgcaaaaaaactccgaaaaaaactccaaaaacgcgaaaacaataaaaaaaaccgacgactacaaaaaaaaactaaaacgcaaaaataaaaaaaaaaaaatacgctaaaaaccgaaaataacaaaaaccgaaacaaaactcccgaaaaaaaaactaaaacgaaaaaaacaaaaccgaaaacgcgcgtttaaaaaaaacgcaaaaaccgccgaaacaataaaaacgaccgacaccttaaacaaaaaaaaacaaaaacctcgatcgactaccgaccgtcgcgccgaaaaacgataaaaaaactaaaaaaaacgaaactaaatcgaaacgataaaaaaaaccgaaattacgacatatatccctaacaaacaacgaaaaaaaactctaacctctacgacaacgaaaaacgcgaaacgaccgaatcaatcgaccaacgactaaaaaaaaacgcgcaaaaaaaaacgcccgcccaaaccaaaccctaacccccacccgctacgcgtcgtaaaaaccgattttaacgtcccctcctaattccgctca

SEQ ID NO: 29795 - DNA, 674 bp, Artificial Sequence
  chemically treated genomic DNA (Homo sapiens) CpG-island No: 29795
ggaggattttatttttgcggggaaggttagggtgttcgggtcgtacgggttttttattgttatttggtttgggagggggtttgttaggtttgggcgattcgcgcgagagttggaaaagttttagagaggcggagacgtagagaggtttcgagaggagttttagagacgcggggataatgagggggatcgacggttgtagagagagattgagacgtagggatggaggggagggggtacgttggagatcgagggtggtagagatcgagataaagttttcgagaggggagttgaagcgggagagatagagtcgaggacgcgcgtttggggaggacgtagaagtcgtcgaaataataagggcgatcgatattttagatagggagagatagagatttcgatcggttgtcggtcgtcgcgtcgagggacgatggagggattgagaaaggcgaggttaagtcgagacggtaagagaggtcgaggttacggtatgtgtttttggtaggtagcgaagggaggttttgatttttgcggtagcggggagcgcggggcggtcgagttagtcggttagcggttgggagagggcgcgtaggagggggcgttcgtttaggttaggttttaatttttattcgttgcgcgtcgtgggaatcggttttggcgtttttttttggtttcgttta

SEQ ID NO: 29796 - DNA, 674 bp, Artificial Sequence
  chemically treated genomic DNA (Homo sapiens) CpG-island No: 29796
taaacgaaaccaaaaaaaaacgccaaaaccgattcccacgacgcgcaacgaataaaaattaaaacctaacctaaacgaacgccccctcctacgcgccctctcccaaccgctaaccgactaactcgaccgccccgcgctccccgctaccgcaaaaatcaaaacctcccttcgctacctaccaaaaacacataccgtaacctcgacctctcttaccgtctcgacttaacctcgcctttctcaatccctccatcgtccctcgacgcgacgaccgacaaccgatcgaaatctctatctctccctatctaaaatatcgatcgcccttattatttcgacgacttctacgtcctccccaaacgcgcgtcctcgactctatctctcccgcttcaactcccctctcgaaaactttatctcgatctctaccaccctcgatctccaacgtaccccctcccctccatccctacgtctcaatctctctctacaaccgtcgatccccctcattatccccgcgtctctaaaactcctctcgaaacctctctacgtctccgcctctctaaaacttttccaactctcgcgcgaatcgcccaaacctaacaaaccccctcccaaaccaaataacaataaaaaacccgtacgacccgaacaccctaaccttccccgcaaaaataaaatcctcc

SEQ ID NO: 29797 - DNA, 869 bp, Artificial Sequence
  chemically treated genomic DNA (Homo sapiens) CpG-island No: 29797
tcgcgcgggtggagatttttagttgttgttagaagtcgttacgtttttagggtgatttagtcggggattcggtttagggggacgcgtttttgcgattcgttttagtcggattcgtagtgcgggattttttaattttgtaagaagggatttcgttaggtttgaacgggttttagcgggtgggagattttcgtaatttttgtttaggtcgcggcgcgggaaaaagggggtgttagataagggggtcgcgaatttatttcgtttgtttcggtcgatttggtttagtttgggcggtcgtttgttttgttcggcgtcgaagaagttgttggtgttttgtaggcggtaggagaagatttggtttacgtcgtcgtcgtcgtcgtaggggtttagtttttcgtcgtcgtagggtagtattttcgatatggtcgcgttcgggggtttcgtcgcggcgtttttttcgatcgcgttttcgttcgcggcggatagggttagcggcgttggggtcgggggcggtcggtcggggacggttcgcgggttgttgcggcggtggcgtcggcgagaggtcgggggacgtcgttagggtaagagcgcggtattcgcgcgagcggttcggagagcgttcgcggttgcgttgcgttgcgtttcggtttcgcgcgcgagtggttgttgtttcgttagaggcgagtaggatttatattttcggcgcgttggggttttgggcgggggtcgggtcgggcggggtcgcgagtcgggagggaggagacgtttttgcgagttcggagggcgcgggatcgaggagggcgtatttcgggagtcgggcgggtcggttttgcggcgagtgcgggcggcggcgtcggttcggggaggtagat

SEQ ID NO: 29798 - DNA, 869 bp, Artificial Sequence
  chemically treated genomic DNA (Homo sapiens) CpG-island No: 29798
atctacctccccgaaccgacgccgccgcccgcactcgccgcaaaaccgacccgcccgactcccgaaatacgccctcctcgatcccgcgccctccgaactcgcaaaaacgtctcctccctcccgactcgcgaccccgcccgacccgacccccgcccaaaaccccaacgcgccgaaaatataaatcctactcgcctctaacgaaacaacaaccactcgcgcgcgaaaccgaaacgcaacgcaacgcaaccgcgaacgctctccgaaccgctcgcgcgaataccgcgctcttaccctaacgacgtcccccgacctctcgccgacgccaccgccgcaacaacccgcgaaccgtccccgaccgaccgcccccgaccccaacgccgctaaccctatccgccgcgaacgaaaacgcgatcgaaaaaaacgccgcgacgaaacccccgaacgcgaccatatcgaaaatactaccctacgacgacgaaaaactaaacccctacgacgacgacgacgacgtaaaccaaatcttctcctaccgcctacaaaacaccaacaacttcttcgacgccgaacaaaacaaacgaccgcccaaactaaaccaaatcgaccgaaacaaacgaaataaattcgcgacccccttatctaacaccccctttttcccgcgccgcgacctaaacaaaaattacgaaaatctcccacccgctaaaacccgttcaaacctaacgaaatcccttcttacaaaattaaaaaatcccgcactacgaatccgactaaaacgaatcgcaaaaacgcgtccccctaaaccgaatccccgactaaatcaccctaaaaacgtaacgacttctaacaacaactaaaaatctccacccgcgcga

SEQ ID NO: 29799 - DNA, 869 bp, Artificial Sequence
  chemically treated genomic DNA (Homo sapiens) CpG-island No: 29799
gtttgttttttcgaatcggcgtcgtcgttcgtattcgtcgtaggatcggttcgttcggttttcggggtgcgtttttttcggtttcgcgtttttcgggttcgtagggacgttttttttttttcggttcgcggtttcgttcggttcggttttcgtttagagttttagcgcgtcgaggatgtgagttttgttcgtttttggcggagtagtagttattcgcgcgcggagtcggagcgtagcgtagcgtagtcgcgggcgtttttcgggtcgttcgcgcgagtgtcgcgtttttgttttagcggcgtttttcggtttttcgtcggcgttatcgtcgtagtagttcgcgggtcgttttcggtcggtcgttttcggttttagcgtcgttgattttgttcgtcgcgggcggggacgcggtcggaggaggcgtcgcggcggagttttcggacgcgattatgtcggaggtgttgttttacggcgacgagaagttgagtttttacggcgacggcggcgacgtgggttagatttttttttgtcgtttgtaggatattaataattttttcggcgtcgggtagaataagcggtcgtttaagttgggttagatcggtcggagtaagcggggtgagttcgcggtttttttgtttgatattttttttttttcgcgtcgcggtttgaataagggttgcggaggttttttattcgttggagttcgtttagatttgacggaatttttttttgtagaattgggggatttcgtattgcgggttcggttgaagcgggtcgtaggaacgcgtttttttaagtcggattttcggttgggttattttgggggcgtggcggtttttagtagtagttgggggtttttattcgcgcgg

SEQ ID NO: 29800 - DNA, 869 bp, Artificial Sequence
  chemically treated genomic DNA (Homo sapiens) CpG-island No: 29800
ccgcgcgaataaaaacccccaactactactaaaaaccgccacgcccccaaaataacccaaccgaaaatccgacttaaaaaaacgcgttcctacgacccgcttcaaccgaacccgcaatacgaaatcccccaattctacaaaaaaaaattccgtcaaatctaaacgaactccaacgaataaaaaacctccgcaacccttattcaaaccgcgacgcgaaaaaaaaaaaatatcaaacaaaaaaaccgcgaactcaccccgcttactccgaccgatctaacccaacttaaacgaccgcttattctacccgacgccgaaaaaattattaatatcctacaaacgacaaaaaaaaatctaacccacgtcgccgccgtcgccgtaaaaactcaacttctcgtcgccgtaaaacaacacctccgacataatcgcgtccgaaaactccgccgcgacgcctcctccgaccgcgtccccgcccgcgacgaacaaaatcaacgacgctaaaaccgaaaacgaccgaccgaaaacgacccgcgaactactacgacgataacgccgacgaaaaaccgaaaaacgccgctaaaacaaaaacgcgacactcgcgcgaacgacccgaaaaacgcccgcgactacgctacgctacgctccgactccgcgcgcgaataactactactccgccaaaaacgaacaaaactcacatcctcgacgcgctaaaactctaaacgaaaaccgaaccgaacgaaaccgcgaaccgaaaaaaaaaaaacgtccctacgaacccgaaaaacgcgaaaccgaaaaaaacgcaccccgaaaaccgaacgaaccgatcctacgacgaatacgaacgacgacgccgattcgaaaaaacaaac

SEQ ID NO: 29801 - DNA, 700 bp, Artificial Sequence
  chemically treated genomic DNA (Homo sapiens) CpG-island No: 29801
ttcgtcgcgttgttttagggcgtaagttttacgcgtttcgtcgggcgtagaaaagtatttttcgtttcgcggggtttaggtcgtttttttcgataacgtattttcgtagcgacgtttgcgtttggaaggggttcggtatttagatcgtagtttcgcgcgggttatattttttagtaagtgtttcggtagcgttttaggagattcgtcgcgttcgtcggagttggacgtggcgtcgaggttcgcgtcgtcgttcgtatttcggtgtttatttgtattacgtagtagtttagggtatttttttgagcgttaggagggacgatgtttcggggcgtgtggttcgggtgtaagaaatgaattatggtaatttcggcggcggggcgttaaaaagagagtcggcgtcgagtcggagttcggatttcgcgagaattaagcgggcggttgttaggacgcgtttattacgtttgcgaggtatacggagttagcgtcgcgttttgtcggcgagtttttgaaatgttcggcgaggcgacgcgtacgcgggggtcggttcgtcgtagattttatttttcgggcggttttttagttttattcgtttttcgatacgtcgttgtcggggttaatcgtttttttttcgtttttttagtttttttagtttttttagattaatttgttacgatttagtcgtttatttatttttttttag

SEQ ID NO: 29802 - DNA, 700 bp, Artificial Sequence
  chemically treated genomic DNA (Homo sapiens) CpG-island No: 29802
ctaaaaaaaaataaataaacgactaaatcgtaacaaattaatctaaaaaaactaaaaaaactaaaaaaacgaaaaaaaaacgattaaccccgacaacgacgtatcgaaaaacgaataaaactaaaaaaccgcccgaaaaataaaatctacgacgaaccgacccccgcgtacgcgtcgcctcgccgaacatttcaaaaactcgccgacaaaacgcgacgctaactccgtatacctcgcaaacgtaataaacgcgtcctaacaaccgcccgcttaattctcgcgaaatccgaactccgactcgacgccgactctctttttaacgccccgccgccgaaattaccataattcatttcttacacccgaaccacacgccccgaaacatcgtccctcctaacgctcaaaaaaataccctaaactactacgtaatacaaataaacaccgaaatacgaacgacgacgcgaacctcgacgccacgtccaactccgacgaacgcgacgaatctcctaaaacgctaccgaaacacttactaaaaaatataacccgcgcgaaactacgatctaaataccgaaccccttccaaacgcaaacgtcgctacgaaaatacgttatcgaaaaaaacgacctaaaccccgcgaaacgaaaaatacttttctacgcccgacgaaacgcgtaaaacttacgccctaaaacaacgcgacgaa

SEQ ID NO: 29803 - DNA, 700 bp, Artificial Sequence
  chemically treated genomic DNA (Homo sapiens) CpG-island No: 29803
ttgggaaggagtgggtgagcggttgggtcgtggtaggttggtttggggaggttggggaggttggggaggcgggaggagaacggttggtttcggtagcggcgtgtcggagggcggatggggttaggaggtcgttcggggggtggggtttgcggcgggtcggttttcgcgtgcgcgtcgtttcgtcgggtattttaaaagttcgtcggtagggcgcggcgttagtttcgtgtgtttcgtaggcgtggtgggcgcgttttggtagtcgttcgtttggttttcgcgggattcgggtttcggttcgacgtcggttttttttttgacgtttcgtcgtcggggttgttatggtttattttttgtattcgggttatacgtttcggaatatcgttttttttgacgtttagaaggatgttttgggttgttgcgtggtataggtgagtatcggggtgcgggcggcgacgcggatttcggcgttacgtttagtttcggcgagcgcggcgagttttttgggacgttgtcgaggtatttgttggggagtgtggttcgcgcggggttgcggtttagatgtcgagttttttttaggcgtaggcgtcgttgcggaggtgcgttgtcgggggaggcggtttgggtttcgcggagcggggggtgtttttttgcgttcggcgaagcgcgtggaatttgcgttttgaggtagcgcggcgag

SEQ ID NO: 29804 - DNA, 700 bp, Artificial Sequence
  chemically treated genomic DNA (Homo sapiens) CpG-island No: 29804
ctcgccgcgctacctcaaaacgcaaattccacgcgcttcgccgaacgcaaaaaaacaccccccgctccgcgaaacccaaaccgcctcccccgacaacgcacctccgcaacgacgcctacgcctaaaaaaaactcgacatctaaaccgcaaccccgcgcgaaccacactccccaacaaatacctcgacaacgtcccaaaaaactcgccgcgctcgccgaaactaaacgtaacgccgaaatccgcgtcgccgcccgcaccccgatactcacctataccacgcaacaacccaaaacatccttctaaacgtcaaaaaaaacgatattccgaaacgtataacccgaatacaaaaaataaaccataacaaccccgacgacgaaacgtcaaaaaaaaaaccgacgtcgaaccgaaacccgaatcccgcgaaaaccaaacgaacgactaccaaaacgcgcccaccacgcctacgaaacacacgaaactaacgccgcgccctaccgacgaacttttaaaatacccgacgaaacgacgcgcacgcgaaaaccgacccgccgcaaaccccaccccccgaacgacctcctaaccccatccgccctccgacacgccgctaccgaaaccaaccgttctcctcccgcctccccaacctccccaacctccccaaaccaacctaccacgacccaaccgctcacccactccttcccaa

SEQ ID NO: 29805 - DNA, 560 bp, Artificial Sequence
  chemically treated genomic DNA (Homo sapiens) CpG-island No: 29805
tttcgtagttgtagttttagtttttggagtcgttcgtttaggcgttgtagtttcgcgacgtagtcgttttcgtcgtaatttaattttttttgttcggttttttcgttcgttatttttatatttcgtttcgtcgcgtacgtatttgggttacgtgataatataatgttacgttcggcggggttacgtgtcgggcgcgtttgtacggcgtcgagtacgtataaagggttcgatggggaagatatgggggtggggagagtggcgcgagagagttcgagggaggtgaaggtaaggggaaaggagaagggcggggttggggcggtgcggaaaacggcggtttatttatttcgagcgggaagtgggtagtagcggtcgaaaggggcgggttggtgaaggtttgttttcggttacgtgggcgtcgcgacgggaaaaagtttagggaggggcgatttttttcggcgtttcgatttcggcgtggttttttttagtttacgaagttttttacggatatatttttttgttttttaagaggatggtatagggagagttttgagtggtttcgg

SEQ ID NO: 29806 - DNA, 560 bp, Artificial Sequence
  chemically treated genomic DNA (Homo sapiens) CpG-island No: 29806
ccgaaaccactcaaaactctccctataccatcctcttaaaaaacaaaaaaatatatccgtaaaaaacttcgtaaactaaaaaaaaccacgccgaaatcgaaacgccgaaaaaaatcgcccctccctaaactttttcccgtcgcgacgcccacgtaaccgaaaacaaaccttcaccaacccgcccctttcgaccgctactacccacttcccgctcgaaataaataaaccgccgttttccgcaccgccccaaccccgcccttctcctttccccttaccttcacctccctcgaactctctcgcgccactctccccacccccatatcttccccatcgaaccctttatacgtactcgacgccgtacaaacgcgcccgacacgtaaccccgccgaacgtaacattatattatcacgtaacccaaatacgtacgcgacgaaacgaaatataaaaataacgaacgaaaaaaccgaacaaaaaaaattaaattacgacgaaaacgactacgtcgcgaaactacaacgcctaaacgaacgactccaaaaactaaaactacaactacgaaa

SEQ ID NO: 29807 - DNA, 560 bp, Artificial Sequence
  chemically treated genomic DNA (Homo sapiens) CpG-island No: 29807
tcgagattatttagaattttttttgtgttatttttttggggaataggaggatatgttcgtagaagatttcgtggattggggaaagttacgtcgggatcgggacgtcggagagggtcgtttttttttaggttttttttcgtcgcggcgtttacgtgatcgagagtaggtttttattagttcgtttttttcggtcgttgttgtttatttttcgttcggggtaagtaaatcgtcgtttttcgtatcgttttaatttcgttttttttttttttttttgtttttatttttttcgggttttttcgcgttattttttttatttttatattttttttatcgggttttttgtacgtgttcggcgtcgtgtaagcgcgttcggtacgtgatttcgtcgaacgtggtattgtgttattacgtgatttaggtgcgtacgcgacggagcggggtgtgaagatggcggacgaagaggtcgagtaggagaggttgagttgcggcgaaggcggttgcgtcgcggagttgtagcgtttgggcgagcggttttaggagttggagttatagttgcggga

SEQ ID NO: 29808 - DNA, 560 bp, Artificial Sequence
  chemically treated genomic DNA (Homo sapiens) CpG-island No: 29808
tcccgcaactataactccaactcctaaaaccgctcgcccaaacgctacaactccgcgacgcaaccgccttcgccgcaactcaacctctcctactcgacctcttcgtccgccatcttcacaccccgctccgtcgcgtacgcacctaaatcacgtaataacacaataccacgttcgacgaaatcacgtaccgaacgcgcttacacgacgccgaacacgtacaaaaaacccgataaaaaaaatataaaaataaaaaaaataacgcgaaaaaacccgaaaaaaataaaaacaaaaaaaaaaaaaaaaaacgaaattaaaacgatacgaaaaacgacgatttacttaccccgaacgaaaaataaacaacaacgaccgaaaaaaacgaactaataaaaacctactctcgatcacgtaaacgccgcgacgaaaaaaaacctaaaaaaaaacgaccctctccgacgtcccgatcccgacgtaactttccccaatccacgaaatcttctacgaacatatcctcctattccccaaaaaaataacacaaaaaaaattctaaataatctcga

SEQ ID NO: 29809 - DNA, 857 bp, Artificial Sequence
  chemically treated genomic DNA (Homo sapiens) CpG-island No: 29809
gatgttggagtttaggtcgtttcgtagcgtcgtcgttatcggcgacggattcggttttgtttcgtcgtcgtcgtcgttttcgttagggtagttttcgtcgtcgtcgttcggcgggtagtcgaaggttaaggttattttttcgaatagtagcgagtttattatgcgtcggttgcgcggtttagggtttcgggttcgcggttttaggtgcggttttagtttcgggtagggttttcggcgcggtcgggttagggtgggcgcgggttttagcgcggtcggtcgggcggttttagatgcgcgttagatgcggttttcgtagagacggtaggacggatggtttcggatgcgggcgtcgaggcgagagagggtattcggtcgtttttcgggacgcggtggaggtcgcggtatttgcgcggggttagaagggtcgcgggttttatcgttcgggttgttagagacgttgtggaggggtcgcggtagtcgtacgtagaggattttcggtcggtattgttttttttgcggcgggtttcgtttattgtagatattggtttcgttttcgtcgcggtttcgtttattttttttttttttgcggcgtttttcgagttcgaggtttcgttttacgaggttcgtagcgtcgggttttatttatagattttcggtttcgtttattttcgggttttttcgtttttttcgtagtatagatttcgtttagtttttcggcggggttacgtttttttttgcgtttggttttgttttttcgtcgggtgtcgattttttgttgggggattcggatcgtagagttgtattagggatcgggttagttggaatcgtcgtagagttagtcgggttttttaaagggg

SEQ ID NO: 29810 - DNA, 857 bp, Artificial Sequence
  chemically treated genomic DNA (Homo sapiens) CpG-island No: 29810
cccctttaaaaaacccgactaactctacgacgattccaactaacccgatccctaatacaactctacgatccgaatcccccaacaaaaaatcgacacccgacgaaaaaacaaaaccaaacgcaaaaaaaaacgtaaccccgccgaaaaactaaacgaaatctatactacgaaaaaaacgaaaaaacccgaaaataaacgaaaccgaaaatctataaataaaacccgacgctacgaacctcgtaaaacgaaacctcgaactcgaaaaacgccgcaaaaaaaaaaaaaataaacgaaaccgcgacgaaaacgaaaccaatatctacaataaacgaaacccgccgcaaaaaaaacaataccgaccgaaaatcctctacgtacgactaccgcgacccctccacaacgtctctaacaacccgaacgataaaacccgcgacccttctaaccccgcgcaaataccgcgacctccaccgcgtcccgaaaaacgaccgaataccctctctcgcctcgacgcccgcatccgaaaccatccgtcctaccgtctctacgaaaaccgcatctaacgcgcatctaaaaccgcccgaccgaccgcgctaaaacccgcgcccaccctaacccgaccgcgccgaaaaccctacccgaaactaaaaccgcacctaaaaccgcgaacccgaaaccctaaaccgcgcaaccgacgcataataaactcgctactattcgaaaaaataaccttaaccttcgactacccgccgaacgacgacgacgaaaactaccctaacgaaaacgacgacgacgacgaaacaaaaccgaatccgtcgccgataacgacgacgctacgaaacgacctaaactccaacatc

SEQ ID NO: 29811 - DNA, 857 bp, Artificial Sequence
  chemically treated genomic DNA (Homo sapiens) CpG-island No: 29811
tttttttaagaggttcggttggttttgcggcggttttagttaattcggtttttggtgtagttttgcggttcgggttttttagtagagaatcggtattcggcggggaggtaggattagacgtaggagagggcgtggtttcgtcggggagttgggcggagtttatgttgcggagaaagcgggagaattcggaggtgggcggagtcgagggtttgtgggtggggttcggcgttgcgggtttcgtggggcggagtttcgggttcggggaacgtcgtagaaggaggaggggtgggcggggtcgcggcgggggcggggttagtgtttgtagtgggcggggttcgtcgtagaaggggtagtgtcggtcgagagttttttgcgtgcggttgtcgcggtttttttatagcgtttttgatagttcgggcggtgagattcgcgatttttttggtttcgcgtagatatcgcggtttttatcgcgtttcgaggagcggtcgagtgttttttttcgtttcggcgttcgtattcggggttattcgttttgtcgtttttgcggaggtcgtatttggcgcgtatttggaatcgttcggtcggtcgcgttggagttcgcgtttattttggttcggtcgcgtcgggagttttgttcggagttggagtcgtatttggagtcgcgggttcggggttttgagtcgcgtagtcggcgtatggtgaattcgttgttgttcggggagatggttttggttttcggttgttcgtcgggcggcggcggcgggggttgttttggcgggggcggcggcggcggcggggtagggtcgggttcgtcgtcggtgacggcggcgttgcgggacgatttgggttttaatatt

SEQ ID NO: 29812 - DNA, 857 bp, Artificial Sequence
  chemically treated genomic DNA (Homo sapiens) CpG-island No: 29812
aatattaaaacccaaatcgtcccgcaacgccgccgtcaccgacgacgaacccgaccctaccccgccgccgccgccgcccccgccaaaacaacccccgccgccgccgcccgacgaacaaccgaaaaccaaaaccatctccccgaacaacaacgaattcaccatacgccgactacgcgactcaaaaccccgaacccgcgactccaaatacgactccaactccgaacaaaactcccgacgcgaccgaaccaaaataaacgcgaactccaacgcgaccgaccgaacgattccaaatacgcgccaaatacgacctccgcaaaaacgacaaaacgaataaccccgaatacgaacgccgaaacgaaaaaaaacactcgaccgctcctcgaaacgcgataaaaaccgcgatatctacgcgaaaccaaaaaaatcgcgaatctcaccgcccgaactatcaaaaacgctataaaaaaaccgcgacaaccgcacgcaaaaaactctcgaccgacactaccccttctacgacgaaccccgcccactacaaacactaaccccgcccccgccgcgaccccgcccacccctcctccttctacgacgttccccgaacccgaaactccgccccacgaaacccgcaacgccgaaccccacccacaaaccctcgactccgcccacctccgaattctcccgctttctccgcaacataaactccgcccaactccccgacgaaaccacgccctctcctacgtctaatcctacctccccgccgaataccgattctctactaaaaaacccgaaccgcaaaactacaccaaaaaccgaattaactaaaaccgccgcaaaaccaaccgaacctcttaaaaaaa

SEQ ID NO: 29813 - DNA, 526 bp, Artificial Sequence
  chemically treated genomic DNA (Homo sapiens) CpG-island No: 29813
gtgagcgttttagtatttgtcgttttgggcgttttttttatttgcgcgttttacgttcgttttcggtcggtttttaggttttagaggcgatttcgaggaatcgtttcgtttttaaggggcggagtttttttatcgtcgcgttcggtattcggtttatgttgtttcgtttcggcggtcgtttagcgggaggcggagcgagtttaaaatggcggtttttaggttggcgcgtttcgtgttgttggggttttgaggtggtcgtcgggggttcgggggatttttttttcgtcgcggaagttttagaggatgaatcggggattttgttaaggtttggcggcggggttggagagtagtggtagtaagggttgcggtggcgtttacgtagcgggatgtgcgagagttattttaggtcgttgttgagggtttcggtggcgtagatttgttaggcgttgggttgggattcggtgtagtttagcgtttgttatttttttacggacgtgttgtagcgttatttgtagtagttgggtcg

SEQ ID NO: 29814 - DNA, 526 bp, Artificial Sequence
  chemically treated genomic DNA (Homo sapiens) CpG-island No: 29814
cgacccaactactacaaataacgctacaacacgtccgtaaaaaaataacaaacgctaaactacaccgaatcccaacccaacgcctaacaaatctacgccaccgaaaccctcaacaacgacctaaaataactctcgcacatcccgctacgtaaacgccaccgcaacccttactaccactactctccaaccccgccgccaaaccttaacaaaatccccgattcatcctctaaaacttccgcgacgaaaaaaaaatcccccgaacccccgacgaccacctcaaaaccccaacaacacgaaacgcgccaacctaaaaaccgccattttaaactcgctccgcctcccgctaaacgaccgccgaaacgaaacaacataaaccgaataccgaacgcgacgataaaaaaactccgccccttaaaaacgaaacgattcctcgaaatcgcctctaaaacctaaaaaccgaccgaaaacgaacgtaaaacgcgcaaataaaaaaaacgcccaaaacgacaaatactaaaacgctcac

SEQ ID NO: 29815 - DNA, 526 bp, Artificial Sequence
  chemically treated genomic DNA (Homo sapiens) CpG-island No: 29815
cggtttagttgttgtagatagcgttgtagtacgttcgtgaggaggtggtaggcgttgagttgtatcgagttttagtttagcgtttggtagatttgcgttatcgagatttttaataacgatttggagtaattttcgtatatttcgttgcgtggacgttatcgtagtttttgttgttattgttttttagtttcgtcgttagattttagtagggttttcgatttattttttagggttttcgcggcggggaaagggtttttcggattttcggcgattattttaaagttttagtagtacggagcgcgttagtttgagagtcgttattttggattcgtttcgtttttcgttggacggtcgtcggggcgaggtagtataagtcgaatgtcgagcgcggcgatgagaaagtttcgttttttgggagcggaacgatttttcgggatcgtttttgaggtttggaagtcggtcggaagcgggcgtggggcgcgtaggtggaggaggcgtttagggcggtaggtgttggggcgtttat

SEQ ID NO: 29816 - DNA, 526 bp, Artificial Sequence
  chemically treated genomic DNA (Homo sapiens) CpG-island No: 29816
ataaacgccccaacacctaccgccctaaacgcctcctccacctacgcgccccacgcccgcttccgaccgacttccaaacctcaaaaacgatcccgaaaaatcgttccgctcccaaaaaacgaaactttctcatcgccgcgctcgacattcgacttatactacctcgccccgacgaccgtccaacgaaaaacgaaacgaatccaaaataacgactctcaaactaacgcgctccgtactactaaaactttaaaataatcgccgaaaatccgaaaaaccctttccccgccgcgaaaaccctaaaaaataaatcgaaaaccctactaaaatctaacgacgaaactaaaaaacaataacaacaaaaactacgataacgtccacgcaacgaaatatacgaaaattactccaaatcgttattaaaaatctcgataacgcaaatctaccaaacgctaaactaaaactcgatacaactcaacgcctaccacctcctcacgaacgtactacaacgctatctacaacaactaaaccg

SEQ ID NO: 29817 - DNA, 536 bp, Artificial Sequence
  chemically treated genomic DNA (Homo sapiens) CpG-island No: 29817
aagattatttattatatggacgaggaggagacgtcgtatttggttaagttgttcgtggttttcgagcgcgttacgttggtcgattttaagaacgtgtttagtaatcggttcgtgtacgtttataaatttttttttaagtttatggattaggatttcgggttagtcggtcgcgaggtttgcgcgagtttggcgcgggttcgggggtcgtatttgttcgcgcggggacggggcgggggttttgagtcgttcgcgttttcggggatttgcgatcgcgacgcgttttcgttagatgcggcgcgggtggcggtttcggttcgtgtgcggcgcgcgtttatttgttcgtggagcggggcgatggtaggcggggttttcggcgtttttggttttagtttttcggtttcgagttttgttttggttcgtgttagattcggtcggtcgtatcgtttttatcggggttggtcgggagcgtttgtcgttggtgcgggttggggttaggggcgtgttagtgggaaggaagtagggtggggttttttagt

SEQ ID NO: 29818 - DNA, 536 bp, Artificial Sequence
  chemically treated genomic DNA (Homo sapiens) CpG-island No: 29818
actaaaaaaccccaccctacttccttcccactaacacgcccctaaccccaacccgcaccaacgacaaacgctcccgaccaaccccgataaaaacgatacgaccgaccgaatctaacacgaaccaaaacaaaactcgaaaccgaaaaactaaaaccaaaaacgccgaaaaccccgcctaccatcgccccgctccacgaacaaataaacgcgcgccgcacacgaaccgaaaccgccacccgcgccgcatctaacgaaaacgcgtcgcgatcgcaaatccccgaaaacgcgaacgactcaaaacccccgccccgtccccgcgcgaacaaatacgacccccgaacccgcgccaaactcgcgcaaacctcgcgaccgactaacccgaaatcctaatccataaacttaaaaaaaaatttataaacgtacacgaaccgattactaaacacgttcttaaaatcgaccaacgtaacgcgctcgaaaaccacgaacaacttaaccaaatacgacgtctcctcctcgtccatataataaataatctt

SEQ ID NO: 29819 - DNA, 536 bp, Artificial Sequence
  chemically treated genomic DNA (Homo sapiens) CpG-island No: 29819
gttagggaattttattttgttttttttttattgatacgtttttgattttagttcgtattaacggtaggcgttttcggttagtttcggtggaagcgatgcggtcgatcgagtttgatacgggttaaggtaggattcggggtcgggaagttggggttagggacgtcgggaatttcgtttgttatcgtttcgttttacggataggtgggcgcgcgtcgtatacgggtcgaggtcgttattcgcgtcgtatttagcggaggcgcgtcgcggtcgtaggttttcgggggcgcgaacggtttaggattttcgtttcgttttcgcgcgggtaggtgcgattttcgagttcgcgttaggttcgcgtaggtttcgcggtcgattgattcgaagttttggtttatggatttaaagaagaatttgtaggcgtgtacgggtcggttgttgagtacgtttttgaagtcggttagcgtgacgcgttcgggggttacgggtagtttgattaggtacggcgtttttttttcgtttatgtggtagataatttt

SEQ ID NO: 29820 - DNA, 536 bp, Artificial Sequence
  chemically treated genomic DNA (Homo sapiens) CpG-island No: 29820
aaaattatctaccacataaacgaaaaaaaaacgccgtacctaatcaaactacccgtaacccccgaacgcgtcacgctaaccgacttcaaaaacgtactcaacaaccgacccgtacacgcctacaaattcttctttaaatccataaaccaaaacttcgaatcaatcgaccgcgaaacctacgcgaacctaacgcgaactcgaaaatcgcacctacccgcgcgaaaacgaaacgaaaatcctaaaccgttcgcgcccccgaaaacctacgaccgcgacgcgcctccgctaaatacgacgcgaataacgacctcgacccgtatacgacgcgcgcccacctatccgtaaaacgaaacgataacaaacgaaattcccgacgtccctaaccccaacttcccgaccccgaatcctaccttaacccgtatcaaactcgatcgaccgcatcgcttccaccgaaactaaccgaaaacgcctaccgttaatacgaactaaaatcaaaaacgtatcaataaaaaaaaaacaaaataaaattccctaac

SEQ ID NO: 29821 - DNA, 808 bp, Artificial Sequence
  chemically treated genomic DNA (Homo sapiens) CpG-island No: 29821
gtgcgcgagttgtattcggggtttttggcgtatcgcgtagcgcgtgttcgcgatttttttgcgttggcggcggcgttggtttacggggtcgaggttaattgggcggacgcggaggatgagggtaagacgtcgttggtgtaggtcgtgttaggggtgagcgagttacgggggttgcgcgtaggatataggtgtatagtcgcgtttgtattttttgtggcgtttatataagggtcgtttgttcgcggtggggattaagttcggtttcggttgggggcgtttaaggtcggggttagggtgtagaggcgcggagaggggtcggtgtcgtggtttcgtttgagttgtttcggttttttagggttttttgatcgtttgtgagtttttgttgtaaaacggagcggacgtgaattaaagagatagtcggggtcgggcgtttttgtattacgttacgttgttgggtcgtatcgggtgagacgcgtaatttacgtttcgttttgtgtttcgattacgtttatttcggttcggttacgttttgttcgttatgttttattcggttacgttttcgcgattatattcgtttcgtttcgtttcgtttcgatacgttttttcgatttcgttttttagttaggtttgtttgtttttgaagcggggcgcggattagtacgttttggattaagagtagcgggattcgttggttatcgtagtgtaggcggttaacgttgatatcgtgatattgtgagcgcggtcgggttttcggggttgggcggggtttttagggtaggggcggggttttaagggtaggggcggggtt

SEQ ID NO: 29822 - DNA, 808 bp, Artificial Sequence
  chemically treated genomic DNA (Homo sapiens) CpG-island No: 29822
aaccccgcccctacccttaaaaccccgcccctaccctaaaaaccccgcccaaccccgaaaacccgaccgcgctcacaatatcacgatatcaacgttaaccgcctacactacgataaccaacgaatcccgctactcttaatccaaaacgtactaatccgcgccccgcttcaaaaacaaacaaacctaactaaaaaacgaaatcgaaaaaacgtatcgaaacgaaacgaaacgaaacgaatataatcgcgaaaacgtaaccgaataaaacataacgaacaaaacgtaaccgaaccgaaataaacgtaatcgaaacacaaaacgaaacgtaaattacgcgtctcacccgatacgacccaacaacgtaacgtaatacaaaaacgcccgaccccgactatctctttaattcacgtccgctccgttttacaacaaaaactcacaaacgatcaaaaaaccctaaaaaaccgaaacaactcaaacgaaaccacgacaccgacccctctccgcgcctctacaccctaaccccgaccttaaacgcccccaaccgaaaccgaacttaatccccaccgcgaacaaacgacccttatataaacgccacaaaaaatacaaacgcgactatacacctatatcctacgcgcaacccccgtaactcgctcacccctaacacgacctacaccaacgacgtcttaccctcatcctccgcgtccgcccaattaacctcgaccccgtaaaccaacgccgccgccaacgcaaaaaaatcgcgaacacgcgctacgcgatacgccaaaaaccccgaatacaactcgcgcac

SEQ ID NO: 29823 - DNA, 808 bp, Artificial Sequence
  chemically treated genomic DNA (Homo sapiens) CpG-island No: 29823
ggtttcgtttttgtttttgaggtttcgtttttgttttggaggtttcgtttagtttcgagggttcggtcgcgtttatagtgttacgatgttagcgttggtcgtttgtattgcgatggttaacgggtttcgttgtttttggtttagggcgtgttggttcgcgtttcgttttaggaataggtaaatttggttgaggggcgaggtcggaggggcgtgtcggggcggggcggggcggggcgagtgtggtcgcgggggcgtggtcggatagggtatggcggatagggcgtagtcgggtcggggtaggcgtggtcggggtatagggcggggcgtgggttgcgcgttttattcggtgcggtttagtagcgtggcgtggtgtaggggcgttcggtttcggttgtttttttggtttacgttcgtttcgttttgtagtaggaatttatagacgattaaggagttttggggagtcggggtaatttagacggagttacggtatcggttttttttcgcgtttttgtattttgatttcggttttgggcgtttttagtcgggatcgaatttggtttttatcgcggataggcgatttttgtgtgggcgttatagaagatgtaaacgcgattgtgtatttgtgttttgcgcgtagttttcgtggttcgtttatttttagtacggtttgtattagcggcgttttgtttttatttttcgcgttcgtttagttgatttcggtttcgtgggttagcgtcgtcgttagcgtaggaaggtcgcgggtacgcgttgcgcggtgcgttaagagtttcgggtgtagttcgcgtat

SEQ ID NO: 29824 - DNA, 808 bp, Artificial Sequence
  chemically treated genomic DNA (Homo sapiens) CpG-island No: 29824
atacgcgaactacacccgaaactcttaacgcaccgcgcaacgcgtacccgcgaccttcctacgctaacgacgacgctaacccacgaaaccgaaatcaactaaacgaacgcgaaaaataaaaacaaaacgccgctaatacaaaccgtactaaaaataaacgaaccacgaaaactacgcgcaaaacacaaatacacaatcgcgtttacatcttctataacgcccacacaaaaatcgcctatccgcgataaaaaccaaattcgatcccgactaaaaacgcccaaaaccgaaatcaaaatacaaaaacgcgaaaaaaaaccgataccgtaactccgtctaaattaccccgactccccaaaactccttaatcgtctataaattcctactacaaaacgaaacgaacgtaaaccaaaaaaacaaccgaaaccgaacgcccctacaccacgccacgctactaaaccgcaccgaataaaacgcgcaacccacgccccgccctataccccgaccacgcctaccccgacccgactacgccctatccgccataccctatccgaccacgcccccgcgaccacactcgccccgccccgccccgccccgacacgcccctccgacctcgcccctcaaccaaatttacctattcctaaaacgaaacgcgaaccaacacgccctaaaccaaaaacaacgaaacccgttaaccatcgcaatacaaacgaccaacgctaacatcgtaacactataaacgcgaccgaaccctcgaaactaaacgaaacctccaaaacaaaaacgaaacctcaaaaacaaaaacgaaacc

SEQ ID NO: 29825 - DNA, 859 bp, Artificial Sequence
  chemically treated genomic DNA (Homo sapiens) CpG-island No: 29825
aaaaacgggggaaatagttttagacgttttcgttttttacgtaattttattttcgttgttagatacgttattttcgtagttttgagttcgtattttcgtcggttcgttgggaattcggtttttgggtggttcggaaacgattttggatttgcgggtatatttagggttcgtattttttgggattgtgggaaatgtagttttttgttttcgtaagggattaggcggagttgaggaatcgcgcgaggattgggatcgtgattttattaatcggaaatcgtcgtttttcgggttcggcggggtttgagttaatgtagaatcgggggtcgcgaggacgttagcgggcgttgtgcgtaggaatcgtcgggtggtcgttgtcgatcggggtcgatttggggacggatcggaagtgttcgagggcggtcgtagaacggttaatttgagtcgcgtcgaggtcgggtttgggaagggttagcgggaggtttgagggcgtcgggcgttgcggtaggcgggttcggggtttagtcgagagggttcgggcgttaggtaacgcgattcgcgcgggggtgaattcggggagggggtcggttttttcgttttgggatttttcggtgcgttcgagcgcgatatcgttcgcgtcgggggtttgggagtttcggggcgcgagttgtgttggaagtaaagttttttttgtgggttggggtggcggagggagaagggaagcgagggtcgcggcgggattagacgttttagtttcggttcgttcgcgattattgaaggcgttgtcgtttgatttgaacgggtatttgtgttttagtttttttgggatttgtggtcgtcgtttatagattatgtttttggg

SEQ ID NO: 29826 - DNA, 859 bp, Artificial Sequence
  chemically treated genomic DNA (Homo sapiens) CpG-island No: 29826
cccaaaaacataatctataaacgacgaccacaaatcccaaaaaaactaaaacacaaatacccgttcaaatcaaacgacaacgccttcaataatcgcgaacgaaccgaaactaaaacgtctaatcccgccgcgaccctcgcttcccttctccctccgccaccccaacccacaaaaaaaactttacttccaacacaactcgcgccccgaaactcccaaacccccgacgcgaacgatatcgcgctcgaacgcaccgaaaaatcccaaaacgaaaaaaccgaccccctccccgaattcacccccgcgcgaatcgcgttacctaacgcccgaaccctctcgactaaaccccgaacccgcctaccgcaacgcccgacgccctcaaacctcccgctaacccttcccaaacccgacctcgacgcgactcaaattaaccgttctacgaccgccctcgaacacttccgatccgtccccaaatcgaccccgatcgacaacgaccacccgacgattcctacgcacaacgcccgctaacgtcctcgcgacccccgattctacattaactcaaaccccgccgaacccgaaaaacgacgatttccgattaataaaatcacgatcccaatcctcgcgcgattcctcaactccgcctaatcccttacgaaaacaaaaaactacatttcccacaatcccaaaaaatacgaaccctaaatatacccgcaaatccaaaatcgtttccgaaccacccaaaaaccgaattcccaacgaaccgacgaaaatacgaactcaaaactacgaaaataacgtatctaacaacgaaaataaaattacgtaaaaaacgaaaacgtctaaaactatttcccccgttttt

SEQ ID NO: 29827 - DNA, 859 bp, Artificial Sequence
  chemically treated genomic DNA (Homo sapiens) CpG-island No: 29827
tttaggagtatggtttgtgggcggcggttataggttttaggggagttggaatataagtgttcgtttaggttaggcggtagcgtttttagtagtcgcgggcgggtcgggattggggcgtttggtttcgtcgcgattttcgtttttttttttttttcgttattttaatttataaggaggattttgtttttaatatagttcgcgtttcgaggtttttaagttttcgacgcgggcggtgtcgcgttcggacgtatcgaaaggttttagaacggggaggtcggtttttttttcgggtttattttcgcgcgaatcgcgttgtttggcgttcggattttttcggttggatttcgggttcgtttgtcgtagcgttcggcgtttttaggtttttcgttgattttttttaagttcgatttcgacgcggtttaaattgatcgttttgcggtcgttttcgggtattttcggttcgtttttaagtcggtttcgatcggtagcggttattcggcggtttttacgtatagcgttcgttggcgttttcgcggttttcgattttgtattggtttaggtttcgtcgggttcgaaaggcgacggttttcggttagtggaattacggttttagttttcgcgcggttttttagtttcgtttggttttttacggaggtaaaaaattatattttttataattttagggggtgcgggttttggatatattcgtaggtttagaatcgttttcggattatttaggggtcggatttttaacgggtcgacggaagtgcgggtttaagattacggaagtgacgtatttggtaacggaagtggagttacgtggaaggcggaagcgtttagagttatttttttcgttttt

SEQ ID NO: 29828 - DNA, 859 bp, Artificial Sequence
  chemically treated genomic DNA (Homo sapiens) CpG-island No: 29828
aaaaacgaaaaaaataactctaaacgcttccgccttccacgtaactccacttccgttaccaaatacgtcacttccgtaatcttaaacccgcacttccgtcgacccgttaaaaatccgacccctaaataatccgaaaacgattctaaacctacgaatatatccaaaacccgcaccccctaaaattataaaaaatataattttttacctccgtaaaaaaccaaacgaaactaaaaaaccgcgcgaaaactaaaaccgtaattccactaaccgaaaaccgtcgcctttcgaacccgacgaaacctaaaccaatacaaaatcgaaaaccgcgaaaacgccaacgaacgctatacgtaaaaaccgccgaataaccgctaccgatcgaaaccgacttaaaaacgaaccgaaaatacccgaaaacgaccgcaaaacgatcaatttaaaccgcgtcgaaatcgaacttaaaaaaaatcaacgaaaaacctaaaaacgccgaacgctacgacaaacgaacccgaaatccaaccgaaaaaatccgaacgccaaacaacgcgattcgcgcgaaaataaacccgaaaaaaaaaccgacctccccgttctaaaacctttcgatacgtccgaacgcgacaccgcccgcgtcgaaaacttaaaaacctcgaaacgcgaactatattaaaaacaaaatcctccttataaattaaaataacgaaaaaaaaaaaaaaacgaaaatcgcgacgaaaccaaacgccccaatcccgacccgcccgcgactactaaaaacgctaccgcctaacctaaacgaacacttatattccaactcccctaaaacctataaccgccgcccacaaaccatactcctaaa

SEQ ID NO: 29829 - DNA, 651 bp, Artificial Sequence
  chemically treated genomic DNA (Homo sapiens) CpG-island No: 29829
tatgtacgtatgtgttgcgtgttggtcgtgtacgtgtgttacgtgtatgtgtgttatttgtgtatgtcgtgtgtgttgtgagcgtatgttgtgcgtatgtgcgtgttatgtgttttgcgtgtattatgtgtgtgttgtttgtatgtgttatttgtgttatgtacgtgttatttgcgtgcgatgcgcgtgtgttatacgtcgtttgtttgcgtgttatgtatgtgtggtatttgtgtatgtgtcgttttcgtgtgtattgtgtgtgtcgtgtgtgtgttatttgtatgtgtcgttttgtgtgtgttatgcgcgtgtgttatgtatttgtcgtgcgtgtgttatttgtgtgtattatgcgtatgtgttattcgtgtgtatcgtatacgtgtgttatttgtatgtatgttgtgtacgtgtggtatgtatgtgtgtcgtttgtatgttatgtatgtgttttttgcgtgtgtcgtgcgtgttttatgtacgtgtgtcgtgtatgtgttattcgcgtgtattatgcgtatgtgtcgtttgtgtgtgtgtcgtatttttgtgttcgtgtgttaggttcgtatgtgcgttatatttacgtgtgtttagtatgtgttatatgtatgtgcggtggtagtgtgtgttttttataggtttttt

SEQ ID NO: 29830 - DNA, 651 bp, Artificial Sequence
  chemically treated genomic DNA (Homo sapiens) CpG-island No: 29830
aaaaaacctataaaaaacacacactaccaccgcacatacatataacacatactaaacacacgtaaatataacgcacatacgaacctaacacacgaacacaaaaatacgacacacacacaaacgacacatacgcataatacacgcgaataacacatacacgacacacgtacataaaacacgcacgacacacgcaaaaaacacatacataacatacaaacgacacacatacataccacacgtacacaacatacatacaaataacacacgtatacgatacacacgaataacacatacgcataatacacacaaataacacacgcacgacaaatacataacacacgcgcataacacacacaaaacgacacatacaaataacacacacacgacacacacaatacacacgaaaacgacacatacacaaataccacacatacataacacgcaaacaaacgacgtataacacacgcgcatcgcacgcaaataacacgtacataacacaaataacacatacaaacaacacacacataatacacgcaaaacacataacacgcacatacgcacaacatacgctcacaacacacacgacatacacaaataacacacatacacgtaacacacgtacacgaccaacacgcaacacatacgtacata

SEQ ID NO: 29831 - DNA, 651 bp, Artificial Sequence
  chemically treated genomic DNA (Homo sapiens) CpG-island No: 29831
ggaggatttgtgagggatatatattattatcgtatatgtatatggtatatgttgagtatacgtgaatatggcgtatatgcgaatttggtatacgagtataggaatgcggtatatatataaacggtatatgcgtatggtatacgcgaatggtatatgtacggtatacgtgtatgggatacgtacggtatacgtaaggaatatatgtatggtatgtaaacggtatatatgtatgttatacgtgtatagtatatatgtaaatggtatacgtgtacggtgtatacgaatggtatatgcgtatggtatatataaatggtatacgtacggtaagtgtatggtatacgcgtatggtatatataaaacggtatatgtaaatggtatatatacggtatatataatatatacggaaacggtatatatataaatgttatatatgtatggtacgtaagtaaacgacgtgtggtatacgcgtatcgtacgtaaatggtacgtgtatgatataaatggtatatgtaaatagtatatatatggtatacgtaaagtatatggtacgtatatgcgtatagtatacgtttatagtatatacggtatatataaatggtatatatgtacgtggtatacgtgtacggttaatacgtagtatatacgtgtatg

SEQ ID NO: 29832 - DNA, 651 bp, Artificial Sequence
  chemically treated genomic DNA (Homo sapiens) CpG-island No: 29832
catacacgtatatactacgtattaaccgtacacgtataccacgtacatatataccatttatatataccgtatatactataaacgtatactatacgcatatacgtaccatatactttacgtataccatatatatactatttacatataccatttatatcatacacgtaccatttacgtacgatacgcgtataccacacgtcgtttacttacgtaccatacatatataacatttatatatataccgtttccgtatatattatatataccgtatatataccatttacatataccgttttatatataccatacgcgtataccatacacttaccgtacgtataccatttatatataccatacgcatataccattcgtatacaccgtacacgtataccatttacatatatactatacacgtataacatacatatataccgtttacataccatacatatattccttacgtataccgtacgtatcccatacacgtataccgtacatataccattcgcgtataccatacgcatataccgtttatatatataccgcattcctatactcgtataccaaattcgcatatacgccatattcacgtatactcaacatataccatatacatatacgataataatatatatccctcacaaatcctcc

SEQ ID NO: 29833 - DNA, 1349 bp, Artificial Sequence
  chemically treated genomic DNA (Homo sapiens) CpG-island No: 29833
tcgtttcgtgtttttgtttcgtttcgtgtttgtttcgtttcgtgtttttgtttcgtttcgtgtttttgtttcgtttttcgtgtttttgtttcgtttcgtgtttttgtttcgtttcgtgtttttgtttcgtttcgtgtttttgtttcgtttcgtgtttttgtttcgtttcgtgtttttgtttcgtttcgtgtttttgtttcgtttcgtgtttttgtttcgtttcgtgtttttgtttcgtttttcgtgtttttgtttcgtttttcgtgtttttgtttcgtttcgtgtttttgtttcgtttcgtgtttttgtttcgtttttcgtgtttttgtttcgtttcgtgtttttgtttcgtttttcgtgtttttgtttcgtttttcgagtttttgtttcgtttttcgtgtttttgtttcgttttagtgtttttgtttcgtttcgtgtttttgtttcgtatcgtgtttttgtttcgtttcgtgtttttgtttcgtttcgtgtttttgtttcgtttttcgtgtttttgtttcgtttcgtgtttttgtttcgtttttcgtgtttttgtttcgtttcgtgtttttgtttcgtttcgtgtttttgtttcgtttcgagtttttgtttcgtttcgagtttttgtttcgtttcgagtttttgtttcgtttcgtgtttttgtttcgttttatgtttatgtttcgtttcgtagtttttgtttcgtttcgtgttttagtttcgtttcgtgtttttgtttcgtttcgtgtttttgtttcgtttcgtgtttttgtttcgtttttcgtgtttttgtttcgtttcgtgtttttgtttcgtttttcgtgtttttgtttcgtttcgtgtttttgtttcgtttcgtgtttttgtttcgtttcgagtttttgtttcgtttagagtttttgtttcgtttcgtgtttttgtttcgtttttcgtgtttttgtttcgtttttcgagtttttgtttcgtttttcgtgtttttgtttcgtttcgtgtttttgtttcgtttcgtgtttttgtttcgtttcgtgtttttgtttcgtttttcgtgtttttgtttcgtttcgtgtttttgtttcgtttttcgtgtttttgtttcgtttcgtgtttttgtttcgtttcgtgtttttgtttcgtttcgtgtttttgtttcgtttcgtgtttttgtttcgtttcgtgtttttgtttcgtttcgtgtttttgttttatttcgtgtttttgtttcgtttcgtgtttttgtttcgtttcgtgtttttgtttcgtttcgtgtttttgtttcgtttcgtgtttttgtttcgttttttatgtttttattttattttatgtttttgtttattttttatgtttttagg

SEQ ID NO: 29834 - DNA, 1349 bp, Artificial Sequence
  chemically treated genomic DNA (Homo sapiens) CpG-island No: 29834
cctaaaaacataaaaaataaacaaaaacataaaataaaataaaaacataaaaaacgaaacaaaaacacgaaacgaaacaaaaacacgaaacgaaacaaaaacacgaaacgaaacaaaaacacgaaacgaaacaaaaacacgaaataaaacaaaaacacgaaacgaaacaaaaacacgaaacgaaacaaaaacacgaaacgaaacaaaaacacgaaacgaaacaaaaacacgaaacgaaacaaaaacacgaaacgaaacaaaaacacgaaaaacgaaacaaaaacacgaaacgaaacaaaaacacgaaaaacgaaacaaaaacacgaaacgaaacaaaaacacgaaacgaaacaaaaacacgaaacgaaacaaaaacacgaaaaacgaaacaaaaactcgaaaaacgaaacaaaaacacgaaaaacgaaacaaaaacacgaaacgaaacaaaaactctaaacgaaacaaaaactcgaaacgaaacaaaaacacgaaacgaaacaaaaacacgaaacgaaacaaaaacacgaaaaacgaaacaaaaacacgaaacgaaacaaaaacacgaaaaacgaaacaaaaacacgaaacgaaacaaaaacacgaaacgaaacaaaaacacgaaacgaaactaaaacacgaaacgaaacaaaaactacgaaacgaaacataaacataaaacgaaacaaaaacacgaaacgaaacaaaaactcgaaacgaaacaaaaactcgaaacgaaacaaaaactcgaaacgaaacaaaaacacgaaacgaaacaaaaacacgaaacgaaacaaaaacacgaaaaacgaaacaaaaacacgaaacgaaacaaaaacacgaaaaacgaaacaaaaacacgaaacgaaacaaaaacacgaaacgaaacaaaaacacgatacgaaacaaaaacacgaaacgaaacaaaaacactaaaacgaaacaaaaacacgaaaaacgaaacaaaaactcgaaaaacgaaacaaaaacacgaaaaacgaaacaaaaacacgaaacgaaacaaaaacacgaaaaacgaaacaaaaacacgaaacgaaacaaaaacacgaaacgaaacaaaaacacgaaaaacgaaacaaaaacacgaaaaacgaaacaaaaacacgaaacgaaacaaaaacacgaaacgaaacaaaaacacgaaacgaaacaaaaacacgaaacgaaacaaaaacacgaaacgaaacaaaaacacgaaacgaaacaaaaacacgaaacgaaacaaaaacacgaaacgaaacaaaaacacgaaaaacgaaacaaaaacacgaaacgaaacaaaaacacgaaacgaaacaaacacgaaacgaaacaaaaacacgaaacga

SEQ ID NO: 29835 - DNA, 1349 bp, Artificial Sequence
  chemically treated genomic DNA (Homo sapiens) CpG-island No: 29835
tttggggatatgggggatgagtagggatatgggatggagtggagatatgggggacggggtagagatacgggacggggtagagatacgggacggagtagagatacgggacggagtagagatacgggacggagtagagatacgggatggagtagagatacgggacggagtagggatacgggacggagtagagatacgggacggagtagagatacgggacggagtagagatacgggacggagtagagatacgggacggagtagagatacgggggacggggtagagatacgggacggagtagagatacgggggacggagtagagatacgggacggagtagagatacgggacggagtagagatacgggacggagtagagatacgggggacggagtagagattcgggggacggggtagagatacgggggacggggtagagatacgggacggggtagagattttggacggagtagagattcgggacggagtagggatacgggacggggtagagatacgggacggggtagagatacgggggacggggtagagatacgggacggagtagagatacgggggacggggtagagatacgggacggagtagggatacgggacggagtagagatacgggacggggttgagatacgggacggagtagagattacgggacggagtatagatatgggacggagtagggatacgggacggggtagagattcgggacggagtagagattcgggacggagtagagattcgggacggagtagggatacgggacggggtagagatacgggacggggtagagatacgggggacggggtagagatacgggacggagtagagatacgggggacggggtagagatacgggacggagtagggatacgggacggggtagagatacggtacggggtagagatacgggacggagtagagatattgggacggagtagagatacgggggacggagtagagattcgggggacggggtagagatacgggggacggggtagagatacgggacggggtagagatacgggggacggggtagagatacgggacggagtagggatacgggacggagtagagatacgggggacggagtagagatacgggggacggggtagagatacgggacggggtagagatacgggacggggtagagatacgggacggagtagagatacgggacggagtagagatacgggacggggtagagatacgggacggagtagagatacgggacggggtagagatacgggacggagtagagatacgggggacggagtagagatacgggacggagtagagatacgggacggagtagatacgggacggagtagggatacgggacgg

SEQ ID NO: 29836 - DNA, 1349 bp, Artificial Sequence
  chemically treated genomic DNA (Homo sapiens) CpG-island No: 29836
ccgtcccgtatccctactccgtcccgtatctactccgtcccgtatctctactccgtcccgtatctctactccgtcccccgtatctctactccgtcccgtatctctaccccgtcccgtatctctactccgtcccgtatctctaccccgtcccgtatctctactccgtcccgtatctctactccgtcccgtatctctaccccgtcccgtatctctaccccgtcccgtatctctaccccgtcccccgtatctctactccgtcccccgtatctctactccgtcccgtatccctactccgtcccgtatctctaccccgtcccccgtatctctaccccgtcccgtatctctaccccgtcccccgtatctctaccccgtcccccgaatctctactccgtcccccgtatctctactccgtcccaatatctctactccgtcccgtatctctaccccgtaccgtatctctaccccgtcccgtatccctactccgtcccgtatctctaccccgtcccccgtatctctactccgtcccgtatctctaccccgtcccccgtatctctaccccgtcccgtatctctaccccgtcccgtatccctactccgtcccgaatctctactccgtcccgaatctctactccgtcccgaatctctaccccgtcccgtatccctactccgtcccatatctatactccgtcccgtaatctctactccgtcccgtatctcaaccccgtcccgtatctctactccgtcccgtatccctactccgtcccgtatctctaccccgtcccccgtatctctactccgtcccgtatctctaccccgtcccccgtatctctaccccgtcccgtatctctaccccgtcccgtatccctactccgtcccgaatctctactccgtccaaaatctctaccccgtcccgtatctctaccccgtcccccgtatctctaccccgtcccccgaatctctactccgtcccccgtatctctactccgtcccgtatctctactccgtcccgtatctctactccgtcccgtatctctactccgtcccccgtatctctactccgtcccgtatctctaccccgtcccccgtatctctactccgtcccgtatctctactccgtcccgtatctctactccgtcccgtatctctactccgtcccgtatctctactccgtcccgtatccctactccgtcccgtatctctactccatcccgtatctctactccgtcccgtatctctactccgtcccgtatctctactccgtcccgtatctctaccccgtcccgtatctctaccccgtcccccatatctccactccatcccatatccctactcatcccccatatccccaaa

SEQ ID NO: 29837 - DNA, 1424 bp, Artificial Sequence
  chemically treated genomic DNA (Homo sapiens) CpG-island No: 29837
ttcgttcgcgtcgtttcggcgttcgttcgtttcggaatgaggtcgtcgcgtcgcgtttcgtttcgtttgttatcgtcggggagcgtcgttaaagttagtcgttcgcgcgtatcgttcgttgttattgtcggggagcgtcgttaaggttcgtcgttcgcgcgcgtcgttcgttgttatcgtcggggagcgtcgttaaacgtttttcgtagcgtttagggattatttcggttcggaagtgaggcggggtttgttacggtcgttttcggggatagtcggtggaaatgtggggcgcggggagggcgcggggagggcgcgggttcgttcgttttaattatttcggtcgttgcgtaatttagggcgtttgtaaaaattacgtttgggaggatttggtcgtaacgcggcgaacgggcgcgttcggggagtgtgggcggcggcgaatgaatgagcgagtgaacgaatgtacgttcgcgagagcgcggggtgatcgcgtggttggtgcgcgtttttcggggcgtcgcgatagaggtagagcgtttgcgttcggcggcgggtcggtattttgtagtcgttttttaagttcggtttcgttttcgtttttcgattttggtcgtcgtggcgcggtgttatcgcgtaggcgtaagagcggtcggggtcgggggggagggggggggggcgtgattaggtcgcgttcgcgcgcgcgtaggatttttgcgttggaggtcgtttttgacgttatcggttgggtttcgttatgagttcggcgtcggttttaggtttcgtgcgcgcgcgttattttgtgtatttttagtacgtgggtatcgattttaagtaggttttttaggcgtagcggcgggcgttacgtgggttcgggcggaggcgggaaggagggcgcgggcgggtaggcggatgtttttggacgcgggttttaaacgttcggggaaggaagcggttttggttttagacggcggcggagattttagggtagggcgttttcggtaattttcgttcgtttttgttcgtagcggggtcgcggtcgttaggggtatttagcgcgtcgtcggggtttagaattatttggaggtgcgtttagtcggttacgggacgttcggtgaggggtaagggggaggttttcgttcgcgcgttttcggggttcggtttcgtttattcgttcgtttcgcggttcggttttgtaggaggtcgtcgagcggttgaatttcgtggagtcggttaggtttattatttttagtcgtacggacgtcggggtttacgttttgagtaacgcggcgtatttggacgtttagcgtcgtttaggtcggtcgtttttttcgttcgaggttttggtcgaggtttttaatatatatttgcggtattcggttattaggtgagttcgcgatttaagtagttttggggttgtgttttttcga

SEQ ID NO: 29838 - DNA, 1424 bp, Artificial Sequence
  chemically treated genomic DNA (Homo sapiens) CpG-island No: 29838
tcgaaaaaacacaaccccaaaactacttaaatcgcgaactcacctaataaccgaataccgcaaatatatattaaaaacctcgaccaaaacctcgaacgaaaaaaacgaccgacctaaacgacgctaaacgtccaaatacgccgcgttactcaaaacgtaaaccccgacgtccgtacgactaaaaataataaacctaaccgactccacgaaattcaaccgctcgacgacctcctacaaaaccgaaccgcgaaacgaacgaataaacgaaaccgaaccccgaaaacgcgcgaacgaaaacctcccccttacccctcaccgaacgtcccgtaaccgactaaacgcacctccaaataattctaaaccccgacgacgcgctaaatacccctaacgaccgcgaccccgctacgaacaaaaacgaacgaaaattaccgaaaacgccctaccctaaaatctccgccgccgtctaaaaccaaaaccgcttccttccccgaacgtttaaaacccgcgtccaaaaacatccgcctacccgcccgcgccctccttcccgcctccgcccgaacccacgtaacgcccgccgctacgcctaaaaaacctacttaaaatcgatacccacgtactaaaaatacacaaaataacgcgcgcgcacgaaacctaaaaccgacgccgaactcataacgaaacccaaccgataacgtcaaaaacgacctccaacgcaaaaatcctacgcgcgcgcgaacgcgacctaatcacgccccccccccctcccccccgaccccgaccgctcttacgcctacgcgataacaccgcgccacgacgaccaaaatcgaaaaacgaaaacgaaaccgaacttaaaaaacgactacaaaataccgacccgccgccgaacgcaaacgctctacctctatcgcgacgccccgaaaaacgcgcaccaaccacgcgatcaccccgcgctctcgcgaacgtacattcgttcactcgctcattcattcgccgccgcccacactccccgaacgcgcccgttcgccgcgttacgaccaaatcctcccaaacgtaatttttacaaacgccctaaattacgcaacgaccgaaataattaaaacgaacgaacccgcgccctccccgcgccctccccgcgccccacatttccaccgactatccccgaaaacgaccgtaacaaaccccgcctcacttccgaaccgaaataatccctaaacgctacgaaaaacgtttaacgacgctccccgacgataacaacgaacgacgcgcgcgaacgacgaaccttaacgacgctccccgacaataacaacgaacgatacgcgcgaacgactaactttaacgacgctccccgacgataacaaacgaaacgaaacgcgacgcgacgacctcattccgaaacgaacgaacgccgaaacgacgcgaacgaa

SEQ ID NO: 29839 - DNA, 1424 bp, Artificial Sequence
  chemically treated genomic DNA (Homo sapiens) CpG-island No: 29839
tcgggaaggtatagttttagggttgtttaggtcgcgggtttatttgatggtcgggtgtcgtaggtgtgtgttgagggtttcggttaggatttcgggcgggaagggcggtcggtttgagcggcgttggacgtttaggtgcgtcgcgttgtttagggcgtggatttcggcgttcgtgcggttggagatggtgaatttgatcggttttacggaatttagtcgttcggcggttttttgtaggatcgagtcgcggggcgggcgggtgagcgaggtcggatttcggggacgcgcgggcgggagttttttttttattttttatcgggcgtttcgtgatcggttgagcgtatttttaggtagttttggatttcgacggcgcgttgagtgtttttgacggtcgcgatttcgttgcgggtagaagcgggcggaggttatcgggggcgttttgttttggggttttcgtcgtcgtttgaggttagggtcgttttttttttcgaacgtttggaattcgcgtttagagatattcgtttgttcgttcgcgttttttttttcgttttcgttcgggtttacgtggcgttcgtcgttgcgtttgggaaatttatttaaagtcggtgtttacgtattggaagtatataagatagcgcgcgcgtacggagtttgaggtcggcgtcgaatttatggcggagtttagtcggtggcgttagaggcggtttttagcgtaggaattttgcgcgcgcgcggacgcggtttggttacgttttttttttttttttttcggtttcggtcgtttttgcgtttgcgcggtggtatcgcgttacggcggttagagtcggggagcggaggcggggtcgggtttagggagcggttgtaaagtgtcggttcgtcgtcgagcgtaggcgttttatttttatcgcggcgtttcgggaggcgcgtattaattacgcggttatttcgcgttttcgcgggcgtgtattcgtttattcgtttatttattcgtcgtcgtttatatttttcgagcgcgttcgttcgtcgcgttgcggttaagtttttttagacgtggtttttgtaaacgttttgagttgcgtaacggtcgggatggttggagcgggcgggttcgcgtttttttcgcgtttttttcgcgttttatatttttatcgattgttttcggagacggtcgtggtaggtttcgttttattttcggatcggggtggtttttggacgttgcgagaggcgtttggcgacgtttttcggcggtgatagcgggcggcgcgcgcgggcggcggattttggcgacgtttttcggtagtgatagcgggcggtgcgcgcgggcggttgattttggcgacgtttttcggcggtgataggcggggcggggcgcggcgcggcggttttatttcggggcgggcgggcgtcgaggcggcgcgggcggg

SEQ ID NO: 29840 - DNA, 1424 bp, Artificial Sequence
  chemically treated genomic DNA (Homo sapiens) CpG-island No: 29840
cccgcccgcgccgcctcgacgcccgcccgccccgaaataaaaccgccgcgccgcgccccgccccgcctatcaccgccgaaaaacgtcgccaaaatcaaccgcccgcgcgcaccgcccgctatcactaccgaaaaacgtcgccaaaatccgccgcccgcgcgcgccgcccgctatcaccgccgaaaaacgtcgccaaacgcctctcgcaacgtccaaaaaccaccccgatccgaaaataaaacgaaacctaccacgaccgtctccgaaaacaatcgataaaaatataaaacgcgaaaaaaacgcgaaaaaaacgcgaacccgcccgctccaaccatcccgaccgttacgcaactcaaaacgtttacaaaaaccacgtctaaaaaaacttaaccgcaacgcgacgaacgaacgcgctcgaaaaatataaacgacgacgaataaataaacgaataaacgaatacacgcccgcgaaaacgcgaaataaccgcgtaattaatacgcgcctcccgaaacgccgcgataaaaataaaacgcctacgctcgacgacgaaccgacactttacaaccgctccctaaacccgaccccgcctccgctccccgactctaaccgccgtaacgcgataccaccgcgcaaacgcaaaaacgaccgaaaccgaaaaaaaaaaaaaaaaaacgtaaccaaaccgcgtccgcgcgcgcgcaaaattcctacgctaaaaaccgcctctaacgccaccgactaaactccgccataaattcgacgccgacctcaaactccgtacgcgcgcgctatcttatatacttccaatacgtaaacaccgactttaaataaatttcccaaacgcaacgacgaacgccacgtaaacccgaacgaaaacgaaaaaaaaaacgcgaacgaacaaacgaatatctctaaacgcgaattccaaacgttcgaaaaaaaaaacgaccctaacctcaaacgacgacgaaaaccccaaaacaaaacgcccccgataacctccgcccgcttctacccgcaacgaaatcgcgaccgtcaaaaacactcaacgcgccgtcgaaatccaaaactacctaaaaatacgctcaaccgatcacgaaacgcccgataaaaaataaaaaaaaaactcccgcccgcgcgtccccgaaatccgacctcgctcacccgcccgccccgcgactcgatcctacaaaaaaccgccgaacgactaaattccgtaaaaccgatcaaattcaccatctccaaccgcacgaacgccgaaatccacgccctaaacaacgcgacgcacctaaacgtccaacgccgctcaaaccgaccgcccttcccgcccgaaatcctaaccgaaaccctcaacacacacctacgacacccgaccatcaaataaacccgcgacctaaacaaccctaaaactataccttcccga

SEQ ID NO: 29841 - DNA, 899 bp, Artificial Sequence
  chemically treated genomic DNA (Homo sapiens) CpG-island No: 29841
gcgtggggttcggcgatcgttaggtggaagacgcggcgttcgtgtaggttatagtaatggtggtgtaggtggtaggagtaggtgttttcgtcggcgatttttagcggttcgatacgtagtgagaagttatcgcgtttaaaggtattcgcgtttatagttacgcggtcgcgtagaaaaaggggttcgtaggcgcggcgttcgttcgacgcgtagaggtttagtaggcggttcgcgcggtcgtgcgggatttcgggcggttgtcggttttagtgtattatttgttgagttttttttacgtgtcggtcggtttatacgtgttcgcggtttacgtaggttagaagcgcgggtgcgtcgcgcgttatcgttagtatttttttttcgtcgttttagtaggcgggggtggtcggggttgcggagggggcgcggttagcggcgcgcgggtcggggcggcggtcgagggtcgaggggcgggagttggggggcgggggggaagtatttacggtcgtcggtgatttttaggcggacggttaggttttcgtagaggtggtagtagtgatggtgtaggttgtaggtgtatagtttcgcgttcgttttttttatcgttgcgtatttaggaggaagtcgcgcgtgagttttgcggtgttttcgatttcgcggtttcggatttttgtttcgatttcgcggtttcggttttcggttttcgtatcgcggatgagtagcgagaagttgtcgtcgtcgaaggtcgaggtcgagagttttaggcggtcgcggtttcgcgtttcgtatacgcgttgttcgttcgtcgagtataagtttagtaggcgtcgcgcggggttattttcggggtcgcgtaggttttagtggagtacgcgttggcggtcgtgtagtcggttttgggt

SEQ ID NO: 29842 - DNA, 899 bp, Artificial Sequence
  chemically treated genomic DNA (Homo sapiens) CpG-island No: 29842
acccaaaaccgactacacgaccgccaacgcgtactccactaaaacctacgcgaccccgaaaataaccccgcgcgacgcctactaaacttatactcgacgaacgaacaacgcgtatacgaaacgcgaaaccgcgaccgcctaaaactctcgacctcgaccttcgacgacgacaacttctcgctactcatccgcgatacgaaaaccgaaaaccgaaaccgcgaaatcgaaacaaaaatccgaaaccgcgaaatcgaaaacaccgcaaaactcacgcgcgacttcctcctaaatacgcaacgataaaaaaaacgaacgcgaaactatacacctacaacctacaccatcactactaccacctctacgaaaacctaaccgtccgcctaaaaatcaccgacgaccgtaaatacttcccccccgccccccaactcccgcccctcgaccctcgaccgccgccccgacccgcgcgccgctaaccgcgccccctccgcaaccccgaccacccccgcctactaaaacgacgaaaaaaaaatactaacgataacgcgcgacgcacccgcgcttctaacctacgtaaaccgcgaacacgtataaaccgaccgacacgtaaaaaaaactcaacaaataatacactaaaaccgacaaccgcccgaaatcccgcacgaccgcgcgaaccgcctactaaacctctacgcgtcgaacgaacgccgcgcctacgaacccctttttctacgcgaccgcgtaactataaacgcgaatacctttaaacgcgataacttctcactacgtatcgaaccgctaaaaatcgccgacgaaaacacctactcctaccacctacaccaccattactataacctacacgaacgccgcgtcttccacctaacgatcgccgaaccccacgc

SEQ ID NO: 29843 - DNA, 899 bp, Artificial Sequence
  chemically treated genomic DNA (Homo sapiens) CpG-island No: 29843
atttaggatcggttgtacgatcgttagcgcgtgttttattgggatttgcgcggtttcgggggtggtttcgcgcggcgtttgttggatttgtattcggcgggcgagtagcgcgtgtacgaggcgcgggatcgcggtcgtttggagttttcggtttcggttttcgacgacggtaatttttcgttgtttattcgcggtgcggggatcggggatcggggtcgcggggtcggggtaggggttcggggtcgcggggtcgggggtatcgtaaggtttacgcgcggtttttttttgggtgcgtagcggtggaggagacggacgcggggttgtatatttgtaatttgtattattattattgttatttttacgagagtttggtcgttcgtttggaggttatcgacggtcgtgagtgtttttttttcgttttttagttttcgtttttcgattttcgatcgtcgtttcggttcgcgcgtcgttgatcgcgtttttttcgtagtttcggttattttcgtttattgggacggcgagaagaaggtgttggcggtggcgcgcggcgtattcgcgtttttgatttgcgtgaatcgcgggtacgtgtggatcgatcggtacgtggaggaggtttaataggtggtgtattgggatcggtagtcgttcggggtttcgtacgatcgcgcggatcgtttgttggatttttacgcgtcgggcgagcgtcgcgtttacgggtttttttttttgcgcgatcgcgtggttgtgggcgcggatgtttttgagcgcggtgattttttattgcgtatcgagtcgttggaggtcgtcgacgagggtatttatttttgttatttgtattattattattgtggtttgtacgaacgtcgcgttttttatttgacggtcgtcgaattttacgt

SEQ ID NO: 29844 - DNA, 899 bp, Artificial Sequence
  chemically treated genomic DNA (Homo sapiens) CpG-island No: 29844
acgtaaaattcgacgaccgtcaaataaaaaacgcgacgttcgtacaaaccacaataataataatacaaataacaaaaataaataccctcgtcgacgacctccaacgactcgatacgcaataaaaaatcaccgcgctcaaaaacatccgcgcccacaaccacgcgatcgcgcaaaaaaaaaaacccgtaaacgcgacgctcgcccgacgcgtaaaaatccaacaaacgatccgcgcgatcgtacgaaaccccgaacgactaccgatcccaatacaccacctattaaacctcctccacgtaccgatcgatccacacgtacccgcgattcacgcaaatcaaaaacgcgaatacgccgcgcgccaccgccaacaccttcttctcgccgtcccaataaacgaaaataaccgaaactacgaaaaaaacgcgatcaacgacgcgcgaaccgaaacgacgatcgaaaatcgaaaaacgaaaactaaaaaacgaaaaaaaaacactcacgaccgtcgataacctccaaacgaacgaccaaactctcgtaaaaataacaataataataatacaaattacaaatatacaaccccgcgtccgtctcctccaccgctacgcacccaaaaaaaaaccgcgcgtaaaccttacgatacccccgaccccgcgaccccgaacccctaccccgaccccgcgaccccgatccccgatccccgcaccgcgaataaacaacgaaaaattaccgtcgtcgaaaaccgaaaccgaaaactccaaacgaccgcgatcccgcgcctcgtacacgcgctactcgcccgccgaatacaaatccaacaaacgccgcgcgaaaccacccccgaaaccgcgcaaatcccaataaaacacgcgctaacgatcgtacaaccgatcctaaat

SEQ ID NO: 29845 - DNA, 1009 bp, Artificial Sequence
  chemically treated genomic DNA (Homo sapiens) CpG-island No: 29845
  unsure (984)
agcgacggggggagtgaggagggggtttggacggggtaggagcgacggggggagtgaggagggggtttggacggggtaggagcgacggggggagtgaggagggggtttggacggggtaggagcgacggggggagtgaggagggggtttggacggggtaggagcgacggggggagtgaggagggggtttggacggggtaggagcgacggggggagtgaggagggggtttggacggggtaggagcgacggggggagtgaggagggggtttggacggggtaggagcgacggggggagtgaggagggggtttggatcgggtaggagcgacggggggagtgaggagggggtttggatcgggtaggagcgacggggggagtgaggagggggtttggatcgggtaggagcgacggggggagtgaggagggggtcgtaggagcgacggggggagtgagggggtttggatcgggtaggagcgacggggggagtgaggagggggtttggatcgggtaggagcgacggggggagtgaggagggggtttggatcgggtaggagcgacggggggagtgaggagggggtttggatcgggtaggagcgacggggggagtgaggagggggtttggacggggtaggagcgacggggggagtgaggagggggtttggacggggtaggagcgacggggggagtgaggagggggtttggacggggttggagcgacggggggagtgaggagggggtttggatcgggtaggagcgacggggggagtgaggagggggtttggatcgggtaggagcgacggggggagtgaggagggggtttggacggggtaggagcgacggggggagtgaggagggggtttggacggggtaggagcgacggggggagtgaggagggggtttggacggggtaggagcgacggggggagtgaggagggggtttggacggggtaggagcgacggggggagtgaggagggggtttggacggngtaggagcgacggggggagtgagga

SEQ ID NO: 29846 - DNA, 1009 bp, Artificial Sequence
  chemically treated genomic DNA (Homo sapiens) CpG-island No: 29846
  unsure (26)
tcctcactccccccgtcgctcctacnccgtccaaaccccctcctcactccccccgtcgctcctaccccgtccaaaccccctcctcactccccccgtcgctcctaccccgtccaaaccccctcctcactccccccgtcgctcctaccccgtccaaaccccctcctcactccccccgtcgctcctaccccgtccaaaccccctcctcactccccccgtcgctcctacccgatccaaaccccctcctcactccccccgtcgctcctacccgatccaaaccccctcctcactccccccgtcgctccaaccccgtccaaaccccctcctcactccccccgtcgctcctaccccgtccaaaccccctcctcactccccccgtcgctcctaccccgtccaaaccccctcctcactccccccgtcgctcctacccgatccaaaccccctcctcactccccccgtcgctcctacccgatccaaaccccctcctcactccccccgtcgctcctacccgatccaaaccccctcctcactccccccgtcgctcctacccgatccaaaccccctcactccccccgtcgctcctacgaccccctcctcactccccccgtcgctcctacccgatccaaaccccctcctcactccccccgtcgctcctacccgatccaaaccccctcctcactccccccgtcgctcctacccgatccaaaccccctcctcactccccccgtcgctcctaccccgtccaaaccccctcctcactccccccgtcgctcctaccccgtccaaaccccctcctcactccccccgtcgctcctaccccgtccaaaccccctcctcactccccccgtcgctcctaccccgtccaaaccccctcctcactccccccgtcgctcctaccccgtccaaaccccctcctcactccccccgtcgctcctaccccgtccaaaccccctcctcactccccccgtcgctcctaccccgtccaaaccccctcctcactccccccgtcgct

SEQ ID NO: 29847 - DNA, 1009 bp, Artificial Sequence
  chemically treated genomic DNA (Homo sapiens) CpG-island No: 29847
  unsure (26)
tttttatttttttcgtcgtttttgtntcgtttaggttttttttttatttttttcgtcgtttttgtttcgtttaggttttttttttatttttttcgtcgtttttgtttcgtttaggttttttttttatttttttcgtcgtttttgtttcgtttaggttttttttttatttttttcgtcgtttttgtttcgtttaggttttttttttatttttttcgtcgtttttgttcggtttaggttttttttttatttttttcgtcgtttttgttcggtttaggttttttttttatttttttcgtcgttttagtttcgtttaggttttttttttatttttttcgtcgtttttgtttcgtttaggttttttttttatttttttcgtcgtttttgtttcgtttaggttttttttttatttttttcgtcgtttttgttcggtttaggttttttttttatttttttcgtcgtttttgttcggtttaggttttttttttatttttttcgtcgtttttgttcggtttaggttttttttttatttttttcgtcgtttttgttcggtttaggtttttttatttttttcgtcgtttttgcggttttttttttatttttttcgtcgtttttgttcggtttaggttttttttttatttttttcgtcgtttttgttcggtttaggttttttttttatttttttcgtcgtttttgttcggtttaggttttttttttatttttttcgtcgtttttgtttcgtttaggttttttttttatttttttcgtcgtttttgtttcgtttaggttttttttttatttttttcgtcgtttttgtttcgtttaggttttttttttatttttttcgtcgtttttgtttcgtttaggttttttttttatttttttcgtcgtttttgtttcgtttaggttttttttttatttttttcgtcgtttttgtttcgtttaggttttttttttatttttttcgtcgtttttgtttcgtttaggttttttttttatttttttcgtcgtt

SEQ ID NO: 29848 - DNA, 1009 bp, Artificial Sequence
  chemically treated genomic DNA (Homo sapiens) CpG-island No: 29848
  unsure (984)
aacgacgaaaaaaataaaaaaaaaacctaaacgaaacaaaaacgacgaaaaaaataaaaaaaaaacctaaacgaaacaaaaacgacgaaaaaaataaaaaaaaaacctaaacgaaacaaaaacgacgaaaaaaataaaaaaaaaacctaaacgaaacaaaaacgacgaaaaaaataaaaaaaaaacctaaacgaaacaaaaacgacgaaaaaaataaaaaaaaaacctaaacgaaacaaaaacgacgaaaaaaataaaaaaaaaacctaaacgaaacaaaaacgacgaaaaaaataaaaaaaaaacctaaaccgaacaaaaacgacgaaaaaaataaaaaaaaaacctaaaccgaacaaaaacgacgaaaaaaataaaaaaaaaacctaaaccgaacaaaaacgacgaaaaaaataaaaaaaaaaccgcaaaaacgacgaaaaaaataaaaaaacctaaaccgaacaaaaacgacgaaaaaaataaaaaaaaaacctaaaccgaacaaaaacgacgaaaaaaataaaaaaaaaacctaaaccgaacaaaaacgacgaaaaaaataaaaaaaaaacctaaaccgaacaaaaacgacgaaaaaaataaaaaaaaaacctaaacgaaacaaaaacgacgaaaaaaataaaaaaaaaacctaaacgaaacaaaaacgacgaaaaaaataaaaaaaaaacctaaacgaaactaaaacgacgaaaaaaataaaaaaaaaacctaaaccgaacaaaaacgacgaaaaaaataaaaaaaaaacctaaaccgaacaaaaacgacgaaaaaaataaaaaaaaaacctaaacgaaacaaaaacgacgaaaaaaataaaaaaaaaacctaaacgaaacaaaaacgacgaaaaaaataaaaaaaaaacctaaacgaaacaaaaacgacgaaaaaaataaaaaaaaaacctaaacgaaacaaaaacgacgaaaaaaataaaaaaaaaacctaaacganacaaaaacgacgaaaaaaataaaaa

SEQ ID NO: 29849 - DNA, 596 bp, Artificial Sequence
  chemically treated genomic DNA (Homo sapiens) CpG-island No: 29849
tttcgttagggagaggttttcggttagggcgttttattttgttgttgggaagcgtgttttttgtcggtggggttttttgtgggaattttcgatcgtttggggattcggagttgtaggatttgggttaaatagacgttgggttatcgaagtttcgacgtcgggttatcgtacgtttttttgtttaggtgttggagtcgtttttcggggttcgaggagggattttggagttgcgttcgcgatttcgttatcgtttatagttgcgcgttaggtttaacggttttatttattaaggtttttggagttcgtggtcggatttaattagggtggagatcgttatcgagatcggtgaggtaagtttcggtcgtattaaagtcgtatagcgtttgcgttagggattgggcgtcgggtgcgagtggggcggggttcggagaggggcgaggcgcggggcgcggagaggggcggggttttgattttgcgggtcgacggttgcgtaggtgttcgtagtgtttaggggcggcgaggggcggggttagagtaggggttggttggatgagggcggggtttcggttcgggtgggtcgaagtttgatttttttt

SEQ ID NO: 29850 - DNA, 596 bp, Artificial Sequence
  chemically treated genomic DNA (Homo sapiens) CpG-island No: 29850
aaaaaaaatcaaacttcgacccacccgaaccgaaaccccgccctcatccaaccaacccctactctaaccccgcccctcgccgcccctaaacactacgaacacctacgcaaccgtcgacccgcaaaatcaaaaccccgcccctctccgcgccccgcgcctcgcccctctccgaaccccgccccactcgcacccgacgcccaatccctaacgcaaacgctatacgactttaatacgaccgaaacttacctcaccgatctcgataacgatctccaccctaattaaatccgaccacgaactccaaaaaccttaataaataaaaccgttaaacctaacgcgcaactataaacgataacgaaatcgcgaacgcaactccaaaatccctcctcgaaccccgaaaaacgactccaacacctaaacaaaaaaacgtacgataacccgacgtcgaaacttcgataacccaacgtctatttaacccaaatcctacaactccgaatccccaaacgatcgaaaattcccacaaaaaaccccaccgacaaaaaacacgcttcccaacaacaaaataaaacgccctaaccgaaaacctctccctaacgaaa

SEQ ID NO: 29851 - DNA, 596 bp, Artificial Sequence
  chemically treated genomic DNA (Homo sapiens) CpG-island No: 29851
aaaaagggttagatttcggtttattcgggtcggagtttcgtttttatttagttagtttttattttggtttcgtttttcgtcgtttttgggtattgcgggtatttgcgtagtcgtcggttcgtaaggttagggtttcgttttttttcgcgtttcgcgtttcgttttttttcgagtttcgttttattcgtattcggcgtttagtttttggcgtaggcgttgtgcggttttggtgcggtcggggtttgttttatcggtttcggtggcggtttttattttagttgggttcgattacgagttttagggattttggtaggtggggtcgttgagtttggcgcgtagttgtaaacggtagcgagatcgcgggcgtagttttagggttttttttcgggtttcgagaggcggttttagtatttgagtaaagaagcgtgcggtggttcggcgtcggggtttcgatagtttagcgtttgtttgatttaaattttgtagtttcgaatttttaggcggtcggagatttttataaagagttttatcggtagaaaatacgttttttagtaataggatagagcgttttaatcgagagtttttttttaacggga

SEQ ID NO: 29852 - DNA, 596 bp, Artificial Sequence
  chemically treated genomic DNA (Homo sapiens) CpG-island No: 29852
tcccgttaaaaaaaaactctcgattaaaacgctctatcctattactaaaaaacgtattttctaccgataaaactctttataaaaatctccgaccgcctaaaaattcgaaactacaaaatttaaatcaaacaaacgctaaactatcgaaaccccgacgccgaaccaccgcacgcttctttactcaaatactaaaaccgcctctcgaaacccgaaaaaaaaccctaaaactacgcccgcgatctcgctaccgtttacaactacgcgccaaactcaacgaccccacctaccaaaatccctaaaactcgtaatcgaacccaactaaaataaaaaccgccaccgaaaccgataaaacaaaccccgaccgcaccaaaaccgcacaacgcctacgccaaaaactaaacgccgaatacgaataaaacgaaactcgaaaaaaaacgaaacgcgaaacgcgaaaaaaaacgaaaccctaaccttacgaaccgacgactacgcaaatacccgcaatacccaaaaacgacgaaaaacgaaaccaaaataaaaactaactaaataaaaacgaaactccgacccgaataaaccgaaatctaacccttttt

SEQ ID NO: 29853 - DNA, 599 bp, Artificial Sequence
  chemically treated genomic DNA (Homo sapiens) CpG-island No: 29853
gtcgttcgcggttttttttttttttttaggaacggtttaagcgttttgggtattttatcgggttttgtatcgagttttgtattataaatacgattttcgtgtaggatttaagtgtgaatttttgtaggttttcggattttgaagtattcggggttagatatttcgagttcgcggcggtggaaggtacgtaaaagggcgaatcgagacgattttaggacgttgaggtagcgtaggttttattcggtttcgttttgtttcgttttgtttcggtcggttttttagtattagttttttggcgtcggtttttagtttttttcgtattttttaaatcgcgtttcgtcgttagattttcgtgatagttgagatttttttcggaaggttcgtttttttcgtcggagaggttaatgggttagggtaacggttgcgacggttggattttgaaggagttaataggcgttcggagcggagagtttaagaggcgtaagttaggcgtgttaaagtcggtcggaattgtttcggagggtacggtgagaggtggtggggttgagtcgaggtggggtcgtggttagggggagggggtgttaggtcggaaggggttg

SEQ ID NO: 29854 - DNA, 599 bp, Artificial Sequence
  chemically treated genomic DNA (Homo sapiens) CpG-island No: 29854
caaccccttccgacctaacaccccctccccctaaccacgaccccacctcgactcaaccccaccacctctcaccgtaccctccgaaacaattccgaccgactttaacacgcctaacttacgcctcttaaactctccgctccgaacgcctattaactccttcaaaatccaaccgtcgcaaccgttaccctaacccattaacctctccgacgaaaaaaacgaaccttccgaaaaaaatctcaactatcacgaaaatctaacgacgaaacgcgatttaaaaaatacgaaaaaaactaaaaaccgacgccaaaaaactaatactaaaaaaccgaccgaaacaaaacgaaacaaaacgaaaccgaataaaacctacgctacctcaacgtcctaaaatcgtctcgattcgcccttttacgtaccttccaccgccgcgaactcgaaatatctaaccccgaatacttcaaaatccgaaaacctacaaaaattcacacttaaatcctacacgaaaatcgtatttataatacaaaactcgatacaaaacccgataaaatacccaaaacgcttaaaccgttcctaaaaaaaaaaaaaaaaccgcgaacgac

SEQ ID NO: 29855 - DNA, 599 bp, Artificial Sequence
  chemically treated genomic DNA (Homo sapiens) CpG-island No: 29855
tagtttttttcggtttagtattttttttttttggttacggttttatttcggtttagttttattattttttatcgtgtttttcggagtagtttcgatcggttttaatacgtttggtttacgttttttaaatttttcgtttcgagcgtttattggtttttttaaaatttaatcgtcgtaatcgttgttttagtttattggttttttcggcgaagggggcgggtttttcggggaaagttttagttattacgagagtttagcggcggagcgcgatttgaagggtacgagaggggttgggagtcggcgttagaggattagtattggaaagtcggtcgggatagggcggggtagggcggggtcgggtggggtttgcgttgttttagcgttttggagtcgtttcggttcgtttttttgcgtgttttttatcgtcgcgagttcggaatgtttggtttcgggtgttttagggttcgagaatttgtagaagtttatatttaaattttatacgagagtcgtatttatgatgtagaattcggtgtagaattcgatggagtgtttaaggcgtttgagtcgtttttagaaggggaaggagagtcgcgggcggt

SEQ ID NO: 29856 - DNA, 599 bp, Artificial Sequence
  chemically treated genomic DNA (Homo sapiens) CpG-island No: 29856
accgcccgcgactctccttccccttctaaaaacgactcaaacgccttaaacactccatcgaattctacaccgaattctacatcataaatacgactctcgtataaaatttaaatataaacttctacaaattctcgaaccctaaaacacccgaaaccaaacattccgaactcgcgacgataaaaaacacgcaaaaaaacgaaccgaaacgactccaaaacgctaaaacaacgcaaaccccacccgaccccgccctaccccgccctatcccgaccgactttccaatactaatcctctaacgccgactcccaacccctctcgtacccttcaaatcgcgctccgccgctaaactctcgtaataactaaaactttccccgaaaaacccgcccccttcgccgaaaaaaccaataaactaaaacaacgattacgacgattaaattttaaaaaaaccaataaacgctcgaaacgaaaaatttaaaaaacgtaaaccaaacgtattaaaaccgatcgaaactactccgaaaaacacgataaaaaataataaaactaaaccgaaataaaaccgtaaccaaaaaaaaaaaatactaaaccgaaaaaaacta

SEQ ID NO: 29857 - DNA, 528 bp, Artificial Sequence
  chemically treated genomic DNA (Homo sapiens) CpG-island No: 29857
aggttatacgtgtttttcgatttcgtttttagggggagttttttttttttattgcgttggtcgtgtttttggttcgcgtgtttaggaagggcgtagcggagtcgcgtgttcgttcgggcggaggacgtcgttttcgcgcggcggtgtcgggtttttgttttcggaacgttaattttagggttcgtcggtttttttttttttttattcgtttttcgtgcgagtcgttgcgtagtagtttgcgtttcgagtgcgttgtgttttaaggaggtttcggcgtttgttttttgggttcgggggtttgggtgcgtaggtgggggttggtacgtagttcgttgggtaggtttcgcgtagcgattttttttacgtcggagttaagttttttgggtgagacgtgtaataacgtaggttttaaagttttttgcgcgtagcgtcgcggggtttggttttttttagttttcgggagttagttatcgtttttggtttgttataggatttttatttcgtggtgggtaatgatatatatatatt

SEQ ID NO: 29858 - DNA, 528 bp, Artificial Sequence
  chemically treated genomic DNA (Homo sapiens) CpG-island No: 29858
aatatatatatatcattacccaccacgaaataaaaatcctataacaaaccaaaaacgataactaactcccgaaaactaaaaaaaaccaaaccccgcgacgctacgcgcaaaaaactttaaaacctacgttattacacgtctcacccaaaaaacttaactccgacgtaaaaaaaatcgctacgcgaaacctacccaacgaactacgtaccaacccccacctacgcacccaaacccccgaacccaaaaaacaaacgccgaaacctccttaaaacacaacgcactcgaaacgcaaactactacgcaacgactcgcacgaaaaacgaataaaaaaaaaaaaaaaccgacgaaccctaaaattaacgttccgaaaacaaaaacccgacaccgccgcgcgaaaacgacgtcctccgcccgaacgaacacgcgactccgctacgcccttcctaaacacgcgaaccaaaaacacgaccaacgcaataaaaaaaaaaaactccccctaaaaacgaaatcgaaaaacacgtataacct

SEQ ID NO: 29859 - DNA, 528 bp, Artificial Sequence
  chemically treated genomic DNA (Homo sapiens) CpG-island No: 29859
aatatgtatatattattgtttattacgaggtgggaattttataataagttagagacggtggttgattttcgaggattggagaaggttaagtttcgcggcgttgcgcgtagagagttttggggtttgcgttgttgtacgttttatttaaagaatttagtttcggcgtggggagggtcgttgcgcgaaatttgtttaacgggttgcgtgttagtttttatttgcgtatttaagttttcgagtttaaggggtaagcgtcggggtttttttaaaatatagcgtattcgaagcgtagattgttgcgtagcggttcgtacggaaagcgggtgaaaagaaaggggggtcggcgaattttaaaattagcgtttcggaagtaggggttcggtatcgtcgcgcggagacggcgtttttcgttcggacgggtacgcgatttcgttgcgttttttttgggtacgcgggttaggagtacgattagcgtaataggaaggaagggttttttttggaaacgggatcggggaatacgtgtagttt

SEQ ID NO: 29860 - DNA, 528 bp, Artificial Sequence
  chemically treated genomic DNA (Homo sapiens) CpG-island No: 29860
aaactacacgtattccccgatcccgtttccaaaaaaaacccttccttcctattacgctaatcgtactcctaacccgcgtacccaaaaaaaacgcaacgaaatcgcgtacccgtccgaacgaaaaacgccgtctccgcgcgacgataccgaacccctacttccgaaacgctaattttaaaattcgccgacccccctttcttttcacccgctttccgtacgaaccgctacgcaacaatctacgcttcgaatacgctatattttaaaaaaaccccgacgcttaccccttaaactcgaaaacttaaatacgcaaataaaaactaacacgcaacccgttaaacaaatttcgcgcaacgaccctccccacgccgaaactaaattctttaaataaaacgtacaacaacgcaaaccccaaaactctctacgcgcaacgccgcgaaacttaaccttctccaatcctcgaaaatcaaccaccgtctctaacttattataaaattcccacctcgtaataaacaataatatatacatatt

SEQ ID NO: 29861 - DNA, 552 bp, Artificial Sequence
  chemically treated genomic DNA (Homo sapiens) CpG-island No: 29861
tgagcggcgcgggttcgcgcgtattcgtacgtttcgggcgttaggcgtcgtcgtgtgggcggagtcgggtagttttttttgtcggcgttagttacggttttcggttttaagtttcgttttcggcgcgtattttttagtagcggttcggtatttggtagacgcgcggcggcggcggcgagcggtggcgttcggttcgggcgatcgcggcgggggagggcgcggcgtatcgatgggcgttattgagaagggaggttagaagagtcggaagttgttttttttgcggcggtcgtggaaggcgattcggcggttgtggaggttacgtttagttcgttaggcggcgtagggtgagtgtgggcgcggtcggtcgggatttgttattttgaggtaggggcgtagcggcggcggggtcgttttcggcggtttttcgggtcgcgttttcggttttgggagtttggatgtttaggcgacgttcgaattcgattttcggtcgcgggtatcgggatcgttggggaagcgtaggggttgatgtcggtatagtttttttttttttag

SEQ ID NO: 29862 - DNA, 552 bp, Artificial Sequence
  chemically treated genomic DNA (Homo sapiens) CpG-island No: 29862
ctaaaaaaaaaaaaactataccgacatcaacccctacgcttccccaacgatcccgatacccgcgaccgaaaatcgaattcgaacgtcgcctaaacatccaaactcccaaaaccgaaaacgcgacccgaaaaaccgccgaaaacgaccccgccgccgctacgcccctacctcaaaataacaaatcccgaccgaccgcgcccacactcaccctacgccgcctaacgaactaaacgtaacctccacaaccgccgaatcgccttccacgaccgccgcaaaaaaaacaacttccgactcttctaacctcccttctcaataacgcccatcgatacgccgcgccctcccccgccgcgatcgcccgaaccgaacgccaccgctcgccgccgccgccgcgcgtctaccaaataccgaaccgctactaaaaaatacgcgccgaaaacgaaacttaaaaccgaaaaccgtaactaacgccgacaaaaaaaactacccgactccgcccacacgacgacgcctaacgcccgaaacgtacgaatacgcgcgaacccgcgccgctca

SEQ ID NO: 29863 - DNA, 552 bp, Artificial Sequence
  chemically treated genomic DNA (Homo sapiens) CpG-island No: 29863
ttagaggaaaggagattgtgtcgatattagtttttgcgtttttttagcggtttcggtattcgcgatcgagggtcgggttcgggcgtcgtttaggtatttaggtttttagggtcgggaacgcgattcgagagatcgtcggggacggtttcgtcgtcgttgcgtttttgttttagggtaataggtttcgatcggtcgcgtttatatttattttgcgtcgtttggcgagttgagcgtggtttttatagtcgtcgggtcgttttttacggtcgtcgtaaggaaaatagttttcggtttttttggtttttttttttagtggcgtttatcggtgcgtcgcgttttttttcgtcgcggtcgttcgagtcgagcgttatcgttcgtcgtcgtcgtcgcgcgtttgttaggtgtcgggtcgttgttgggagatgcgcgtcgggggcggagtttggggtcgggagtcgtggttggcgtcgataggggaggttgttcggtttcgtttatacggcggcgtttggcgttcgaggcgtgcgggtgcgcgcgggttcgcgtcgttta

SEQ ID NO: 29864 - DNA, 552 bp, Artificial Sequence
  chemically treated genomic DNA (Homo sapiens) CpG-island No: 29864
taaacgacgcgaacccgcgcgcacccgcacgcctcgaacgccaaacgccgccgtataaacgaaaccgaacaacctcccctatcgacgccaaccacgactcccgaccccaaactccgcccccgacgcgcatctcccaacaacgacccgacacctaacaaacgcgcgacgacgacgacgaacgataacgctcgactcgaacgaccgcgacgaaaaaaaacgcgacgcaccgataaacgccactaaaaaaaaaaaccaaaaaaaccgaaaactattttccttacgacgaccgtaaaaaacgacccgacgactataaaaaccacgctcaactcgccaaacgacgcaaaataaatataaacgcgaccgatcgaaacctattaccctaaaacaaaaacgcaacgacgacgaaaccgtccccgacgatctctcgaatcgcgttcccgaccctaaaaacctaaatacctaaacgacgcccgaacccgaccctcgatcgcgaataccgaaaccgctaaaaaaacgcaaaaactaatatcgacacaatctcctttcctctaa

SEQ ID NO: 29865 - DNA, 827 bp, Artificial Sequence
  chemically treated genomic DNA (Homo sapiens) CpG-island No: 29865
tggttgtacgtacgtttttcggattgtataaacgatcgggaattcggtataattagttaatcgttttttttttaggttttttaagttttcgatttcgcgttaggtatcgtttttagtatacgtatttttttataaaggagttgcggatttataggaaacgggagcgtcgggttttttcggggatttgttttcgcggcgcgagtttcgcgttcgttatttcggggcgtattgtcgatgtagttcgcgtagtttttttcgggcgggtttagtattcgttttttagatttttacgggttcggattttgtatgatatcgcgacggcgtcgggggggatgatgagcgttttttcgtcgtttttgggttcgttttttttggtttttttttgggttagagcggagttgaacgttatttttattatggcgcggtttggggcgttttcgaagggcggcggcgggttcggggcgcgggttgcgggttttcggttgcgattgtagtttttacggtcgggtttcgggagcggtttcgggcggttgaagaggttcgggaagtttcgcggcggtagaggcggttattgcggtagggatttcgtagttttttagttttcgcgcgagggcggagattgttcgtatattttttgggaggcggggcgggggcgggggcggagttagcggtcgggggtggggtgttgcgcgggattttgttttcgtttcgtagttgggcgtcggatttcggcgcgtttcggagagggatgggtgtttttttgggtcgtttggaatttttagttttgaattcgtttttaattaggttatttttaggtcgagtgttgt

SEQ ID NO: 29866 - DNA, 827 bp, Artificial Sequence
  chemically treated genomic DNA (Homo sapiens) CpG-island No: 29866
acaacactcgacctaaaaataacctaattaaaaacgaattcaaaactaaaaattccaaacgacccaaaaaaacacccatccctctccgaaacgcgccgaaatccgacgcccaactacgaaacgaaaacaaaatcccgcgcaacaccccacccccgaccgctaactccgcccccgcccccgccccgcctcccaaaaaatatacgaacaatctccgccctcgcgcgaaaactaaaaaactacgaaatccctaccgcaataaccgcctctaccgccgcgaaacttcccgaacctcttcaaccgcccgaaaccgctcccgaaacccgaccgtaaaaactacaatcgcaaccgaaaacccgcaacccgcgccccgaacccgccgccgcccttcgaaaacgccccaaaccgcgccataataaaaataacgttcaactccgctctaacccaaaaaaaaaccaaaaaaaacgaacccaaaaacgacgaaaaaacgctcatcatcccccccgacgccgtcgcgatatcatacaaaatccgaacccgtaaaaatctaaaaaacgaatactaaacccgcccgaaaaaaactacgcgaactacatcgacaatacgccccgaaataacgaacgcgaaactcgcgccgcgaaaacaaatccccgaaaaaacccgacgctcccgtttcctataaatccgcaactcctttataaaaaaatacgtatactaaaaacgatacctaacgcgaaatcgaaaacttaaaaaacctaaaaaaaaaacgattaactaattataccgaattcccgatcgtttatacaatccgaaaaacgtacgtacaacca

SEQ ID NO: 29867 - DNA, 827 bp, Artificial Sequence
  chemically treated genomic DNA (Homo sapiens) CpG-island No: 29867
gtagtattcggtttggaggtaatttggttgggagcgaatttagaattggaaattttaggcggtttagagggatatttattttttttcgaggcgcgtcgggattcggcgtttagttgcggggcgagggtagggtttcgcgtagtattttattttcggtcgttggtttcgttttcgttttcgtttcgttttttaggggatgtgcgagtagttttcgttttcgcgcgggagttgggaggttgcgagatttttatcgtagtagtcgtttttgtcgtcgcggagtttttcgaatttttttagtcgttcggagtcgttttcggagttcggtcgtagaggttgtaatcgtagtcgggagttcgtagttcgcgtttcgagttcgtcgtcgtttttcgagggcgttttaggtcgcgttatggtgaaggtgacgtttaatttcgttttggtttagaaggaggttaagaaggacgagtttaagagcggcgaggaggcgtttattatttttttcgacgtcgtcgcggtgttatgtaaggttcgagttcgtggaggtttaggaaacgggtgttgggttcgttcggggagggttgcgcggattgtatcggtagtgcgtttcgaggtggcgggcgcggggttcgcgtcgcggggataagttttcgagagagttcggcgttttcgttttttgtgggttcgtagtttttttgtaaggaagtgcgtgtgttggaagcggtgtttgacgcggggtcgggggtttgggaggtttggagagggaacgattggttaattgtgtcgaattttcggtcgtttgtgtagttcggggagcgtgcgtgtagtta

SEQ ID NO: 29868 - DNA, 827 bp, Artificial Sequence
  chemically treated genomic DNA (Homo sapiens) CpG-island No: 29868
taactacacgcacgctccccgaactacacaaacgaccgaaaattcgacacaattaaccaatcgttccctctccaaacctcccaaacccccgaccccgcgtcaaacaccgcttccaacacacgcacttccttacaaaaaaactacgaacccacaaaaaacgaaaacgccgaactctctcgaaaacttatccccgcgacgcgaaccccgcgcccgccacctcgaaacgcactaccgatacaatccgcgcaaccctccccgaacgaacccaacacccgtttcctaaacctccacgaactcgaaccttacataacaccgcgacgacgtcgaaaaaaataataaacgcctcctcgccgctcttaaactcgtccttcttaacctccttctaaaccaaaacgaaattaaacgtcaccttcaccataacgcgacctaaaacgccctcgaaaaacgacgacgaactcgaaacgcgaactacgaactcccgactacgattacaacctctacgaccgaactccgaaaacgactccgaacgactaaaaaaattcgaaaaactccgcgacgacaaaaacgactactacgataaaaatctcgcaacctcccaactcccgcgcgaaaacgaaaactactcgcacatcccctaaaaaacgaaacgaaaacgaaaacgaaaccaacgaccgaaaataaaatactacgcgaaaccctaccctcgccccgcaactaaacgccgaatcccgacgcgcctcgaaaaaaaataaatatccctctaaaccgcctaaaatttccaattctaaattcgctcccaaccaaattacctccaaaccgaatactac

SEQ ID NO: 29869 - DNA, 512 bp, Artificial Sequence
  chemically treated genomic DNA (Homo sapiens) CpG-island No: 29869
taacgtcgcgattgttttgagtaaaacgagggagattttgcggggaaagtgtttttagtttatttttttaatagagaatgagttttttcgtttatcgcggatagcgaggaaaagtagcggagatgggttttcgggttgtatttcgtttttcggtttatttagattttttggtagtttcgggcgttcgtttatttcgtttttttttcgtttttgtcgtcgtcgtcgtaggtgcgtattttatcgcgtttttgtttttttttcgaatttttttcgaaggtggttttcgtttttttttttatttatcgttttttgagtgttagaattggagttatagcgtttttaagacgaaatttatgttgggtttcgcgattatggtgttggtttacgcgtttggtaggtaaggacgggtagcgatttacgtttttgggttttcgtttttaagagttgggaattttatttttttatttttttatttgtatttaaatttttcgagacgtattgatttttttgtt

SEQ ID NO: 29870 - DNA, 512 bp, Artificial Sequence
  chemically treated genomic DNA (Homo sapiens) CpG-island No: 29870
aacaaaaaaatcaatacgtctcgaaaaatttaaatacaaataaaaaaataaaaaaataaaattcccaactcttaaaaacgaaaacccaaaaacgtaaatcgctacccgtccttacctaccaaacgcgtaaaccaacaccataatcgcgaaacccaacataaatttcgtcttaaaaacgctataactccaattctaacactcaaaaaacgataaataaaaaaaaaaacgaaaaccaccttcgaaaaaaattcgaaaaaaaaacaaaaacgcgataaaatacgcacctacgacgacgacgacaaaaacgaaaaaaaaacgaaataaacgaacgcccgaaactaccaaaaaatctaaataaaccgaaaaacgaaatacaacccgaaaacccatctccgctacttttcctcgctatccgcgataaacgaaaaaactcattctctattaaaaaaataaactaaaaacactttccccgcaaaatctccctcgttttactcaaaacaatcgcgacgtta

SEQ ID NO: 29871 - DNA, 512 bp, Artificial Sequence
  chemically treated genomic DNA (Homo sapiens) CpG-island No: 29871
aatagaagggttagtacgtttcgggggatttaggtgtaggtgaggaggtaaaaaagtggaatttttagtttttagaaacgaagatttaggagcgtgggtcgttgttcgtttttatttgttaggcgcgtgggttagtattatggtcgcgaaatttagtatggatttcgttttggggacgttatggttttagttttgatatttaagaaacgatggatggagaggagaacgaggattattttcgaaaagagttcgagagggaagtagggacgcggtggggtgcgtatttgcggcggcggcggtaaaggcggaggagaagcgaagtgggcgagcgttcgaggttgttagaggatttgggtgggtcggaaggcggagtgtagttcggaagtttattttcgttgttttttttcgttgttcgcgataagcgagagggtttattttttgttggagaagtgagttgaaaatatttttttcgtaagatttttttcgttttgtttaaggtagtcgcggcgttg

SEQ ID NO: 29872 - DNA, 512 bp, Artificial Sequence
  chemically treated genomic DNA (Homo sapiens) CpG-island No: 29872
caacgccgcgactaccttaaacaaaacgaaaaaaatcttacgaaaaaaatattttcaactcacttctccaacaaaaaataaaccctctcgcttatcgcgaacaacgaaaaaaaacaacgaaaataaacttccgaactacactccgccttccgacccacccaaatcctctaacaacctcgaacgctcgcccacttcgcttctcctccgcctttaccgccgccgccgcaaatacgcaccccaccgcgtccctacttccctctcgaactcttttcgaaaataatcctcgttctcctctccatccatcgtttcttaaatatcaaaactaaaaccataacgtccccaaaacgaaatccatactaaatttcgcgaccataatactaacccacgcgcctaacaaataaaaacgaacaacgacccacgctcctaaatcttcgtttctaaaaactaaaaattccacttttttacctcctcacctacacctaaatcccccgaaacgtactaacccttctatt

SEQ ID NO: 29873 - DNA, 504 bp, Artificial Sequence
  chemically treated genomic DNA (Homo sapiens) CpG-island No: 29873
tgttgcgcgtgtttcgttcgttgttggggtacggtagagattaacgtgtcgtgttcgtagtgtcgggagattttttcgtagaggtatatgcggtttaatcggtatttggttaacgtgatttaattggtaaagtagttgcgtatcgagcggtcgtcggggttcggcggcgagatgggcgtgtgcgagaagtatcgcgagtttttgaagttgtattgcgaggaggattagatgtttatttgcgtggtgtgcgatcgttttcgcgagtatcgcggttatagcgtgttgtcgttcgaggaggcggtggagggttttaaggtgagggcgcggattcgggagggcgggagcgcgagtcggataaagggaggagagagttaaaggggttttttttttttcgtttagaaaatggttgagtcggacgtgtggtttatagtcgttattttttttttgttcgttttagagttttagtatttagatttggaggaaaatttgtagttggcgaggaag

SEQ ID NO: 29874 - DNA, 504 bp, Artificial Sequence
  chemically treated genomic DNA (Homo sapiens) CpG-island No: 29874
cttcctcgccaactacaaattttcctccaaatctaaatactaaaactctaaaacgaacaaaaaaaaaataacgactataaaccacacgtccgactcaaccattttctaaacgaaaaaaaaaaaacccctttaactctctcctccctttatccgactcgcgctcccgccctcccgaatccgcgccctcaccttaaaaccctccaccgcctcctcgaacgacaacacgctataaccgcgatactcgcgaaaacgatcgcacaccacgcaaataaacatctaatcctcctcgcaatacaacttcaaaaactcgcgatacttctcgcacacgcccatctcgccgccgaaccccgacgaccgctcgatacgcaactactttaccaattaaatcacgttaaccaaataccgattaaaccgcatatacctctacgaaaaaatctcccgacactacgaacacgacacgttaatctctaccgtaccccaacaacgaacgaaacacgcgcaaca

SEQ ID NO: 29875 - DNA, 504 bp, Artificial Sequence
  chemically treated genomic DNA (Homo sapiens) CpG-island No: 29875
ttttttcgttagttataggtttttttttaaatttgagtgttgaggttttggagcggatagagaggaaatgacggttgtgaattatacgttcggtttagttattttttaggcggaaaaaaggaagtttttttggtttttttttttttttgttcgattcgcgttttcgttttttcggattcgcgtttttattttgaagttttttatcgttttttcgagcggtagtacgttgtggtcgcggtgttcgcgggagcggtcgtatattacgtagatgggtatttggtttttttcgtagtatagttttaggggttcgcggtgtttttcgtatacgtttatttcgtcgtcgggtttcgacggtcgttcggtgcgtagttgttttattagttgggttacgttggttaggtgtcggttgggtcgtatgtgtttttgcgggaaggtttttcggtattgcgggtacgatacgttagtttttgtcgtgttttagtagcgggcgaggtacgcgtaata

SEQ ID NO: 29876 - DNA, 504 bp, Artificial Sequence
  chemically treated genomic DNA (Homo sapiens) CpG-island No: 29876
tattacgcgtacctcgcccgctactaaaacacgacaaaaactaacgtatcgtacccgcaataccgaaaaaccttcccgcaaaaacacatacgacccaaccgacacctaaccaacgtaacccaactaataaaacaactacgcaccgaacgaccgtcgaaacccgacgacgaaataaacgtatacgaaaaacaccgcgaacccctaaaactatactacgaaaaaaaccaaatacccatctacgtaatatacgaccgctcccgcgaacaccgcgaccacaacgtactaccgctcgaaaaaacgataaaaaacttcaaaataaaaacgcgaatccgaaaaaacgaaaacgcgaatcgaacaaaaaaaaaaaaaaaccaaaaaaacttccttttttccgcctaaaaaataactaaaccgaacgtataattcacaaccgtcatttcctctctatccgctccaaaacctcaacactcaaatttaaaaaaaaacctataactaacgaaaaaa

SEQ ID NO: 29877 - DNA, 709 bp, Artificial Sequence
  chemically treated genomic DNA (Homo sapiens) CpG-island No: 29877
  unsure (381)
gcggtcgtagtgttttgagggttcgcgattttcggttttaattttcgggttatcgcgggggttttattttttttggttatttaatggtaatagttttagatttcgttcggaatcgtagtcgtagttttttaggcgttagttgcgcgcgatttgcggcgaggcgggggcggggttggcggggttggcggatagttttttgtcgtgattggttagggggcgtggcgacgagtcggaagttacgtagggttacgtttgcgttttgaggattgggtttgggtgtagacgttgttgtttgggcgttttttcgttgcgtgtaggtgaagggggttttttgatcgaggtaagtcgggtttcgaggttcggagttgagaaggtaaattntcggtcggtaagggttcggtgggagcggaataggttagattttcggttcgacggaggggttagtggtttggcgggcgattgatcgagcggcggagcgcgcgggatatatatataggtttttgcgtttcgcgggcgggttggtcgggacgggtcgcgggttttttttcggggttttggtacgtggatttaggcggggattttagggtggagtgtcgggaattatttttgtgcggtgattcgagggtaggcgggagagaggtattaaggagatttgaagattgaatggagagtagggggatatttttaattttttgcgtggacgttggat

SEQ ID NO: 29878 - DNA, 709 bp, Artificial Sequence
  chemically treated genomic DNA (Homo sapiens) CpG-island No: 29878
  unsure (329)
atccaacgtccacgcaaaaaattaaaaatatccccctactctccattcaatcttcaaatctccttaatacctctctcccgcctaccctcgaatcaccgcacaaaaataattcccgacactccaccctaaaatccccgcctaaatccacgtaccaaaaccccgaaaaaaaacccgcgacccgtcccgaccaacccgcccgcgaaacgcaaaaacctatatatatatcccgcgcgctccgccgctcgatcaatcgcccgccaaaccactaacccctccgtcgaaccgaaaatctaacctattccgctcccaccgaacccttaccgaccganaatttaccttctcaactccgaacctcgaaacccgacttacctcgatcaaaaaacccccttcacctacacgcaacgaaaaaacgcccaaacaacaacgtctacacccaaacccaatcctcaaaacgcaaacgtaaccctacgtaacttccgactcgtcgccacgccccctaaccaatcacgacaaaaaactatccgccaaccccgccaaccccgcccccgcctcgccgcaaatcgcgcgcaactaacgcctaaaaaactacgactacgattccgaacgaaatctaaaactattaccattaaataaccaaaaaaaataaaacccccgcgataacccgaaaattaaaaccgaaaatcgcgaaccctcaaaacactacgaccgc

SEQ ID NO: 29879 - DNA, 709 bp, Artificial Sequence
  chemically treated genomic DNA (Homo sapiens) CpG-island No: 29879
  unsure (329)
atttagcgtttacgtaaaaagttaagagtatttttttattttttatttaatttttaaatttttttggtgtttttttttcgtttattttcgaattatcgtataagggtgattttcggtattttattttgaggttttcgtttaggtttacgtattagagtttcgggaggagattcgcggttcgtttcgattagttcgttcgcggggcgtaggggtttgtatgtgtgtttcgcgcgtttcgtcgttcggttagtcgttcgttagattattagttttttcgtcgggtcgagaatttgatttgtttcgtttttatcgagtttttgtcgatcggnagtttatttttttaatttcgagtttcggggttcggtttatttcggttaggaagttttttttatttatacgtagcggagaagcgtttaagtaataacgtttgtatttaaatttagtttttagaacgtaaacgtggttttgcgtggttttcggttcgtcgttacgttttttggttaattacggtagaggattattcgttagtttcgttagtttcgttttcgtttcgtcgtaggtcgcgcgtagttggcgtttgaggaattgcggttgcggtttcgagcggggtttggggttgttattattgagtgattagaaagggtgaggttttcgcggtggttcgggggttggggtcgagggtcgcgggtttttagagtattgcggtcgt

SEQ ID NO: 29880 - DNA, 709 bp, Artificial Sequence
  chemically treated genomic DNA (Homo sapiens) CpG-island No: 29880
  unsure (381)
acgaccgcaatactctaaaaacccgcgaccctcgaccccaacccccgaaccaccgcgaaaacctcaccctttctaatcactcaataataacaaccccaaaccccgctcgaaaccgcaaccgcaattcctcaaacgccaactacgcgcgacctacgacgaaacgaaaacgaaactaacgaaactaacgaataatcctctaccgtaattaaccaaaaaacgtaacgacgaaccgaaaaccacgcaaaaccacgtttacgttctaaaaactaaatttaaatacaaacgttattacttaaacgcttctccgctacgtataaataaaaaaaacttcctaaccgaaataaaccgaaccccgaaactcgaaattaaaaaaataaactnccgatcgacaaaaactcgataaaaacgaaacaaatcaaattctcgacccgacgaaaaaactaataatctaacgaacgactaaccgaacgacgaaacgcgcgaaacacacatacaaacccctacgccccgcgaacgaactaatcgaaacgaaccgcgaatctcctcccgaaactctaatacgtaaacctaaacgaaaacctcaaaataaaataccgaaaatcacccttatacgataattcgaaaataaacgaaaaaaaaacaccaaaaaaatttaaaaattaaataaaaaataaaaaaatactcttaactttttacgtaaacgctaaat

SEQ ID NO: 29881 - DNA, 540 bp, Artificial Sequence
  chemically treated genomic DNA (Homo sapiens) CpG-island No: 29881
gttagcgtcgggaggtaggaagtcgatcgggggcggggatcgaaggttttagacgtcgacgtcggcgtgggcgcgagtacggtgtattttgggagttgttattaggtttttcggttttcggtttcggtgtagttgtcgtggttgttaggagagttgcgtcggcgagaagcggtcgagttagtagtaggtaaaagcgtttttgtttttagtgcggtcgttaggttggtagtcggtttcgagtatttttttcggttcggttaggttttgagtcgcggggacgttttgcgagtttgattgttgtggcgtcgggggtgttgtcgtttcggtttcgttaggagttgcgaagttggtcggtcgttttttggtttacggggagtcgggagttgcgcggggattggagggttagggttggggtcggggtttgggtcgggtagaggcgcgagggcggttttaggtgagggaggtcggaggcggggtcggggagtcggggataggtttcgagttttttttgttggggcggagcggtgcgtaaggttgggg

SEQ ID NO: 29882 - DNA, 540 bp, Artificial Sequence
  chemically treated genomic DNA (Homo sapiens) CpG-island No: 29882
ccccaaccttacgcaccgctccgccccaacaaaaaaaactcgaaacctatccccgactccccgaccccgcctccgacctccctcacctaaaaccgccctcgcgcctctacccgacccaaaccccgaccccaaccctaaccctccaatccccgcgcaactcccgactccccgtaaaccaaaaaacgaccgaccaacttcgcaactcctaacgaaaccgaaacgacaacacccccgacgccacaacaatcaaactcgcaaaacgtccccgcgactcaaaacctaaccgaaccgaaaaaaatactcgaaaccgactaccaacctaacgaccgcactaaaaacaaaaacgcttttacctactactaactcgaccgcttctcgccgacgcaactctcctaacaaccacgacaactacaccgaaaccgaaaaccgaaaaacctaataacaactcccaaaatacaccgtactcgcgcccacgccgacgtcgacgtctaaaaccttcgatccccgcccccgatcgacttcctacctcccgacgctaac

SEQ ID NO: 29883 - DNA, 540 bp, Artificial Sequence
  chemically treated genomic DNA (Homo sapiens) CpG-island No: 29883
ttttagttttgcgtatcgtttcgttttagtaggggaggttcgggatttgttttcggtttttcggtttcgttttcggttttttttatttggggtcgttttcgcgtttttgttcggtttaggtttcggttttagttttggttttttagttttcgcgtagttttcgatttttcgtaaattagagggcggtcgattagtttcgtagtttttggcggggtcggagcggtaatattttcgacgttatagtagttagattcgtaaggcgttttcgcggtttaggatttagtcgggtcgagaaggatgttcggagtcggttattagtttagcggtcgtattgggggtagggacgtttttatttgttgttggttcggtcgtttttcgtcggcgtagtttttttggtaattacggtagttatatcgagatcgggagtcgaagggtttagtgatagtttttagagtgtatcgtgttcgcgtttacgtcggcgtcgacgtttgaggttttcgattttcgttttcgatcggttttttgtttttcggcgttagt

SEQ ID NO: 29884 - DNA, 540 bp, Artificial Sequence
  chemically treated genomic DNA (Homo sapiens) CpG-island No: 29884
actaacgccgaaaaacaaaaaaccgatcgaaaacgaaaatcgaaaacctcaaacgtcgacgccgacgtaaacgcgaacacgatacactctaaaaactatcactaaacccttcgactcccgatctcgatataactaccgtaattaccaaaaaaactacgccgacgaaaaacgaccgaaccaacaacaaataaaaacgtccctacccccaatacgaccgctaaactaataaccgactccgaacatccttctcgacccgactaaatcctaaaccgcgaaaacgccttacgaatctaactactataacgtcgaaaatattaccgctccgaccccgccaaaaactacgaaactaatcgaccgccctctaatttacgaaaaatcgaaaactacgcgaaaactaaaaaaccaaaactaaaaccgaaacctaaaccgaacaaaaacgcgaaaacgaccccaaataaaaaaaaccgaaaacgaaaccgaaaaaccgaaaacaaatcccgaacctcccctactaaaacgaaacgatacgcaaaactaaaa

SEQ ID NO: 29885 - DNA, 541 bp, Artificial Sequence
  chemically treated genomic DNA (Homo sapiens) CpG-island No: 29885
cgttagggtttcggttgggggtgggcggcgcggcggtttcggcgcgttttttcggggttatagagttagggtcgttggcgtgggcgttcggcggtttcgaggtaggttcggttatcgtttcgcggagacggtcgcggcggcgatgtgcgtggttttttttcgttcgcgggtttgcgtggagcggggttcggcggagcgcggggcgttttgggcgtttcgacgtagttggtgtttttcgatcgtcgcggtttcgttcgcgtcgggttttttttgcgatcgtcgttttcgtttttcgtttcggtagtttttaggattttttcgtttcggttgttatggtgatagttgcgtcggtgaatgagcgttttagtgatacgcgcgcgttcgttaggttagatgtggtttcggggcgcgtcgcgttttcgtagtcgtaagttttcggcggcgcgggtcggggtaagatattaggcgagtatggtggtattcggggttggttttatttttagtacggaaatatggaatttgtatttgaaaataaggggag

SEQ ID NO: 29886 - DNA, 541 bp, Artificial Sequence
  chemically treated genomic DNA (Homo sapiens) CpG-island No: 29886
ctccccttattttcaaatacaaattccatatttccgtactaaaaataaaaccaaccccgaataccaccatactcgcctaatatcttaccccgacccgcgccgccgaaaacttacgactacgaaaacgcgacgcgccccgaaaccacatctaacctaacgaacgcgcgcgtatcactaaaacgctcattcaccgacgcaactatcaccataacaaccgaaacgaaaaaatcctaaaaactaccgaaacgaaaaacgaaaacgacgatcgcaaaaaaaacccgacgcgaacgaaaccgcgacgatcgaaaaacaccaactacgtcgaaacgcccaaaacgccccgcgctccgccgaaccccgctccacgcaaacccgcgaacgaaaaaaaaccacgcacatcgccgccgcgaccgtctccgcgaaacgataaccgaacctacctcgaaaccgccgaacgcccacgccaacgaccctaactctataaccccgaaaaaacgcgccgaaaccgccgcgccgcccacccccaaccgaaaccctaacg

SEQ ID NO: 29887 - DNA, 541 bp, Artificial Sequence
  chemically treated genomic DNA (Homo sapiens) CpG-island No: 29887
ttttttttgtttttaagtgtaagttttatgttttcgtgttgggaataaggttagtttcgggtgttattatattcgtttgatgttttatttcgattcgcgtcgtcgagagtttgcggttacgggaacgcggcgcgtttcggggttatatttggtttagcgggcgcgcgcgtgttattaagacgtttatttatcggcgtagttgttattataataatcggagcgagggaattttggagattgtcggggcggggggcgggggcggcggtcgtaggagggattcggcgcgggcgggatcgcggcggtcgggggatattagttgcgtcggagcgtttagaacgtttcgcgtttcgtcgagtttcgttttacgtagattcgcgggcgggagggagttacgtatatcgtcgtcgcggtcgttttcgcggggcggtaatcgagtttgtttcggagtcgtcgaacgtttacgttagcgattttgattttatggtttcgggggagcgcgtcggagtcgtcgcgtcgtttatttttagtcggaattttagcg

SEQ ID NO: 29888 - DNA, 541 bp, Artificial Sequence
  chemically treated genomic DNA (Homo sapiens) CpG-island No: 29888
cgctaaaattccgactaaaaataaacgacgcgacgactccgacgcgctcccccgaaaccataaaatcaaaatcgctaacgtaaacgttcgacgactccgaaacaaactcgattaccgccccgcgaaaacgaccgcgacgacgatatacgtaactccctcccgcccgcgaatctacgtaaaacgaaactcgacgaaacgcgaaacgttctaaacgctccgacgcaactaatatcccccgaccgccgcgatcccgcccgcgccgaatccctcctacgaccgccgcccccgccccccgccccgacaatctccaaaattccctcgctccgattattataataacaactacgccgataaataaacgtcttaataacacgcgcgcgcccgctaaaccaaatataaccccgaaacgcgccgcgttcccgtaaccgcaaactctcgacgacgcgaatcgaaataaaacatcaaacgaatataataacacccgaaactaaccttattcccaacacgaaaacataaaacttacacttaaaaacaaaaaaaa

SEQ ID NO: 29889 - DNA, 631 bp, Artificial Sequence
  chemically treated genomic DNA (Homo sapiens) CpG-island No: 29889
gcgtagggatcggatagcggggcgcgtcggggtcgtttttcgagagttttgcgtgatattgtttcgtgtttttcgcgtagatagcgagttggtgttttcggattgtttgcggtcgcgtttttttatcgttttgcggcggtcgtcgttgcggcgcgaggcggacgacgcgcgtttttcggtgagtttatgcgattttaacgtgtcgggcgcggacggcgacgaggtcgcgtcggtcgtcggttgttttatttcgtagaatttatttaattcgtagtatagtcgcgcgttgtcggcgtagttcgacggcgatttgcgtttttacgttttgcgcgtcggcgcgtacgttcgtattttcgacgagtagacggtggcgcgcgtggagtacgggcgcgacgagcgcgcgttcgtttttattagtcggttcgtgcgcgtggtcgagattattttcgttaaggttacgcgttcgggtggcgcgcggttcggcgcgttgtcgttcggcgttattacgtgcgatttcggtacgttgcggtcggtcgatttgttttttagttttgaggttttggtggatcgtaaggaattttgggtcgtgtgtcgcgtgttcgggtttttgtatagcggcgatattttgggt

SEQ ID NO: 29890 - DNA, 631 bp, Artificial Sequence
  chemically treated genomic DNA (Homo sapiens) CpG-island No: 29890
acccaaaatatcgccgctatacaaaaacccgaacacgcgacacacgacccaaaattccttacgatccaccaaaacctcaaaactaaaaaacaaatcgaccgaccgcaacgtaccgaaatcgcacgtaataacgccgaacgacaacgcgccgaaccgcgcgccacccgaacgcgtaaccttaacgaaaataatctcgaccacgcgcacgaaccgactaataaaaacgaacgcgcgctcgtcgcgcccgtactccacgcgcgccaccgtctactcgtcgaaaatacgaacgtacgcgccgacgcgcaaaacgtaaaaacgcaaatcgccgtcgaactacgccgacaacgcgcgactatactacgaattaaataaattctacgaaataaaacaaccgacgaccgacgcgacctcgtcgccgtccgcgcccgacacgttaaaatcgcataaactcaccgaaaaacgcgcgtcgtccgcctcgcgccgcaacgacgaccgccgcaaaacgataaaaaaacgcgaccgcaaacaatccgaaaacaccaactcgctatctacgcgaaaaacacgaaacaatatcacgcaaaactctcgaaaaacgaccccgacgcgccccgctatccgatccctacgc

SEQ ID NO: 29891 - DNA, 631 bp, Artificial Sequence
  chemically treated genomic DNA (Homo sapiens) CpG-island No: 29891
gtttaggatgtcgtcgttgtgtaggggttcgggtacgcggtatacggtttagaattttttgcggtttattagggttttagggttgaaaggtaggtcggtcggtcgtagcgtgtcggggtcgtacgtggtgacgtcgaacgatagcgcgtcgggtcgcgcgttattcgagcgcgtgattttgacgaagatggtttcggttacgcgtacgggtcggttggtgaagacgagcgcgcgttcgtcgcgttcgtgttttacgcgcgttatcgtttgttcgtcgaggatgcggacgtgcgcgtcggcgcgtagggcgtggaaacgtaggtcgtcgtcgagttgcgtcggtagcgcgcggttgtgttgcgagttgagtgagttttgcgggatggggtagtcggcggtcggcgcggtttcgtcgtcgttcgcgttcggtacgttgaggtcgtataggtttatcgagaggcgcgcgtcgttcgtttcgcgtcgtagcgacggtcgtcgtagggcggtgaaggagcgcggtcgtagatagttcgggagtattagttcgttatttgcgcgggagatacggggtagtgttacgtagggttttcgggaggcggtttcggcgcgtttcgttgttcggtttttacgt

SEQ ID NO: 29892 - DNA, 631 bp, Artificial Sequence
  chemically treated genomic DNA (Homo sapiens) CpG-island No: 29892
acgtaaaaaccgaacaacgaaacgcgccgaaaccgcctcccgaaaaccctacgtaacactaccccgtatctcccgcgcaaataacgaactaatactcccgaactatctacgaccgcgctccttcaccgccctacgacgaccgtcgctacgacgcgaaacgaacgacgcgcgcctctcgataaacctatacgacctcaacgtaccgaacgcgaacgacgacgaaaccgcgccgaccgccgactaccccatcccgcaaaactcactcaactcgcaacacaaccgcgcgctaccgacgcaactcgacgacgacctacgtttccacgccctacgcgccgacgcgcacgtccgcatcctcgacgaacaaacgataacgcgcgtaaaacacgaacgcgacgaacgcgcgctcgtcttcaccaaccgacccgtacgcgtaaccgaaaccatcttcgtcaaaatcacgcgctcgaataacgcgcgacccgacgcgctatcgttcgacgtcaccacgtacgaccccgacacgctacgaccgaccgacctacctttcaaccctaaaaccctaataaaccgcaaaaaattctaaaccgtataccgcgtacccgaacccctacacaacgacgacatcctaaac

SEQ ID NO: 29893 - DNA, 600 bp, Artificial Sequence
  chemically treated genomic DNA (Homo sapiens) CpG-island No: 29893
gcgtcgcgttaggagtttttttttttttttttagcgaaggcggggattcgggcgttgttggtagttggcgacgcggggcgaagtcgcggttggcggcgtttggttagtttcgtattcgtcgcggtgggtgtgttcgtaggggtgcgtcggggttagggtcgagatcgtcggttagagggcgtttggagggtgtgcgcgtcgcggacgattagggtgcgttagtttcggggtgcgcgtttgggacgcggatagtgtattcggaggttgcgtgcgtttcgaagtcggggtgtgcgtttagttgtttcggtttcgtgtatcgcgggtcgtttcgcgtaggattttcgtagttcgttaaggtaagggattttgcgattttagtttttcgtagtgcgtttgttggggtgtttaatattcgttttgcgcgattcgagtgttggtttcggcgttcgattattttttttttgtttttgttattcgtttcgtttagtttttagcgtcgcgttttcggttttttttaaagtagtggttgcggtagtttgggtcgatttggcgttttcgttttttagtttggggtttgcgatagaaaaggagcggggttgt

SEQ ID NO: 29894 - DNA, 600 bp, Artificial Sequence
  chemically treated genomic DNA (Homo sapiens) CpG-island No: 29894
acaaccccgctccttttctatcgcaaaccccaaactaaaaaacgaaaacgccaaatcgacccaaactaccgcaaccactactttaaaaaaaaccgaaaacgcgacgctaaaaactaaacgaaacgaataacaaaaacaaaaaaaaaataatcgaacgccgaaaccaacactcgaatcgcgcaaaacgaatattaaacaccccaacaaacgcactacgaaaaactaaaatcgcaaaatcccttaccttaacgaactacgaaaatcctacgcgaaacgacccgcgatacacgaaaccgaaacaactaaacgcacaccccgacttcgaaacgcacgcaacctccgaatacactatccgcgtcccaaacgcgcaccccgaaactaacgcaccctaatcgtccgcgacgcgcacaccctccaaacgccctctaaccgacgatctcgaccctaaccccgacgcacccctacgaacacacccaccgcgacgaatacgaaactaaccaaacgccgccaaccgcgacttcgccccgcgtcgccaactaccaacaacgcccgaatccccgccttcgctaaaaaaaaaaaaaaaaactcctaacgcgacgc

SEQ ID NO: 29895 - DNA, 600 bp, Artificial Sequence
  chemically treated genomic DNA (Homo sapiens) CpG-island No: 29895
gtagtttcgttttttttttgtcgtagattttaggttgggaggcgggggcgttaggtcggtttaagttgtcgtagttattgttttaaagggagtcggggacgcggcgttggggattgggcgaggcgggtggtagaggtaagaggagagtggtcgagcgtcggggttaatattcgggtcgcgtagggcgggtgttgaatattttagtagacgtattgcgggggattggggtcgtagagttttttattttggcgagttgcggaagttttgcgcgaggcggttcgcggtgtacggggtcggggtagttaggcgtatatttcggtttcggagcgtacgtaattttcgggtgtattgttcgcgttttaggcgcgtatttcggggttggcgtattttggtcgttcgcggcgcgtatattttttaggcgttttttggtcgacggtttcggttttggtttcggcgtatttttgcgggtatatttatcgcggcggatgcgggattggttaggcgtcgttagtcgcggtttcgtttcgcgtcgttagttgttaatagcgttcgagttttcgttttcgttaggggagaaaaaaaagatttttgacgcggcgt

SEQ ID NO: 29896 - DNA, 600 bp, Artificial Sequence
  chemically treated genomic DNA (Homo sapiens) CpG-island No: 29896
acgccgcgtcaaaaatcttttttttctcccctaacgaaaacgaaaactcgaacgctattaacaactaacgacgcgaaacgaaaccgcgactaacgacgcctaaccaatcccgcatccgccgcgataaatatacccgcaaaaatacgccgaaaccaaaaccgaaaccgtcgaccaaaaaacgcctaaaaaatatacgcgccgcgaacgaccaaaatacgccaaccccgaaatacgcgcctaaaacgcgaacaatacacccgaaaattacgtacgctccgaaaccgaaatatacgcctaactaccccgaccccgtacaccgcgaaccgcctcgcgcaaaacttccgcaactcgccaaaataaaaaactctacgaccccaatcccccgcaatacgtctactaaaatattcaacacccgccctacgcgacccgaatattaaccccgacgctcgaccactctcctcttacctctaccacccgcctcgcccaatccccaacgccgcgtccccgactccctttaaaacaataactacgacaacttaaaccgacctaacgcccccgcctcccaacctaaaatctacgacaaaaaaaaaacgaaactac

SEQ ID NO: 29897 - DNA, 942 bp, Artificial Sequence
  chemically treated genomic DNA (Homo sapiens) CpG-island No: 29897
tcgtggggcggtatttggcgagttggcgggtgggcggcgagtcgaggtttttcggtttggcggtaattcgtttttttgtttttagttttttcggtttcgttttttttttttacgtcgttttgttttttttttacgttttttttttttttttttttttttttttagttcgtttgtttttattttagcggcgttcgtcgggtttttcgtttaatggtcgcggggttcgggatcgtattagttgatcggttcgggtttttggtcgttgggagttaattagggtatcgggggcggtttcgggtcgcggataaagggtgcggggttgttggcggttttgtagagtcgagagtgggagaagagcggagcgtgtgagtagtattgcggttttttttttttttttaatttcgttttcgcggtttagttttattcgttcgtttgttcggcgattaggtaagttttcggacggttcggtgttacgtaagcgaggcgcgtcgtttttgttatttcgcgaggcgcgtcgtttagtttttttttcggttgtttgtttttttagttttagttttacgttgcggttttttcggtttatgtttgagattcggtatgagtgtttttttcgcgtgttttcgtcgttggtggtttggattcgtcggggttggcgttggtggggcgcgtttttggttaggttttgggaagggcggggtgagttgttttgattttttttttattatttgcggtcgaagcgtcgtttttggaggtcgttgggtcggtttgcgttttggggttcgtagtggtttgtttgcgttgtggatggagtggcggtgcggttttttgtggagcgtaaataaggcgtttggttggcgcgggcgtttggttgtttttttcgtggtggggttttcggagtaatcgttttggttttggcgatggttgagacgtttcgattgcggt

SEQ ID NO: 29898 - DNA, 942 bp, Artificial Sequence
  chemically treated genomic DNA (Homo sapiens) CpG-island No: 29898
accgcaatcgaaacgtctcaaccatcgccaaaaccaaaacgattactccgaaaaccccaccacgaaaaaaacaaccaaacgcccgcgccaaccaaacgccttatttacgctccacaaaaaaccgcaccgccactccatccacaacgcaaacaaaccactacgaaccccaaaacgcaaaccgacccaacgacctccaaaaacgacgcttcgaccgcaaataataaaaaaaaaatcaaaacaactcaccccgcccttcccaaaacctaaccaaaaacgcgccccaccaacgccaaccccgacgaatccaaaccaccaacgacgaaaacacgcgaaaaaaacactcataccgaatctcaaacataaaccgaaaaaaccgcaacgtaaaactaaaactaaaaaaacaaacaaccgaaaaaaaaactaaacgacgcgcctcgcgaaataacaaaaacgacgcgcctcgcttacgtaacaccgaaccgtccgaaaacttacctaatcgccgaacaaacgaacgaataaaactaaaccgcgaaaacgaaattaaaaaaaaaaaaaaaaccgcaatactactcacacgctccgctcttctcccactctcgactctacaaaaccgccaacaaccccgcaccctttatccgcgacccgaaaccgcccccgataccctaattaactcccaacgaccaaaaacccgaaccgatcaactaatacgatcccgaaccccgcgaccattaaacgaaaaacccgacgaacgccgctaaaataaaaacaaacgaactaaaaaaaaaaaaaaaaaaaaaaaaaaaacgtaaaaaaaaaacaaaacgacgtaaaaaaaaaaaacgaaaccgaaaaaactaaaaacaaaaaaacgaattaccgccaaaccgaaaaacctcgactcgccgcccacccgccaactcgccaaataccgccccacga

SEQ ID NO: 29899 - DNA, 942 bp, Artificial Sequence
  chemically treated genomic DNA (Homo sapiens) CpG-island No: 29899
gtcgtaatcgaggcgttttaattatcgttagaattaggacgattgtttcgaaggttttattacgaggaaggtagttaggcgttcgcgttaattaagcgttttgtttgcgttttataggggatcgtatcgttattttatttatagcgtaaataaattattgcgagttttagggcgtaggtcggtttaacggtttttaggggcggcgtttcggtcgtaagtagtgaaaagaagattaaaataatttatttcgttttttttagagtttggttaagggcgcgttttattagcgttagtttcgacgggtttaagttattagcggcggaagtacgcgggaggagtatttatgtcggattttaggtatgggtcggagaggtcgtagcgtagggttgggattggaggggtaggtagtcgaaaaaagagttgggcggcgcgtttcgcggggtagtaggggcggcgcgtttcgtttgcgtgatatcgggtcgttcgggggtttatttggtcgtcgagtaggcgggcgggtaaagttaggtcgcgagagcgaggttaggagaggagaggaggtcgtagtattgtttatacgtttcgttttttttttattttcgattttgtagagtcgttagtagtttcgtattttttattcgcggttcggggtcgttttcggtgttttgattggtttttagcggttaggagttcgggtcgattagttgatgcggtttcgggtttcgcggttattgggcgaggagttcggcgggcgtcgttggggtgggggtaagcgaattgggaaagaaagaaagaaagagaaaggggcgtgggggaggggtagggcggcgtgggggaagggagcggagtcgggagggttgagggtagaggggcgagttgtcgttaggtcgggaagtttcggttcgtcgtttattcgttagttcgttaggtgtcgttttacgg

SEQ ID NO: 29900 - DNA, 942 bp, Artificial Sequence
  chemically treated genomic DNA (Homo sapiens) CpG-island No: 29900
ccgtaaaacgacacctaacgaactaacgaataaacgacgaaccgaaacttcccgacctaacgacaactcgcccctctaccctcaaccctcccgactccgctcccttcccccacgccgccctacccctcccccacgcccctttctctttctttctttctttcccaattcgcttacccccaccccaacgacgcccgccgaactcctcgcccaataaccgcgaaacccgaaaccgcatcaactaatcgacccgaactcctaaccgctaaaaaccaatcaaaacaccgaaaacgaccccgaaccgcgaataaaaaatacgaaactactaacgactctacaaaatcgaaaataaaaaaaaaacgaaacgtataaacaatactacgacctcctctcctctcctaacctcgctctcgcgacctaactttacccgcccgcctactcgacgaccaaataaacccccgaacgacccgatatcacgcaaacgaaacgcgccgcccctactaccccgcgaaacgcgccgcccaactcttttttcgactacctacccctccaatcccaaccctacgctacgacctctccgacccatacctaaaatccgacataaatactcctcccgcgtacttccgccgctaataacttaaacccgtcgaaactaacgctaataaaacgcgcccttaaccaaactctaaaaaaaacgaaataaattattttaatcttcttttcactacttacgaccgaaacgccgcccctaaaaaccgttaaaccgacctacgccctaaaactcgcaataatttatttacgctataaataaaataacgatacgatcccctataaaacgcaaacaaaacgcttaattaacgcgaacgcctaactaccttcctcgtaataaaaccttcgaaacaatcgtcctaattctaacgataattaaaacgcctcgattacgac

SEQ ID NO: 29901 - DNA, 697 bp, Artificial Sequence
  chemically treated genomic DNA (Homo sapiens) CpG-island No: 29901
gattttcgcgttttttcgtgtttcgggtcgggttttttacggttggtcgggtttagggcgttttaagtatttcgatttgtcgtttcgggttaggtcggcggggttcgtgtaggggtttcgtggggtcgcgtcgggtaggggtcgttcgggttcgagtacggtatttataaataggttggcgtttcgcgacggagattcgggttcggttcggagtcgttcgggaggtttgaggttaagggtttggtttagcgcgcggtcggagcgggtcgggggcgtagagttgtgcggcggcgtttttcgggtttcgggtttgtgtagggtcggtttttttttgcggggcgaggttgcgggtcgggttgcggtgcggggttttaataaaggatcgaggttttagaagcggtttttacgcgttttttgtttttgcgtggaataaattttatatacgtgtgtgtttttcgagggtttttcgtgtgttgagcgtttgtaaagcggagtcgcgttcggggagacgcgaagtcggtgttcgcggtttatttagggattttagttagatagcggtattcgcggggcgcgtgcgggatttttaggcgatcgggggaagtatcggtaatcgttttttattcgtgtttttttttttacggagaatgttttcgcgcgttcgttgtgtaattaaaaattaatgtgaaatatttattga

SEQ ID NO: 29902 - DNA, 697 bp, Artificial Sequence
  chemically treated genomic DNA (Homo sapiens) CpG-island No: 29902
tcaataaatatttcacattaatttttaattacacaacgaacgcgcgaaaacattctccgtaaaaaaaaaaacacgaataaaaaacgattaccgatacttcccccgatcgcctaaaaatcccgcacgcgccccgcgaataccgctatctaactaaaatccctaaataaaccgcgaacaccgacttcgcgtctccccgaacgcgactccgctttacaaacgctcaacacacgaaaaaccctcgaaaaacacacacgtatataaaatttattccacgcaaaaacaaaaaacgcgtaaaaaccgcttctaaaacctcgatcctttattaaaaccccgcaccgcaacccgacccgcaacctcgccccgcaaaaaaaaaccgaccctacacaaacccgaaacccgaaaaacgccgccgcacaactctacgcccccgacccgctccgaccgcgcgctaaaccaaacccttaacctcaaacctcccgaacgactccgaaccgaacccgaatctccgtcgcgaaacgccaacctatttataaataccgtactcgaacccgaacgacccctacccgacgcgaccccacgaaacccctacacgaaccccgccgacctaacccgaaacgacaaatcgaaatacttaaaacgccctaaacccgaccaaccgtaaaaaacccgacccgaaacacgaaaaaacgcgaaaatc

SEQ ID NO: 29903 - DNA, 697 bp, Artificial Sequence
  chemically treated genomic DNA (Homo sapiens) CpG-island No: 29903
ttaatggatgttttatattaatttttagttgtataacgaacgcgcgggaatatttttcgtgagagaaaaagtacgggtggggggcggttatcggtgtttttttcggtcgtttgggggtttcgtacgcgtttcgcgggtgtcgttgtttggttggggtttttgggtgagtcgcgggtatcggtttcgcgttttttcgggcgcgatttcgttttgtaagcgtttagtatacgggaaattttcggaaaatatatacgtgtgtaaagtttgttttacgtagaaataaaggacgcgtgggggtcgtttttggggtttcggttttttgttggaatttcgtatcgtagttcggttcgtagtttcgtttcgtaaggggaagtcggttttgtataggttcggggttcggaaggcgtcgtcgtatagttttgcgttttcgattcgtttcggtcgcgcgttgggttaggtttttggttttaagtttttcgggcggtttcgggtcggattcgggttttcgtcgcgggacgttagtttgtttgtgggtgtcgtgttcgggttcgggcggtttttgttcgacgcggttttacggagtttttgtacgaatttcgtcgatttggttcggggcggtaagtcgaggtgtttagggcgttttgggttcggttaatcgtggaaaattcggttcggggtacgggggggcgcgggggtt

SEQ ID NO: 29904 - DNA, 697 bp, Artificial Sequence
  chemically treated genomic DNA (Homo sapiens) CpG-island No: 29904
aacccccgcgcccccccgtaccccgaaccgaattttccacgattaaccgaacccaaaacgccctaaacacctcgacttaccgccccgaaccaaatcgacgaaattcgtacaaaaactccgtaaaaccgcgtcgaacaaaaaccgcccgaacccgaacacgacacccacaaacaaactaacgtcccgcgacgaaaacccgaatccgacccgaaaccgcccgaaaaacttaaaaccaaaaacctaacccaacgcgcgaccgaaacgaatcgaaaacgcaaaactatacgacgacgccttccgaaccccgaacctatacaaaaccgacttccccttacgaaacgaaactacgaaccgaactacgatacgaaattccaacaaaaaaccgaaaccccaaaaacgacccccacgcgtcctttatttctacgtaaaacaaactttacacacgtatatattttccgaaaatttcccgtatactaaacgcttacaaaacgaaatcgcgcccgaaaaaacgcgaaaccgatacccgcgactcacccaaaaaccccaaccaaacaacgacacccgcgaaacgcgtacgaaacccccaaacgaccgaaaaaaacaccgataaccgccccccacccgtactttttctctcacgaaaaatattcccgcgcgttcgttatacaactaaaaattaatataaaacatccattaa

SEQ ID NO: 29905 - DNA, 550 bp, Artificial Sequence
  chemically treated genomic DNA (Homo sapiens) CpG-island No: 29905
tttcgttcgtttttagggtttggacgtttcgggttgggtttcgttaagtttttcgggtcgtttaggcgtcggattttcgttttcggagttttcgcgcgcgtttattttgggtttgtcgaaggcgggcgtttgggttatggtgttttcgtgcgtttcggcgttgtttttttcgtcgtcgttcggtgggtttttgtcggttcggtggtcgttcggttttttttggggttagcggtggtcgcggtcggttacgttttttttaacgggtcgggtttcgtttttcgtttcgttcgtcgtcgttttcggggttcgttttttcgtcggagttttcgtttcgttcgtcggtttggatcgcgtattttttggaattttggattcggcgttttcgttcgtcgattcgaaaattacggtttcgcggcgttcgatcggatttatttgtgggcgcgcgttttagtcgtttcgttgggcgttgtttttttttcggtttttttagtaatttttaagcgtttttttgtagtttgggcgttgttgtgcgttaggtttaagttagaag

SEQ ID NO: 29906 - DNA, 550 bp, Artificial Sequence
  chemically treated genomic DNA (Homo sapiens) CpG-island No: 29906
cttctaacttaaacctaacgcacaacaacgcccaaactacaaaaaaacgcttaaaaattactaaaaaaaccgaaaaaaaaacaacgcccaacgaaacgactaaaacgcgcgcccacaaataaatccgatcgaacgccgcgaaaccgtaattttcgaatcgacgaacgaaaacgccgaatccaaaattccaaaaaatacgcgatccaaaccgacgaacgaaacgaaaactccgacgaaaaaacgaaccccgaaaacgacgacgaacgaaacgaaaaacgaaacccgacccgttaaaaaaaacgtaaccgaccgcgaccaccgctaaccccaaaaaaaaccgaacgaccaccgaaccgacaaaaacccaccgaacgacgacgaaaaaaacaacgccgaaacgcacgaaaacaccataacccaaacgcccgccttcgacaaacccaaaataaacgcgcgcgaaaactccgaaaacgaaaatccgacgcctaaacgacccgaaaaacttaacgaaacccaacccgaaacgtccaaaccctaaaaacgaacgaaa

SEQ ID NO: 29907 - DNA, 550 bp, Artificial Sequence
  chemically treated genomic DNA (Homo sapiens) CpG-island No: 29907
tttttagtttgggtttggcgtatagtagcgtttagattgtagggggacgtttgaaagttgttggaggagtcggggggaaggtagcgtttagcgaggcggttggagcgcgcgtttataggtgggttcggtcgggcgtcgcggggtcgtagttttcgggtcggcgggcgaggacgtcgggtttagaattttaggaaatgcgcgatttaggtcggcgggcggggcgggggtttcggcgagagggcgggtttcgggaacggcggcgggcggggcgggaggcggggttcggttcgttaagaagagcgtggtcggtcgcggttatcgttggttttagggaaagtcgagcggttatcgagtcggtagagatttatcgagcggcggcggagggagtagcgtcggggcgtacgagggtattatggtttagacgttcgttttcgataagtttaaagtgagcgcgcgcgggggtttcggggacgggggttcggcgtttgggcggttcgaggggtttagcggggtttagttcggggcgtttaaattttgggaacgaacgggg

SEQ ID NO: 29908 - DNA, 550 bp, Artificial Sequence
  chemically treated genomic DNA (Homo sapiens) CpG-island No: 29908
ccccgttcgttcccaaaatttaaacgccccgaactaaaccccgctaaacccctcgaaccgcccaaacgccgaacccccgtccccgaaacccccgcgcgcgctcactttaaacttatcgaaaacgaacgtctaaaccataataccctcgtacgccccgacgctactccctccgccgccgctcgataaatctctaccgactcgataaccgctcgactttccctaaaaccaacgataaccgcgaccgaccacgctcttcttaacgaaccgaaccccgcctcccgccccgcccgccgccgttcccgaaacccgccctctcgccgaaacccccgccccgcccgccgacctaaatcgcgcatttcctaaaattctaaacccgacgtcctcgcccgccgacccgaaaactacgaccccgcgacgcccgaccgaacccacctataaacgcgcgctccaaccgcctcgctaaacgctaccttccccccgactcctccaacaactttcaaacgtccccctacaatctaaacgctactatacgccaaacccaaactaaaaa

SEQ ID NO: 29909 - DNA, 738 bp, Artificial Sequence
  chemically treated genomic DNA (Homo sapiens) CpG-island No: 29909
gtgtgtgttggggggcgtcgcgtttcgcgttcgtcgttattggggattcgggcgtaggtaggttgtttcgggcgtagagcgcgtcgtttttagtttttttggcgggttcggttcggtagggtttttggcggttttcggaggcgggtttttttgtttttgattttcgttgggcgcgaaggtcgtcggcggttaatagaaattcgagttcgcgtaacggagtttaggtttttacgtgcggtttcgtagggtagagtaggaaggagcggttgtagtttcggggcgtttcgtaagtatttagtgttcggtttttttagtttcgcggcgggtttcggacggtggagtgagatattagaattcgtttttcgttttttcgagtcgatgtacggtttgggatggcgtcgttcgttttaagtagcgtggtttgagggcgagaagacgtttattggagcgtttttttttatttagattttcgaagacgcgcgttcgagtcgaagtcggggatagagaaggttttttggcgtttttttgtcgattgttttgcggtcgtcgggattcgagtagcggggcgggatttaaatatagttttaatttaaagatgtttagtagaacgttttaaataaaatagaaacggtggtcgtatttgcgtgtgtgtgtgtgtgtgtgtgtgtgacgggggagaggagttgattttatttgaaatatagtttgcgtttttgtgtgtgtggtcgaagaatggaa

SEQ ID NO: 29910 - DNA, 738 bp, Artificial Sequence
  chemically treated genomic DNA (Homo sapiens) CpG-island No: 29910
ttccattcttcgaccacacacacaaaaacgcaaactatatttcaaataaaatcaactcctctcccccgtcacacacacacacacacacacacacgcaaatacgaccaccgtttctattttatttaaaacgttctactaaacatctttaaattaaaactatatttaaatcccgccccgctactcgaatcccgacgaccgcaaaacaatcgacaaaaaaacgccaaaaaaccttctctatccccgacttcgactcgaacgcgcgtcttcgaaaatctaaataaaaaaaaacgctccaataaacgtcttctcgccctcaaaccacgctacttaaaacgaacgacgccatcccaaaccgtacatcgactcgaaaaaacgaaaaacgaattctaatatctcactccaccgtccgaaacccgccgcgaaactaaaaaaaccgaacactaaatacttacgaaacgccccgaaactacaaccgctccttcctactctaccctacgaaaccgcacgtaaaaacctaaactccgttacgcgaactcgaatttctattaaccgccgacgaccttcgcgcccaacgaaaatcaaaaacaaaaaaacccgcctccgaaaaccgccaaaaaccctaccgaaccgaacccgccaaaaaaactaaaaacgacgcgctctacgcccgaaacaacctacctacgcccgaatccccaataacgacgaacgcgaaacgcgacgccccccaacacacac

SEQ ID NO: 29911 - DNA, 738 bp, Artificial Sequence
  chemically treated genomic DNA (Homo sapiens) CpG-island No: 29911
ttttatttttcggttatatatatagaagcgtaaattatgttttaggtaagattaatttttttttttcgttatatatatatatatatatatatacgtagatgcggttatcgtttttgttttgtttggagcgttttgttgggtatttttgggttggggttatgtttaggtttcgtttcgttgttcgggtttcggcggtcgtaaagtagtcggtaggggggcgttagagaattttttttgttttcgatttcgattcgggcgcgcgttttcgggagtttgggtggaggggagcgttttagtaggcgttttttcgtttttaaattacgttgtttaggacgagcggcgttattttaagtcgtgtatcggttcggggaagcgaaaggcgagttttggtgttttattttatcgttcgaagttcgtcgcggagttgggagggtcgggtattggatgtttgcggggcgtttcggggttgtagtcgtttttttttgttttgttttgcggggtcgtacgtggaagtttgagtttcgttgcgcgggttcgggtttttgttagtcgtcggcggttttcgcgtttagcgggagttagggataaagaaattcgttttcgggggtcgttaggggttttgtcgggtcgggttcgttagagagattggaggcggcgcgttttgcgttcgggatagtttgtttgcgttcggatttttagtggcggcgggcgcggagcgcggcgttttttaatatatat

SEQ ID NO: 29912 - DNA, 738 bp, Artificial Sequence
  chemically treated genomic DNA (Homo sapiens) CpG-island No: 29912
atatatattaaaaaacgccgcgctccgcgcccgccgccactaaaaatccgaacgcaaacaaactatcccgaacgcaaaacgcgccgcctccaatctctctaacgaacccgacccgacaaaacccctaacgacccccgaaaacgaatttctttatccctaactcccgctaaacgcgaaaaccgccgacgactaacaaaaacccgaacccgcgcaacgaaactcaaacttccacgtacgaccccgcaaaacaaaacaaaaaaaaacgactacaaccccgaaacgccccgcaaacatccaatacccgaccctcccaactccgcgacgaacttcgaacgataaaataaaacaccaaaactcgcctttcgcttccccgaaccgatacacgacttaaaataacgccgctcgtcctaaacaacgtaatttaaaaacgaaaaaacgcctactaaaacgctcccctccacccaaactcccgaaaacgcgcgcccgaatcgaaatcgaaaacaaaaaaaattctctaacgcccccctaccgactactttacgaccgccgaaacccgaacaacgaaacgaaacctaaacataaccccaacccaaaaatacccaacaaaacgctccaaacaaaacaaaaacgataaccgcatctacgtatatatatatatatatatatataacgaaaaaaaaaaattaatcttacctaaaacataatttacgcttctatatatataaccgaaaaataaaa

SEQ ID NO: 29913 - DNA, 751 bp, Artificial Sequence
  chemically treated genomic DNA (Homo sapiens) CpG-island No: 29913
gacggattcgattagcgtattacggcgttttagggtttttttatcgttttcggttttcggtttttcgtttttcggttatcgcgcgggtttcgtcgtttttgggacgcgtattggtttcggttcggcgttattttttgtttttttgttatttcgtacggaggtttttattatttaagtcgcgtttagtcgtcgtcgcgtcgttttaggaggttttcgttttttttttatttcgtttcgtaggttatacggcgtttcggtttcgcgcgcgggttgtttttcggcggcgtttttttttcgcgagttagtagaggcggttagcggtcgggtatttgcgtttagtggcggttcgtatagcgcgagtgcggtcgagagtaatgcgataacgatcgcgtcggcgacggtagtttcggttttcgcgcgtgtgattattttcgggttaaatggaatcgattttatttcgtttgtaagttcggattgttttatagcgaggatttagggttatcgggtagtatttcggatttttagttgttttcgcgtcgtcgtcggaaatatagttattggaagcgtttttcggtttttcgatcgttttcgcgcggttgtcggtagtgggattttaattcgtttaattatattcggttttagatgattgataagcgcgacgtttaattcggtttggttttagttttggtttaagaggttcggttggaaggtaggttgaagagttaataacgatttggtttagggtttggtt

SEQ ID NO: 29914 - DNA, 751 bp, Artificial Sequence
  chemically treated genomic DNA (Homo sapiens) CpG-island No: 29914
aaccaaaccctaaaccaaatcgttattaactcttcaacctaccttccaaccgaacctcttaaaccaaaactaaaaccaaaccgaattaaacgtcgcgcttatcaatcatctaaaaccgaatataattaaacgaattaaaatcccactaccgacaaccgcgcgaaaacgatcgaaaaaccgaaaaacgcttccaataactatatttccgacgacgacgcgaaaacaactaaaaatccgaaatactacccgataaccctaaatcctcgctataaaacaatccgaacttacaaacgaaataaaatcgattccatttaacccgaaaataatcacacgcgcgaaaaccgaaactaccgtcgccgacgcgatcgttatcgcattactctcgaccgcactcgcgctatacgaaccgccactaaacgcaaatacccgaccgctaaccgcctctactaactcgcgaaaaaaaaacgccgccgaaaaacaacccgcgcgcgaaaccgaaacgccgtataacctacgaaacgaaataaaaaaaaaacgaaaacctcctaaaacgacgcgacgacgactaaacgcgacttaaataataaaaacctccgtacgaaataacaaaaaaacaaaaaataacgccgaaccgaaaccaatacgcgtcccaaaaacgacgaaacccgcgcgataaccgaaaaacgaaaaaccgaaaaccgaaaacgataaaaaaaccctaaaacgccgtaatacgctaatcgaatccgtc

SEQ ID NO: 29915 - DNA, 751 bp, Artificial Sequence
  chemically treated genomic DNA (Homo sapiens) CpG-island No: 29915
aattagattttgaattagatcgttgttaattttttaatttgttttttagtcgaattttttaggttagagttgggattaggtcgggttgggcgtcgcgtttgttaattatttagaatcgggtgtgattgagcgagttgggattttattgtcgatagtcgcgcggaggcggtcgggaaatcggaaaacgtttttaatggttgtgttttcggcgacggcgcgggggtagttgggaattcggaatgttgttcgatggttttgggttttcgttgtggggtaattcgggtttgtagacgaggtaaggtcgattttatttggttcggggatggttatacgcgcgggggtcggaattgtcgtcgtcggcgcggtcgttgtcgtattgttttcggtcgtattcgcgttgtacgggtcgttattggacgtaggtattcgatcgttgatcgtttttgttggttcgcgggggggaagcgtcgtcgaggggtagttcgcgcgcggggtcggggcgtcgtgtggtttgcggggcggagtagggagaggacggaggttttttggaacggcgcggcgacggttgggcgcggtttgggtgatgggagttttcgtgcggggtgatagaggggtagagggtggcgtcgggtcggagttagtgcgcgttttaggagcggcggagttcgcgcggtggtcggggaacggggggtcgagggtcgaggacggtaggagggttttggggcgtcgtggtgcgttggtcggattcgtt

SEQ ID NO: 29916 - DNA, 751 bp, Artificial Sequence
  chemically treated genomic DNA (Homo sapiens) CpG-island No: 29916
aacgaatccgaccaacgcaccacgacgccccaaaaccctcctaccgtcctcgaccctcgaccccccgttccccgaccaccgcgcgaactccgccgctcctaaaacgcgcactaactccgacccgacgccaccctctacccctctatcaccccgcacgaaaactcccatcacccaaaccgcgcccaaccgtcgccgcgccgttccaaaaaacctccgtcctctccctactccgccccgcaaaccacacgacgccccgaccccgcgcgcgaactacccctcgacgacgcttcccccccgcgaaccaacaaaaacgatcaacgatcgaatacctacgtccaataacgacccgtacaacgcgaatacgaccgaaaacaatacgacaacgaccgcgccgacgacgacaattccgacccccgcgcgtataaccatccccgaaccaaataaaatcgaccttacctcgtctacaaacccgaattaccccacaacgaaaacccaaaaccatcgaacaacattccgaattcccaactacccccgcgccgtcgccgaaaacacaaccattaaaaacgttttccgatttcccgaccgcctccgcgcgactatcgacaataaaatcccaactcgctcaatcacacccgattctaaataattaacaaacgcgacgcccaacccgacctaatcccaactctaacctaaaaaattcgactaaaaaacaaattaaaaaattaacaacgatctaattcaaaatctaatt

SEQ ID NO: 29917 - DNA, 674 bp, Artificial Sequence
  chemically treated genomic DNA (Homo sapiens) CpG-island No: 29917
  unsure (13)
atttttagcgttntcgcgtttttttttcgaggttggtcggttcgtgcgttttgggcgtagttggaggagcggatttcggattcgtcgggattcggattttcgtgaacgtttcgggattttcgttttcggacgttcgggagtttaagagaggaagcgcgtgtgcgcgttcgggaaggagttgggtgtagagtacggagtttacgtcgggggttcggatcgcggcggtttcgtttcgtttcgttttcgttttcgttttcgggtttttttatcgtcgcggtttcgttttattttttttcgtttatcgttttcgtttcgtttttgttggatttcgtcgtttcgtaagtattcgagttttttagtcgaggttcgggattgttgtagggtggaaaatgaaagttttgagagtatttttcgttttttcgtttttgtatagtcggggttgcggtgcgaggagtttggtcgcggggttcgaacgaggcgaaggggtcggggtttttggggaattttttttttttttttatttttttttaggtaaaattcgtgttttttttacgttcgatttagcgtttttttagttgcggtcgatttgttttttcgcgtgtaagtatagttatttttaaggttattgaaaaagtttgttttaaatgagcgtttgcggaattcgttttgaggtt

SEQ ID NO: 29918 - DNA, 674 bp, Artificial Sequence
  chemically treated genomic DNA (Homo sapiens) CpG-island No: 29918
  unsure (662)
aacctcaaaacgaattccgcaaacgctcatttaaaacaaactttttcaataaccttaaaaataactatacttacacgcgaaaaaacaaatcgaccgcaactaaaaaaacgctaaatcgaacgtaaaaaaaacacgaattttacctaaaaaaaaataaaaaaaaaaaaaaaattccccaaaaaccccgaccccttcgcctcgttcgaaccccgcgaccaaactcctcgcaccgcaaccccgactatacaaaaacgaaaaaacgaaaaatactctcaaaactttcattttccaccctacaacaatcccgaacctcgactaaaaaactcgaatacttacgaaacgacgaaatccaacaaaaacgaaacgaaaacgataaacgaaaaaaaataaaacgaaaccgcgacgataaaaaaacccgaaaacgaaaacgaaaacgaaacgaaacgaaaccgccgcgatccgaacccccgacgtaaactccgtactctacacccaactccttcccgaacgcgcacacgcgcttcctctcttaaactcccgaacgtccgaaaacgaaaatcccgaaacgttcacgaaaatccgaatcccgacgaatccgaaatccgctcctccaactacgcccaaaacgcacgaaccgaccaacctcgaaaaaaaaacgcganaacgctaaaaat

SEQ ID NO: 29919 - DNA, 674 bp, Artificial Sequence
  chemically treated genomic DNA (Homo sapiens) CpG-island No: 29919
  unsure (662)
agttttaggacgagtttcgtagacgtttatttaaagtaaatttttttaatgattttgagggtggttgtatttatacgcggagaagtaaatcgatcgtagttggaaaggcgttgggtcgagcgtgagaggaatacgggttttatttaagggagagtggaagagagaagggggttttttaagggtttcggttttttcgtttcgttcgggtttcgcggttaagtttttcgtatcgtagtttcggttgtgtagaagcggaggggcggaaggtgtttttagaatttttattttttattttgtagtagtttcgagtttcggttggagaattcggatgtttgcgaaacggcgaggtttagtaggggcgggacgggggcggtgggcggaggaggatagggcggggtcgcggcggtgaaagggttcgggggcgggggcgggggcggggcgaggcgaggtcgtcgcggttcgggttttcgacgtgggtttcgtgttttgtatttagttttttttcgggcgcgtatacgcgtttttttttttgagttttcgggcgttcggaggcgaaggtttcggagcgtttacgagaattcgggtttcggcgagttcggggttcgtttttttagttgcgtttagggcgtacgagtcggttagtttcggggagagggcgcggnggcgttgggggt

SEQ ID NO: 29920 - DNA, 674 bp, Artificial Sequence
  chemically treated genomic DNA (Homo sapiens) CpG-island No: 29920
  unsure (13)
acccccaacgccnccgcgccctctccccgaaactaaccgactcgtacgccctaaacgcaactaaaaaaacgaaccccgaactcgccgaaacccgaattctcgtaaacgctccgaaaccttcgcctccgaacgcccgaaaactcaaaaaaaaaaacgcgtatacgcgcccgaaaaaaaactaaatacaaaacacgaaacccacgtcgaaaacccgaaccgcgacgacctcgcctcgccccgcccccgcccccgcccccgaaccctttcaccgccgcgaccccgccctatcctcctccgcccaccgcccccgtcccgcccctactaaacctcgccgtttcgcaaacatccgaattctccaaccgaaactcgaaactactacaaaataaaaaataaaaattctaaaaacaccttccgcccctccgcttctacacaaccgaaactacgatacgaaaaacttaaccgcgaaacccgaacgaaacgaaaaaaccgaaacccttaaaaaacccccttctctcttccactctcccttaaataaaacccgtattcctctcacgctcgacccaacgcctttccaactacgatcgatttacttctccgcgtataaatacaaccaccctcaaaatcattaaaaaaatttactttaaataaacgtctacgaaactcgtcctaaaact

SEQ ID NO: 29921 - DNA, 1190 bp, Artificial Sequence
  chemically treated genomic DNA (Homo sapiens) CpG-island No: 29921
atcggtttttaacgtattatgttagggagttaagcgttttgttcggtcgtaagtacgtgtttcggatttcgattcgcggtacgtcggcggtagcgagaagtttggggtatagtcggagcgattttttaaagaattttggggatggggagggtgaagtttgtagagcgcgttgtatttttgaaattcggtgtgtttcggagtcggggattcgtacgttttatttcgcgtagcgtgcgttcgggtcggcggggcggttagggatgagcggggtagtttttttttttcgggttgcgcgtcgggttatttttttttttttttttttttttttttttttttcgtttttttttttttttcgagtttgcggttttgttaattagtttttagcgcgagtcgtcgtagcgtttcgttagtaggatttgatgcgtatttatattagtcgttcgagcgtaggaattcggatcgattcgcgtcgtcgagtttatttttaattagtatcgtcgggattcggatggtgcgcgtatcgtcggttagaaatattttattagcgttgttttttatttttcgatttttttttttcgatatttttttttttatgtgggaggggaaattttttttttatatattttcgagtttttttcgggtcgggaagcgcggagatgacggcgttcgttttttcgtcgtcgttttaaggtattcgggggtgtttgttcggggtgttcgcgcgggggtgtttgttcggggttgttcggtgggagtattcgtcgcgttttgttttgcggattttgaatttttcgggcggacggcgtcggtcgggagggggtcgcgggtagtttcgcgttttcgcgggttttcggttggcggtcgtggttacgtcgattatcgtttcggggggtttggggaggaggggatcgggttttagtcgtgcgggtacgtattgttttttcgttttttcgttggcggggtgagtgttttcgtgggagttttcggtgtggagttagtttgtttcgcgggcggggggggtggggggttcggcgtcgttacgagtataggaaggaggtcgggagtattcgaggcggggtcggtcgtcggggttcgtttcgtcgtttagttgtggagcgcgttcggaaatttttgttcgtcgttcgttggattagttttttacgagttttggggttttttttttttttttt

SEQ ID NO: 29922 - DNA, 1190 bp, Artificial Sequence
  chemically treated genomic DNA (Homo sapiens) CpG-island No: 29922
aaaaaaaaaaaaaaaaaccccaaaactcgtaaaaaactaatccaacgaacgacgaacaaaaatttccgaacgcgctccacaactaaacgacgaaacgaaccccgacgaccgaccccgcctcgaatactcccgacctccttcctatactcgtaacgacgccgaaccccccaccccccccgcccgcgaaacaaactaactccacaccgaaaactcccacgaaaacactcaccccgccaacgaaaaaacgaaaaaacaatacgtacccgcacgactaaaacccgatcccctcctccccaaaccccccgaaacgataatcgacgtaaccacgaccgccaaccgaaaacccgcgaaaacgcgaaactacccgcgaccccctcccgaccgacgccgtccgcccgaaaaattcaaaatccgcaaaacaaaacgcgacgaatactcccaccgaacaaccccgaacaaacacccccgcgcgaacaccccgaacaaacacccccgaataccttaaaacgacgacgaaaaaacgaacgccgtcatctccgcgcttcccgacccgaaaaaaactcgaaaatatataaaaaaaaaatttcccctcccacataaaaaaaaaaatatcgaaaaaaaaaaatcgaaaaataaaaaacaacgctaataaaatatttctaaccgacgatacgcgcaccatccgaatcccgacgatactaattaaaaataaactcgacgacgcgaatcgatccgaattcctacgctcgaacgactaatataaatacgcatcaaatcctactaacgaaacgctacgacgactcgcgctaaaaactaattaacaaaaccgcaaactcgaaaaaaaaaaaaaaacgaaaaaaaaaaaaaaaaaaaaaaaaaaaaaaaaataacccgacgcgcaacccgaaaaaaaaaaactaccccgctcatccctaaccgccccgccgacccgaacgcacgctacgcgaaataaaacgtacgaatccccgactccgaaacacaccgaatttcaaaaatacaacgcgctctacaaacttcaccctccccatccccaaaattctttaaaaaatcgctccgactataccccaaacttctcgctaccgccgacgtaccgcgaatcgaaatccgaaacacgtacttacgaccgaacaaaacgcttaactccctaacataatacgttaaaaaccgat

SEQ ID NO: 29923 - DNA, 1190 bp, Artificial Sequence
  chemically treated genomic DNA (Homo sapiens) CpG-island No: 29923
gggaggaggaagggaagttttagaattcgtgaaaaattggtttagcgggcggcggataaaagttttcgagcgcgttttatagttgggcggcggagcgggtttcggcggtcggtttcgtttcggatgttttcggttttttttttgtgttcgtgacggcgtcgagttttttatttttttcgttcgcgaggtaggttagttttatatcgagggtttttacgaaaatatttatttcgttaacggaagggcgagggaataatacgtgttcgtacggttagggttcggtttttttttttttaggtttttcggggcggtggtcggcgtgattacgatcgttagtcgggaattcgcgagggcgcggggttgttcgcggttttttttcggtcggcgtcgttcgttcgggaggtttaaagttcgtagagtagggcgcggcggatgtttttatcgagtagtttcgagtaggtattttcgcgcgagtatttcgggtaggtattttcggatattttagggcggcggcgggagggcgggcgtcgttattttcgcgtttttcggttcgagaaggattcgaaagtatgtaggagaaaagtttttttttttatatgggagggaggatgtcgagggagagaggtcgaaagatggagagtagcgttggtaagatgtttttggtcggcggtgcgcgtattattcgagtttcggcggtgttggttaaaaataaattcggcggcgcgggtcggttcggatttttgcgttcggacggttaatatggatgcgtattaggttttgttggcggggcgttgcgacggttcgcgttgggagttggttggtagagtcgtaggttcgggaaagggaaaagagcggaggaaggggaggaggaggaggaggaggaggaatggttcggcgcgtagttcgaggggagagggttgtttcgtttatttttggtcgtttcgtcggttcgagcgtacgttgcgcggagtggggcgtgcgggttttcggtttcgggatatatcgagttttaaaagtataacgcgttttgtagattttattttttttatttttaaagttttttaaaaggtcgtttcggttgtgttttagatttttcgttgtcgtcggcgtatcgcgagtcggaattcggggtacgtatttacggtcgggtaggacgtttggttttttggtatgatgcgttggggatcggt

SEQ ID NO: 29924 - DNA, 1190 bp, Artificial Sequence
  chemically treated genomic DNA (Homo sapiens) CpG-island No: 29924
accgatccccaacgcatcataccaaaaaaccaaacgtcctacccgaccgtaaatacgtaccccgaattccgactcgcgatacgccgacgacaacgaaaaatctaaaacacaaccgaaacgaccttttaaaaaactttaaaaataaaaaaaataaaatctacaaaacgcgttatacttttaaaactcgatatatcccgaaaccgaaaacccgcacgccccactccgcgcaacgtacgctcgaaccgacgaaacgaccaaaaataaacgaaacaaccctctcccctcgaactacgcgccgaaccattcctcctcctcctcctcctcctccccttcctccgctcttttccctttcccgaacctacgactctaccaaccaactcccaacgcgaaccgtcgcaacgccccgccaacaaaacctaatacgcatccatattaaccgtccgaacgcaaaaatccgaaccgacccgcgccgccgaatttatttttaaccaacaccgccgaaactcgaataatacgcgcaccgccgaccaaaaacatcttaccaacgctactctccatctttcgacctctctccctcgacatcctccctcccatataaaaaaaaaaacttttctcctacatactttcgaatccttctcgaaccgaaaaacgcgaaaataacgacgcccgccctcccgccgccgccctaaaatatccgaaaatacctacccgaaatactcgcgcgaaaatacctactcgaaactactcgataaaaacatccgccgcgccctactctacgaactttaaacctcccgaacgaacgacgccgaccgaaaaaaaaccgcgaacaaccccgcgccctcgcgaattcccgactaacgatcgtaatcacgccgaccaccgccccgaaaaacctaaaaaaaaaaaaaccgaaccctaaccgtacgaacacgtattattccctcgcccttccgttaacgaaataaatattttcgtaaaaaccctcgatataaaactaacctacctcgcgaacgaaaaaaataaaaaactcgacgccgtcacgaacacaaaaaaaaaaccgaaaacatccgaaacgaaaccgaccgccgaaacccgctccgccgcccaactataaaacgcgctcgaaaacttttatccgccgcccgctaaaccaatttttcacgaattctaaaacttcccttcctcctccc

SEQ ID NO: 29925 - DNA, 705 bp, Artificial Sequence
  chemically treated genomic DNA (Homo sapiens) CpG-island No: 29925
tttcgcgcggttttagttatcgtggtgattcgttttgcgtcgtagagggagtatagttcggcgaggggtaggcgggaggacggcgcgggttatttcggggtcggaggttatagtgaggtttttacgtaggagtcgtggcggtgtagcggtcggtggttgtggtttagatattttttttgtcggtggacgatgaggatcggaaagtagagggcgtcgtggtagggcggcggcggttcggtttttttttcgtcgtcgttttcgtcgttttttatgttggtttggttggatagtcgcgtttgtttcgtggggtagttggtttcgttgacgttttcgttgcggttgcgttataggtagttgcgtcgggagtcgtagagacggtttagcgagaagcggttgttttcgtagttcgcgtttttatcgggtttcgggtcggttcgcgggttggcgtagatgtttagggcgttgcgcgagaagatagacgagttgttgacggcgcgttggtagtgttcgtagttgcgtcggtagggagttacgttcgtcgcgttcgggtcgtttattttatcgtagcggtacgagggcgcgtagtcgtcgtttgtttcgtcgtagcgcgtttcgagtttcgttaggtttatgagtatcgttttagagtagttgggtattagttgttggttggagcggatgtgttattcgagtttcgtgttgttt

SEQ ID NO: 29926 - DNA, 705 bp, Artificial Sequence
  chemically treated genomic DNA (Homo sapiens) CpG-island No: 29926
aaacaacacgaaactcgaataacacatccgctccaaccaacaactaatacccaactactctaaaacgatactcataaacctaacgaaactcgaaacgcgctacgacgaaacaaacgacgactacgcgccctcgtaccgctacgataaaataaacgacccgaacgcgacgaacgtaactccctaccgacgcaactacgaacactaccaacgcgccgtcaacaactcgtctatcttctcgcgcaacgccctaaacatctacgccaacccgcgaaccgacccgaaacccgataaaaacgcgaactacgaaaacaaccgcttctcgctaaaccgtctctacgactcccgacgcaactacctataacgcaaccgcaacgaaaacgtcaacgaaaccaactaccccacgaaacaaacgcgactatccaaccaaaccaacataaaaaacgacgaaaacgacgacgaaaaaaaaaccgaaccgccgccgccctaccacgacgccctctactttccgatcctcatcgtccaccgacaaaaaaaatatctaaaccacaaccaccgaccgctacaccgccacgactcctacgtaaaaacctcactataacctccgaccccgaaataacccgcgccgtcctcccgcctacccctcgccgaactatactccctctacgacgcaaaacgaatcaccacgataactaaaaccgcgcgaaa

SEQ ID NO: 29927 - DNA, 705 bp, Artificial Sequence
  chemically treated genomic DNA (Homo sapiens) CpG-island No: 29927
agatagtacggagttcgagtggtatattcgttttaattagtagttggtgtttagttattttgaggcggtgtttatggatttggcggggttcgggacgcgttgcggcggggtaggcggcggttacgcgttttcgtgtcgttacggtggggtaggcggttcgggcgcggcgggcgtggttttttatcggcgtagttgcgagtattgttagcgcgtcgttagtagttcgtttattttttcgcgtagcgttttaagtatttgcgttagttcgcgggtcggttcggggttcggtgggggcgcgggttgcgggggtagtcgtttttcgttgggtcgtttttacggttttcggcgtagttgtttgtggcgtagtcgtagcgggagcgttaacgaggttagttgttttacggagtagacgcggttgtttagttaggttagtatgggggacgacgaggacgacgacgaggaggaggtcgggtcgtcgtcgttttattacgacgttttttatttttcggtttttatcgtttatcggtaggaggggtgtttgggttatagttatcggtcgttgtatcgttacggtttttgcgtagagattttattgtgattttcggtttcggagtggttcgcgtcgttttttcgtttgtttttcgtcggattgtgttttttttgcgacgtagggcgagttattacggtgattgaggtcgcgcgggg

SEQ ID NO: 29928 - DNA, 705 bp, Artificial Sequence
  chemically treated genomic DNA (Homo sapiens) CpG-island No: 29928
ccccgcgcgacctcaatcaccgtaataactcgccctacgtcgcaaaaaaaacacaatccgacgaaaaacaaacgaaaaaacgacgcgaaccactccgaaaccgaaaatcacaataaaatctctacgcaaaaaccgtaacgatacaacgaccgataactataacccaaacacccctcctaccgataaacgataaaaaccgaaaaataaaaaacgtcgtaataaaacgacgacgacccgacctcctcctcgtcgtcgtcctcgtcgtcccccatactaacctaactaaacaaccgcgtctactccgtaaaacaactaacctcgttaacgctcccgctacgactacgccacaaacaactacgccgaaaaccgtaaaaacgacccaacgaaaaacgactacccccgcaacccgcgcccccaccgaaccccgaaccgacccgcgaactaacgcaaatacttaaaacgctacgcgaaaaaataaacgaactactaacgacgcgctaacaatactcgcaactacgccgataaaaaaccacgcccgccgcgcccgaaccgcctaccccaccgtaacgacacgaaaacgcgtaaccgccgcctaccccgccgcaacgcgtcccgaaccccgccaaatccataaacaccgcctcaaaataactaaacaccaactactaattaaaacgaatataccactcgaactccgtactatct

SEQ ID NO: 29929 - DNA, 525 bp, Artificial Sequence
  chemically treated genomic DNA (Homo sapiens) CpG-island No: 29929
tagtgcgcgtaggtcgtgcggtattcggttagtattcgtagcggttacgatagcgtgagtagcgtcgcggtttagaaggtcgacgagtaggcgtattagggcggtcgggtcgggttcgggaaggttattatgaatttacggaagtttacgtttttgaggtgtatgttttcgcgtgtttttatgtagtcgtttaggttttcgttttttgcgaagaagcgcgcgcgttggtataggtacgcgttttcggtttttacgttggcgaaattgaagtatttggtgaagcgtagtcgcgtggtcggcgcgttttttagttttattagcgttttggatacgtcgcgaacgtcgtagcgcgcgtagtcgaatttagttttcgttacgtgcgtgttgacgcgttcgtggtagatttgcggcgcggggggtaggcggcggggtcgcggggagttcgttattggtgttcgtttttgtttatttattttttttcgttttatttgtgttttggttgtttggtcggattttaagtttgtt

SEQ ID NO: 29930 - DNA, 525 bp, Artificial Sequence
  chemically treated genomic DNA (Homo sapiens) CpG-island No: 29930
aacaaacttaaaatccgaccaaacaaccaaaacacaaataaaacgaaaaaaaataaataaacaaaaacgaacaccaataacgaactccccgcgaccccgccgcctaccccccgcgccgcaaatctaccacgaacgcgtcaacacgcacgtaacgaaaactaaattcgactacgcgcgctacgacgttcgcgacgtatccaaaacgctaataaaactaaaaaacgcgccgaccacgcgactacgcttcaccaaatacttcaatttcgccaacgtaaaaaccgaaaacgcgtacctataccaacgcgcgcgcttcttcgcaaaaaacgaaaacctaaacgactacataaaaacacgcgaaaacatacacctcaaaaacgtaaacttccgtaaattcataataaccttcccgaacccgacccgaccgccctaatacgcctactcgtcgaccttctaaaccgcgacgctactcacgctatcgtaaccgctacgaatactaaccgaataccgcacgacctacgcgcacta

SEQ ID NO: 29931 - DNA, 525 bp, Artificial Sequence
  chemically treated genomic DNA (Homo sapiens) CpG-island No: 29931
gatagatttagggttcgattaggtaattagagtatagatggggcgggaaagggtgagtgggtagaagcgggtattaatgacgggtttttcgcgatttcgtcgtttgtttttcgcgtcgtaggtttattacgaacgcgttaatacgtacgtggcggaggttgagttcgattacgcgcgttgcggcgttcgcgacgtgtttaagacgttggtggggttggagggcgcgtcggttacgcggttgcgttttattaagtgttttagtttcgttagcgtggaggtcgagaacgcgtatttgtgttagcgcgcgcgttttttcgtagagaacgagggtttagacgattatatggaggtacgcgagggtatgtattttaagaacgtggattttcgtgagtttatggtggttttttcggattcggttcggtcgttttggtacgtttgttcgtcggttttttgggtcgcggcgttgtttacgttgtcgtggtcgttgcgagtgttggtcgagtatcgtacggtttacgcgtatta

SEQ ID NO: 29932 - DNA, 525 bp, Artificial Sequence
  chemically treated genomic DNA (Homo sapiens) CpG-island No: 29932
taatacgcgtaaaccgtacgatactcgaccaacactcgcaacgaccacgacaacgtaaacaacgccgcgacccaaaaaaccgacgaacaaacgtaccaaaacgaccgaaccgaatccgaaaaaaccaccataaactcacgaaaatccacgttcttaaaatacataccctcgcgtacctccatataatcgtctaaaccctcgttctctacgaaaaaacgcgcgcgctaacacaaatacgcgttctcgacctccacgctaacgaaactaaaacacttaataaaacgcaaccgcgtaaccgacgcgccctccaaccccaccaacgtcttaaacacgtcgcgaacgccgcaacgcgcgtaatcgaactcaacctccgccacgtacgtattaacgcgttcgtaataaacctacgacgcgaaaaacaaacgacgaaatcgcgaaaaacccgtcattaatacccgcttctacccactcaccctttcccgccccatctatactctaattacctaatcgaaccctaaatctatc

SEQ ID NO: 29933 - DNA, 569 bp, Artificial Sequence
  chemically treated genomic DNA (Homo sapiens) CpG-island No: 29933
gggaagggggatttcggaggggcggggttttttttcggaagcgttcgtcgggggcggggagggggcggggttattcgcgtgaggcgattttgttggttcggaggggcggggcgaggaggaggattcgtttgggcggttcggttgtttatagtaatcgttgggtggatttggttagcgtttcgaattttgttttcgttgcgcgtcggtttttcggagttttatagttcgggaaggaggtcgtcgcgggtcgggcgttcgttttgttaagcggattcgtaattcggaaaggcggcgcggcggagtttggagtcggattttgtttagatcgggtttcggtcggttagagtcgcgggtatgtcggaggcgcggaaggggtcggacgaggcggaggagagttagtacgattttggtattgagtttttgcgttttttgcgttttttattcgagtttatttcggttttagttttcgggttttcggacggtagtttttagttttgtatttatttttcgggattcgttaaggaattataggagaaggaagacgcggatggggagcgggttgattttat

SEQ ID NO: 29934 - DNA, 569 bp, Artificial Sequence
  chemically treated genomic DNA (Homo sapiens) CpG-island No: 29934
ataaaatcaacccgctccccatccgcgtcttccttctcctataattccttaacgaatcccgaaaaataaatacaaaactaaaaactaccgtccgaaaacccgaaaactaaaaccgaaataaactcgaataaaaaacgcaaaaaacgcaaaaactcaataccaaaatcgtactaactctcctccgcctcgtccgaccccttccgcgcctccgacatacccgcgactctaaccgaccgaaacccgatctaaacaaaatccgactccaaactccgccgcgccgcctttccgaattacgaatccgcttaacaaaacgaacgcccgacccgcgacgacctccttcccgaactataaaactccgaaaaaccgacgcgcaacgaaaacaaaattcgaaacgctaaccaaatccacccaacgattactataaacaaccgaaccgcccaaacgaatcctcctcctcgccccgcccctccgaaccaacaaaatcgcctcacgcgaataaccccgccccctccccgcccccgacgaacgcttccgaaaaaaaaccccgcccctccgaaatcccccttccc

SEQ ID NO: 29935 - DNA, 569 bp, Artificial Sequence
  chemically treated genomic DNA (Homo sapiens) CpG-island No: 29935
gtggaattagttcgttttttattcgcgtttttttttttttgtggttttttgacgggtttcggaggatgggtgtagggttgggggttgtcgttcgagggttcggaggttggagtcgaggtggattcgggtagggagcgtagagagcgtagagatttaatgttagagtcgtattggttttttttcgtttcgttcggtttttttcgcgttttcgatatgttcgcggttttggtcggtcggggttcggtttgagtaggattcggttttaggtttcgtcgcgtcgttttttcgggttgcgggttcgtttggtagagcgggcgttcggttcgcggcggtttttttttcgggttgtggggtttcgaggggtcggcgcgtagcgaggataaggttcggagcgttggttaggtttatttagcggttattgtgggtagtcgaatcgtttaagcgggttttttttttcgtttcgttttttcggattaatagggtcgttttacgcggatggtttcgtttttttttcgttttcggcgggcgttttcggaaagaggtttcgttttttcggaattttttttttt

SEQ ID NO: 29936 - DNA, 569 bp, Artificial Sequence
  chemically treated genomic DNA (Homo sapiens) CpG-island No: 29936
aaaaaaaaaaattccgaaaaaacgaaacctctttccgaaaacgcccgccgaaaacgaaaaaaaaacgaaaccatccgcgtaaaacgaccctattaatccgaaaaaacgaaacgaaaaaaaaaacccgcttaaacgattcgactacccacaataaccgctaaataaacctaaccaacgctccgaaccttatcctcgctacgcgccgacccctcgaaaccccacaacccgaaaaaaaaaccgccgcgaaccgaacgcccgctctaccaaacgaacccgcaacccgaaaaaacgacgcgacgaaacctaaaaccgaatcctactcaaaccgaaccccgaccgaccaaaaccgcgaacatatcgaaaacgcgaaaaaaaccgaacgaaacgaaaaaaaaccaatacgactctaacattaaatctctacgctctctacgctccctacccgaatccacctcgactccaacctccgaaccctcgaacgacaacccccaaccctacacccatcctccgaaacccgtcaaaaaaccacaaaaaaaaaaaaacgcgaataaaaaacgaactaattccac

SEQ ID NO: 29937 - DNA, 562 bp, Artificial Sequence
  chemically treated genomic DNA (Homo sapiens) CpG-island No: 29937
gtcgggcgggcgtttttttagggttggggtttttcgcgtttaggggtagtttaggttttcggaatttaagtcgcgtttgttttcgggtcgcgcgggggcgttgtggttcggcggcggttcggggcgttgcgtggtcgcggtaggggcggagggggtcgcggggagggaggcgggaagagcgcggtattttcgttggtcgttggttcgttggtcgtttttggaggcggcggcgggagcgtagggggcgcgcggttcggggattcgtatttttcggttttttttttattttacgcggtttggattatggacgttaggtgggggttagggtagtagcgagtttacgtgatcgagttttcgggttacgtgattgtcgcgttttagtacgggggtcgggtggggtttcggttgttcggtcgtcggttagtatatcgttgttcggagttagcggggatgggagttgcggtttggttttgtgttttttggggagtttcgggcggaggggttggggattttgacgtttcggatcgtggaggggagtgtgggggaaggggcgttttttttg

SEQ ID NO: 29938 - DNA, 562 bp, Artificial Sequence
  chemically treated genomic DNA (Homo sapiens) CpG-island No: 29938
caaaaaaaacgccccttcccccacactcccctccacgatccgaaacgtcaaaatccccaacccctccgcccgaaactccccaaaaaacacaaaaccaaaccgcaactcccatccccgctaactccgaacaacgatatactaaccgacgaccgaacaaccgaaaccccacccgacccccgtactaaaacgcgacaatcacgtaacccgaaaactcgatcacgtaaactcgctactaccctaacccccacctaacgtccataatccaaaccgcgtaaaataaaaaaaaaaccgaaaaatacgaatccccgaaccgcgcgccccctacgctcccgccgccgcctccaaaaacgaccaacgaaccaacgaccaacgaaaataccgcgctcttcccgcctccctccccgcgaccccctccgcccctaccgcgaccacgcaacgccccgaaccgccgccgaaccacaacgcccccgcgcgacccgaaaacaaacgcgacttaaattccgaaaacctaaactacccctaaacgcgaaaaaccccaaccctaaaaaaacgcccgcccgac

SEQ ID NO: 29939 - DNA, 562 bp, Artificial Sequence
  chemically treated genomic DNA (Homo sapiens) CpG-island No: 29939
tagaggaagcgtttttttttttatatttttttttacgattcgggacgttagggtttttagttttttcgttcgaagttttttaaggagtataaaattaagtcgtagtttttattttcgttggtttcgggtagcgatatgttggtcgacggtcgagtagtcgggattttattcggttttcgtgttgaggcgcggtagttacgtggttcgggggttcggttacgtgagttcgttgttgttttagtttttatttggcgtttatggtttaggtcgcgtggggtggagggggaatcggggaatgcgagttttcgggtcgcgcgttttttgcgttttcgtcgtcgtttttaggagcggttagcgagttagcggttagcggaagtgtcgcgtttttttcgttttttttttcgcggtttttttcgtttttgtcgcgattacgtagcgtttcgggtcgtcgtcggattatagcgttttcgcgcggttcggaggtagacgcggtttgggtttcggggatttgggttgtttttgggcgcggggagttttagttttgaagaggcgttcgttcggt

SEQ ID NO: 29940 - DNA, 562 bp, Artificial Sequence
  chemically treated genomic DNA (Homo sapiens) CpG-island No: 29940
accgaacgaacgcctcttcaaaactaaaactccccgcgcccaaaaacaacccaaatccccgaaacccaaaccgcgtctacctccgaaccgcgcgaaaacgctataatccgacgacgacccgaaacgctacgtaatcgcgacaaaaacgaaaaaaaccgcgaaaaaaaaaacgaaaaaaacgcgacacttccgctaaccgctaactcgctaaccgctcctaaaaacgacgacgaaaacgcaaaaaacgcgcgacccgaaaactcgcattccccgattccccctccaccccacgcgacctaaaccataaacgccaaataaaaactaaaacaacaacgaactcacgtaaccgaacccccgaaccacgtaactaccgcgcctcaacacgaaaaccgaataaaatcccgactactcgaccgtcgaccaacatatcgctacccgaaaccaacgaaaataaaaactacgacttaattttatactccttaaaaaacttcgaacgaaaaaactaaaaaccctaacgtcccgaatcgtaaaaaaaaatataaaaaaaaaaacgcttcctcta

SEQ ID NO: 29941 - DNA, 711 bp, Artificial Sequence
  chemically treated genomic DNA (Homo sapiens) CpG-island No: 29941
tttcgtattttcgttcgcgagtttgtattttcgttcgcgagtttttatttttatttttatttttatattttttcgttagcgtagttagcggtacggtttttttttgatatcgattagatcgatggggattattcgtttattcgtttgttttttgcggaggttaacgtgatcgtagtttgttttaggttcgggagttaggtcgtttcgtttagtttgggtttcggttttcgtagggtttttaggttttttggttcgtgcgcgttacgtgttgcgcggtttcgtacgtttcgtattggggttttattcggcgtttttttttcgggttgcggagtcgttaggttcgttttttttgtttttcgtggtaggcgggtagcggcgtttttcgtttcggtagtttttagtttttagttttcggtttcgggtagtatttgtcgtagaagtattgttttcgcgttgagattcgcgcgttttcgttgtagtttttttttttcgtcggggtatatttaaattcgtttttcgttgagttcgtttcgttttgcgtttattgttattttttcgacgttcgcggtttcgttttcggtttatttttgttatttcgcggcgatttcgcgcgtttcgtcgtttttatttcgagtttttgcgtttttagggtcgtttggtcgtgttattgcggtagataggatttttttgggttttgttatattaaggttg

SEQ ID NO: 29942 - DNA, 711 bp, Artificial Sequence
  chemically treated genomic DNA (Homo sapiens) CpG-island No: 29942
caaccttaatataacaaaacccaaaaaaatcctatctaccgcaataacacgaccaaacgaccctaaaaacgcaaaaactcgaaataaaaacgacgaaacgcgcgaaatcgccgcgaaataacaaaaataaaccgaaaacgaaaccgcgaacgtcgaaaaaataacaataaacgcaaaacgaaacgaactcaacgaaaaacgaatttaaatataccccgacgaaaaaaaaaaactacaacgaaaacgcgcgaatctcaacgcgaaaacaatacttctacgacaaatactacccgaaaccgaaaactaaaaactaaaaactaccgaaacgaaaaacgccgctacccgcctaccacgaaaaacaaaaaaaacgaacctaacgactccgcaacccgaaaaaaaaacgccgaataaaaccccaatacgaaacgtacgaaaccgcgcaacacgtaacgcgcacgaaccaaaaaacctaaaaaccctacgaaaaccgaaacccaaactaaacgaaacgacctaactcccgaacctaaaacaaactacgatcacgttaacctccgcaaaaaacaaacgaataaacgaataatccccatcgatctaatcgatatcaaaaaaaaaccgtaccgctaactacgctaacgaaaaaatataaaaataaaaataaaaataaaaactcgcgaacgaaaatacaaactcgcgaacgaaaatacgaaa

SEQ ID NO: 29943 - DNA, 711 bp, Artificial Sequence
  chemically treated genomic DNA (Homo sapiens) CpG-island No: 29943
tagttttggtgtggtagggtttaaagaggttttatttatcgtaataatacgattaggcggttttgggggcgtaggggttcggggtgggagcggcggagcgcgcggagtcgtcgcggggtggtaggggtgggtcgggggcggggtcgcgggcgtcggggaggtggtagtgggcgtagggcggggcgagtttagcggagggcgggtttgaatgtgtttcggcgggagagggaagttgtagcgagagcgcgcggattttagcgcgggagtagtgtttttgcggtaggtgttgttcggggtcggggattggggattggggattgtcggggcggaagacgtcgttgttcgtttgttacggagggtagggagggcgggtttgacggtttcgtagttcggagaagggacgtcgggtggggttttagtgcggagcgtgcggagtcgcgtagtacgtggcgcgtacgggttagggagtttgaggattttgcggggatcgggatttaagttgggcggggcggtttggttttcgggtttaaaataggttgcggttacgttgattttcgtaaggggtaggcgagtggacgggtgatttttatcgatttggtcggtattagggaggggtcgtgtcgttgattgcgttggcggaggggtatggggatggggatggggatggaggttcgcgagcggaggtgtaggttcgcgagcggaggtgcgggg

SEQ ID NO: 29944 - DNA, 711 bp, Artificial Sequence
  chemically treated genomic DNA (Homo sapiens) CpG-island No: 29944
ccccgcacctccgctcgcgaacctacacctccgctcgcgaacctccatccccatccccatccccatacccctccgccaacgcaatcaacgacacgacccctccctaataccgaccaaatcgataaaaatcacccgtccactcgcctaccccttacgaaaatcaacgtaaccgcaacctattttaaacccgaaaaccaaaccgccccgcccaacttaaatcccgatccccgcaaaatcctcaaactccctaacccgtacgcgccacgtactacgcgactccgcacgctccgcactaaaaccccacccgacgtcccttctccgaactacgaaaccgtcaaacccgccctccctaccctccgtaacaaacgaacaacgacgtcttccgccccgacaatccccaatccccaatccccgaccccgaacaacacctaccgcaaaaacactactcccgcgctaaaatccgcgcgctctcgctacaacttccctctcccgccgaaacacattcaaacccgccctccgctaaactcgccccgccctacgcccactaccacctccccgacgcccgcgaccccgcccccgacccacccctaccaccccgcgacgactccgcgcgctccgccgctcccaccccgaacccctacgcccccaaaaccgcctaatcgtattattacgataaataaaacctctttaaaccctaccacaccaaaacta

SEQ ID NO: 29945 - DNA, 833 bp, Artificial Sequence
  chemically treated genomic DNA (Homo sapiens) CpG-island No: 29945
gttttttgcgagcgatcgattgcggtcgttatatttatttcgtcgttaagtagtattcgggttttgattcggtttcgggtttcggtggcggtggtggcggcggcggcggtggcggcggtttttttatggcggcggtaggcgtgacggtaaaggcgggaggagggattagcgcggtagcggttttttttattcgtgtacggagtttcgtatggtcgcggcgggtagtaagttgtagtttggcgcggggtatcggagtttcgaagtgcgggagtgattcgatttcgttttcgtttttatttcgtcgtaggagtcgtgcgcgtcgcggttattttggaaacggcgatcggtcgagcgtcggggttacggtgggcggcgagggataagttttttagatcggcggcggtggcggcggcggcggcgggcgtcggaatgcgatcggacgggggcggagacggcggtagggaggggcggggagcgtcgttaagtgtcggcgcgattcggttttggagtcgggtttcgttagttcgttcggtgtcgtttcggtcggtggtagtgggggattgtggagcggagtcgggttgtgtagcgggttgggagttcgaggttttttaggcggtcgtcggtttgggagggacgttgggtagggtcgatgagcggggcgggcgcgacgttatgagttcggtcggagtcgtcgtttagggatttgttattcggattttattttttaggaggacggacgttatttagacgttcgtaatttcggttttttgatagcgtagttttttataggttcgaatttttaagatttgatataaagttttcggaattttaga

SEQ ID NO: 29946 - DNA, 833 bp, Artificial Sequence
  chemically treated genomic DNA (Homo sapiens) CpG-island No: 29946
tctaaaattccgaaaactttatatcaaatcttaaaaattcgaacctataaaaaactacgctatcaaaaaaccgaaattacgaacgtctaaataacgtccgtcctcctaaaaaataaaatccgaataacaaatccctaaacgacgactccgaccgaactcataacgtcgcgcccgccccgctcatcgaccctacccaacgtccctcccaaaccgacgaccgcctaaaaaacctcgaactcccaacccgctacacaacccgactccgctccacaatcccccactaccaccgaccgaaacgacaccgaacgaactaacgaaacccgactccaaaaccgaatcgcgccgacacttaacgacgctccccgcccctccctaccgccgtctccgcccccgtccgatcgcattccgacgcccgccgccgccgccgccaccgccgccgatctaaaaaacttatccctcgccgcccaccgtaaccccgacgctcgaccgatcgccgtttccaaaataaccgcgacgcgcacgactcctacgacgaaataaaaacgaaaacgaaatcgaatcactcccgcacttcgaaactccgataccccgcgccaaactacaacttactacccgccgcgaccatacgaaactccgtacacgaataaaaaaaaccgctaccgcgctaatccctcctcccgcctttaccgtcacgcctaccgccgccataaaaaaaccgccgccaccgccgccgccgccaccaccgccaccgaaacccgaaaccgaatcaaaacccgaatactacttaacgacgaaataaatataacgaccgcaatcgatcgctcgcaaaaaac

SEQ ID NO: 29947 - DNA, 833 bp, Artificial Sequence
  chemically treated genomic DNA (Homo sapiens) CpG-island No: 29947
tttggaatttcggagattttatgttaagttttaaaaattcgagtttgtggaaggttgcgttgttaagagatcggagttgcgagcgtttgggtgacgttcgtttttttggaaggtgggattcgggtggtaggtttttgggcggcgatttcggtcgggtttatagcgtcgcgttcgtttcgtttatcggttttatttagcgttttttttagatcgacgatcgtttgggaagtttcgagtttttagttcgttgtatagttcggtttcgttttatagttttttattgttatcggtcggggcgatatcgggcgagttggcgagattcggttttaggatcgaatcgcgtcgatatttgacggcgtttttcgtttttttttgtcgtcgttttcgttttcgttcggtcgtatttcggcgttcgtcgtcgtcgtcgttatcgtcgtcgatttgggaggtttgtttttcgtcgtttatcgtagtttcggcgttcggtcggtcgtcgtttttaagatggtcgcggcgcgtacggtttttgcggcggggtagaggcggaggcggagtcgagttattttcgtatttcggggtttcggtgtttcgcgttaggttgtagtttattgttcgtcgcggttatgcggggtttcgtgtacggatgagagaagtcgttgtcgcgttggttttttttttcgtttttgtcgttacgtttgtcgtcgttatggaggagtcgtcgttatcgtcgtcgtcgttattatcgttatcggaattcgagatcgagttagaattcgagtgttgtttggcggcgaggtgagtgtggcggtcgtagtcggtcgttcgtagaaagt

SEQ ID NO: 29948 - DNA, 833 bp, Artificial Sequence
  chemically treated genomic DNA (Homo sapiens) CpG-island No: 29948
actttctacgaacgaccgactacgaccgccacactcacctcgccgccaaacaacactcgaattctaactcgatctcgaattccgataacgataataacgacgacgacgataacgacgactcctccataacgacgacaaacgtaacgacaaaaacgaaaaaaaaaaccaacgcgacaacgacttctctcatccgtacacgaaaccccgcataaccgcgacgaacaataaactacaacctaacgcgaaacaccgaaaccccgaaatacgaaaataactcgactccgcctccgcctctaccccgccgcaaaaaccgtacgcgccgcgaccatcttaaaaacgacgaccgaccgaacgccgaaactacgataaacgacgaaaaacaaacctcccaaatcgacgacgataacgacgacgacgacgaacgccgaaatacgaccgaacgaaaacgaaaacgacgacaaaaaaaaacgaaaaacgccgtcaaatatcgacgcgattcgatcctaaaaccgaatctcgccaactcgcccgatatcgccccgaccgataacaataaaaaactataaaacgaaaccgaactatacaacgaactaaaaactcgaaacttcccaaacgatcgtcgatctaaaaaaaacgctaaataaaaccgataaacgaaacgaacgcgacgctataaacccgaccgaaatcgccgcccaaaaacctaccacccgaatcccaccttccaaaaaaacgaacgtcacccaaacgctcgcaactccgatctcttaacaacgcaaccttccacaaactcgaatttttaaaacttaacataaaatctccgaaattccaaa

SEQ ID NO: 29949 - DNA, 726 bp, Artificial Sequence
  chemically treated genomic DNA (Homo sapiens) CpG-island No: 29949
cggttttagttattttttttttttatttcgagttgtttttcgttttagatttcgtcgttggttattttattgttttatttcgtttcgtcgtcggcgaaaatcggtttcggggtttatcgcgggtgggcggattttgtaaatgttcgatttttttgcgatgggtttgattttcgcgatgtagttaagagggtttcggaattcggtttagttaggttcgaatatcgggtatttcggtggcggtaggaaatcgtcggatttcggttttatggtgggttcgaggtttgggttagggatcgggaggtttggatcgtttttaaggatttatggcgtcgtcgttgtttgaagtcgaggtaatgttcggaggttaggttttaagcggggtagtcgtcgttcgtcgagggtttaagggggcgtgtggtcgtcgtgttttgagagttttaggttgattttattgttatcgttttttcgtttcgtttcgttttttttaaattgtgtggttgtttttttattatcgtagttttcgttattatagttattttttaaacgtcgcggtttttagcgtcgtcgtcgttattttggtttgttagcgttttttttttttatattataataaatcggattttttcgcggggtgttttttcgagtttcgtatacgttgcgttatattaagttttaggaaatttttatatagtggagatcgagttaaataggttggtatgggttttt

SEQ ID NO: 29950 - DNA, 726 bp, Artificial Sequence
  chemically treated genomic DNA (Homo sapiens) CpG-island No: 29950
aaaaacccataccaacctatttaactcgatctccactatataaaaatttcctaaaacttaatataacgcaacgtatacgaaactcgaaaaaacaccccgcgaaaaaatccgatttattataatataaaaaaaaaaaacgctaacaaaccaaaataacgacgacgacgctaaaaaccgcgacgtttaaaaaataactataataacgaaaactacgataataaaaaaacaaccacacaatttaaaaaaaacgaaacgaaacgaaaaaacgataacaataaaatcaacctaaaactctcaaaacacgacgaccacacgcccccttaaaccctcgacgaacgacgactaccccgcttaaaacctaacctccgaacattacctcgacttcaaacaacgacgacgccataaatccttaaaaacgatccaaacctcccgatccctaacccaaacctcgaacccaccataaaaccgaaatccgacgatttcctaccgccaccgaaatacccgatattcgaacctaactaaaccgaattccgaaaccctcttaactacatcgcgaaaatcaaacccatcgcaaaaaaatcgaacatttacaaaatccgcccacccgcgataaaccccgaaaccgattttcgccgacgacgaaacgaaataaaacaataaaataaccaacgacgaaatctaaaacgaaaaacaactcgaaataaaaaaaaaaaataactaaaaccg

SEQ ID NO: 29951 - DNA, 726 bp, Artificial Sequence
  chemically treated genomic DNA (Homo sapiens) CpG-island No: 29951
agaaatttatattagtttatttagttcggtttttattatatgaaggttttttagggtttggtgtgacgtaacgtatacgaggttcggaaggatatttcgcggaaggattcggtttgttgtggtgtggggaggggagacgttgataaattaagatggcggcggcggcgttgaaggtcgcggcgtttgggaggtaattgtggtggcgaaggttgcggtagtggggaggtaattatatagtttggaagaaacggagcgggacgaagaggcggtagtagtagagttagtttgagatttttagagtacgacggttatacgtttttttaggttttcggcgggcggcggttgtttcgtttagggtttagttttcgagtattgtttcggttttaaatagcggcggcgttatgagtttttaagggcggtttaagtttttcgatttttggtttagatttcgggtttattatggagtcggggttcgacgattttttatcgttatcggagtgttcggtgttcgagtttagttgggtcgagtttcgagatttttttggttatatcgcgaaaattaggtttatcgtagagaaatcgggtatttgtaagattcgtttattcgcggtaagtttcggggtcggttttcgtcggcggcgagacggaatgaagtagtaggatagttagcggcgaagtttggggcggagggtagttcgaggtggggagagggggtggttgggatcg

SEQ ID NO: 29952 - DNA, 726 bp, Artificial Sequence
  chemically treated genomic DNA (Homo sapiens) CpG-island No: 29952
cgatcccaaccaccccctctccccacctcgaactaccctccgccccaaacttcgccgctaactatcctactacttcattccgtctcgccgccgacgaaaaccgaccccgaaacttaccgcgaataaacgaatcttacaaatacccgatttctctacgataaacctaattttcgcgatataaccaaaaaaatctcgaaactcgacccaactaaactcgaacaccgaacactccgataacgataaaaaatcgtcgaaccccgactccataataaacccgaaatctaaaccaaaaatcgaaaaacttaaaccgcccttaaaaactcataacgccgccgctatttaaaaccgaaacaatactcgaaaactaaaccctaaacgaaacaaccgccgcccgccgaaaacctaaaaaaacgtataaccgtcgtactctaaaaatctcaaactaactctactactaccgcctcttcgtcccgctccgtttcttccaaactatataattacctccccactaccgcaaccttcgccaccacaattacctcccaaacgccgcgaccttcaacgccgccgccgccatcttaatttatcaacgtctcccctccccacaccacaacaaaccgaatccttccgcgaaatatccttccgaacctcgtatacgttacgtcacaccaaaccctaaaaaaccttcatataataaaaaccgaactaaataaactaatataaatttct

SEQ ID NO: 29953 - DNA, 806 bp, Artificial Sequence
  chemically treated genomic DNA (Homo sapiens) CpG-island No: 29953
gacgggcgcggttggagggtagcgcgtaggcgtaggcggcgtacgtggtttcggatacgtagcgttgcggcggggttagcgttttaatttcggagtggggtcgaggcgcgtagttttttaacgattcgacgttaacggggtttttcggatcgcggcgcgaggtaggaggggcggggtaggagggtcgcggtaggttcgggtcgttaaagttgttagtaaggtcgagggtcggacgtggggttttagagcgacgttgagtgcgtgcgggattcggagtacgtgacggagtttcgagtttttatgttcgttacgtcgtttcgggttatttttcggagtttcggtttcgtatattttagttcggtttatcggttttatttggggttagagtttcgttcgtattattatagggtcgttggggagtcggggttttttagatttgttcgttttaagttcgcgggacgttatttttttttttacgttattgtagtcgtcgtagttttattttttttcgggaggtgagggaatgagtgacggttttttcgacgaatggcgaggcggagttgagggggcgtgtttcggaggcgggaagtgggtggggttcgttttagttaggtaggaagtcggcgcgggcggcgcggatagtatttgtgggtattcggagtacggagatttcgtcggttttacgtttatttcggtgtttgtagtatttttcgtttttttttttaggcgacgagatttagtggttaggtaatgattggggaagggttgagtaacgggtaggcggcgtagggtttttttgggtttgt

SEQ ID NO: 29954 - DNA, 806 bp, Artificial Sequence
  chemically treated genomic DNA (Homo sapiens) CpG-island No: 29954
acaaacccaaaaaaaccctacgccgcctacccgttactcaacccttccccaatcattacctaaccactaaatctcgtcgcctaaaaaaaaaaacgaaaaatactacaaacaccgaaataaacgtaaaaccgacgaaatctccgtactccgaatacccacaaatactatccgcgccgcccgcgccgacttcctacctaactaaaacgaaccccacccacttcccgcctccgaaacacgccccctcaactccgcctcgccattcgtcgaaaaaaccgtcactcattccctcacctcccgaaaaaaaataaaactacgacgactacaataacgtaaaaaaaaaaataacgtcccgcgaacttaaaacgaacaaatctaaaaaaccccgactccccaacgaccctataataatacgaacgaaactctaaccccaaataaaaccgataaaccgaactaaaatatacgaaaccgaaactccgaaaaataacccgaaacgacgtaacgaacataaaaactcgaaactccgtcacgtactccgaatcccgcacgcactcaacgtcgctctaaaaccccacgtccgaccctcgaccttactaacaactttaacgacccgaacctaccgcgaccctcctaccccgcccctcctacctcgcgccgcgatccgaaaaaccccgttaacgtcgaatcgttaaaaaactacgcgcctcgaccccactccgaaattaaaacgctaaccccgccgcaacgctacgtatccgaaaccacgtacgccgcctacgcctacgcgctaccctccaaccgcgcccgtc

SEQ ID NO: 29955 - DNA, 806 bp, Artificial Sequence
  chemically treated genomic DNA (Homo sapiens) CpG-island No: 29955
ataagtttagaaaagttttgcgtcgtttgttcgttgtttagtttttttttaattattatttagttattgggtttcgtcgtttaggagaggaagcggagggtgttgtagatatcgaggtgaacgtaaagtcggcgagattttcgtgtttcgggtatttatagatattgttcgcgtcgttcgcgtcgattttttgtttagttaaggcgagttttatttatttttcgttttcggggtacgtttttttagtttcgtttcgttattcgtcgggagagtcgttatttatttttttatttttcggaaaggggtgggattgcgacggttgtagtagcgtggaaaggggggtgacgtttcgcggatttgaggcgggtagatttggggggtttcgattttttagcggttttgtagtggtgcgggcgaaattttggttttagataggatcggtgagtcgaattggggtgtgcggagtcggggtttcgggggatggttcggggcggcgtggcgggtatgagagttcggggtttcgttacgtatttcgagtttcgtacgtatttagcgtcgttttggggttttacgttcggttttcgattttgttgataattttggcggttcgggtttgtcgcggtttttttgtttcgttttttttgtttcgcgtcgcgattcgagagatttcgttggcgtcgagtcgttgagaggttgcgcgtttcggttttatttcggggttggggcgttggtttcgtcgtagcgttgcgtgttcggggttacgtgcgtcgtttgcgtttgcgcgttgttttttagtcgcgttcgtt

SEQ ID NO: 29956 - DNA, 806 bp, Artificial Sequence
  chemically treated genomic DNA (Homo sapiens) CpG-island No: 29956
aacgaacgcgactaaaaaacaacgcgcaaacgcaaacgacgcacgtaaccccgaacacgcaacgctacgacgaaaccaacgccccaaccccgaaataaaaccgaaacgcgcaacctctcaacgactcgacgccaacgaaatctctcgaatcgcgacgcgaaacaaaaaaaacgaaacaaaaaaaccgcgacaaacccgaaccgccaaaattatcaacaaaatcgaaaaccgaacgtaaaaccccaaaacgacgctaaatacgtacgaaactcgaaatacgtaacgaaaccccgaactctcatacccgccacgccgccccgaaccatcccccgaaaccccgactccgcacaccccaattcgactcaccgatcctatctaaaaccaaaatttcgcccgcaccactacaaaaccgctaaaaaatcgaaaccccccaaatctacccgcctcaaatccgcgaaacgtcacccccctttccacgctactacaaccgtcgcaatcccacccctttccgaaaaataaaaaaataaataacgactctcccgacgaataacgaaacgaaactaaaaaaacgtaccccgaaaacgaaaaataaataaaactcgccttaactaaacaaaaaatcgacgcgaacgacgcgaacaatatctataaatacccgaaacacgaaaatctcgccgactttacgttcacctcgatatctacaacaccctccgcttcctctcctaaacgacgaaacccaataactaaataataattaaaaaaaaactaaacaacgaacaaacgacgcaaaacttttctaaacttat

SEQ ID NO: 29957 - DNA, 821 bp, Artificial Sequence
  chemically treated genomic DNA (Homo sapiens) CpG-island No: 29957
cgtcgggcgggtcggggtcgttcgcgtcgtttagcgttaggtttaggtcggcggtcgtcgattgtttttttagtagcgagttcggttcggcgtttagcgatagggagtcgtttagattgatgggaggttcgggcgcggggttttttgtcgcgggttcgtcgcgtttttgtttttcgtgtttgcgtttgtgcgagtttatttgcgatatgtttattatcgtgtggcggtagttcgggaaggtgtagtggaagtgcgagtatttgagtttgtatttgtagtcgggtacggcgtagtcggcgttggagttgaattggtagaagttcgcggcgttgattacgttttgtttgtcgtggtgtttgcgatgcgtcgtgattttggtgttgtcggtgtagcggaagcggtagcgtaggtagtggaagtgcgtgttggtgttcgagaaggggtagtcggcgaagtggtagttgagtgaggttttgaagcgtttgaagtcgtttagtattaggttgtttacgcggtcgtggtgttgcgcgtgtttgtatatgtgcgtgcgttcgtagaatttgtagtcgtagttttcgcgcgtgtagtggtagtgggtgattttgagcgagaattgataagttgcgtttttgtagttttcgtaaaggtcgaagcgtcggaagttttttagtattatgttttcgtttagtatttttcgggaggacgtcgtttttcgtcgtttgtcgaagggcgatatgttttcgatgatttagaagcgttttttggttttcgaggttgtcggtatagagatggtgttttttggggaggggtagggaggttag

SEQ ID NO: 29958 - DNA, 821 bp, Artificial Sequence
  chemically treated genomic DNA (Homo sapiens) CpG-island No: 29958
ctaacctccctacccctccccaaaaaacaccatctctataccgacaacctcgaaaaccaaaaaacgcttctaaatcatcgaaaacatatcgcccttcgacaaacgacgaaaaacgacgtcctcccgaaaaatactaaacgaaaacataatactaaaaaacttccgacgcttcgacctttacgaaaactacaaaaacgcaacttatcaattctcgctcaaaatcacccactaccactacacgcgcgaaaactacgactacaaattctacgaacgcacgcacatatacaaacacgcgcaacaccacgaccgcgtaaacaacctaatactaaacgacttcaaacgcttcaaaacctcactcaactaccacttcgccgactaccccttctcgaacaccaacacgcacttccactacctacgctaccgcttccgctacaccgacaacaccaaaatcacgacgcatcgcaaacaccacgacaaacaaaacgtaatcaacgccgcgaacttctaccaattcaactccaacgccgactacgccgtacccgactacaaatacaaactcaaatactcgcacttccactacaccttcccgaactaccgccacacgataataaacatatcgcaaataaactcgcacaaacgcaaacacgaaaaacaaaaacgcgacgaacccgcgacaaaaaaccccgcgcccgaacctcccatcaatctaaacgactccctatcgctaaacgccgaaccgaactcgctactaaaaaaacaatcgacgaccgccgacctaaacctaacgctaaacgacgcgaacgaccccgacccgcccgacg

SEQ ID NO: 29959 - DNA, 821 bp, Artificial Sequence
  chemically treated genomic DNA (Homo sapiens) CpG-island No: 29959
ttgatttttttgtttttttttagggaatattatttttatgtcgatagtttcgggggttaaaaagcgtttttggattatcgaggatatgtcgtttttcggtaagcggcggaagacggcgttttttcggaagatgttggacgagggtatgatgttggagggttttcggcgtttcgatttttacgaggattgtaaggacgtagtttgttagttttcgtttaaggttatttattattattgtacgcgcgagaattgcggttataagttttgcgggcgtacgtatatgtataagtacgcgtagtattacgatcgcgtggataatttggtgttggacgattttaagcgttttaaggttttatttagttgttatttcgtcgattgttttttttcgggtattagtacgtatttttattgtttgcgttgtcgttttcgttgtatcgatagtattaaggttacggcgtatcgtaagtattacggtaaataggacgtgattagcgtcgcgggtttttgttagtttagttttagcgtcgattgcgtcgtgttcgattgtaagtataagtttaagtgttcgtatttttattgtattttttcgggttgtcgttatacggtggtgggtatgtcgtagatggattcgtataagcgtaagtacgagaagtaggagcgcggcgagttcgcggtagagggtttcgcgttcgggttttttattagtttggacggttttttgtcgttgggcgtcgagtcgggttcgttgttaaaaaagtagtcggcggtcgtcggtttgggtttggcgttgggcgacgcgggcgatttcggttcgttcgacg

SEQ ID NO: 29960 - DNA, 821 bp, Artificial Sequence
  chemically treated genomic DNA (Homo sapiens) CpG-island No: 29960
cgtcgaacgaaccgaaatcgcccgcgtcgcccaacgccaaacccaaaccgacgaccgccgactacttttttaacaacgaacccgactcgacgcccaacgacaaaaaaccgtccaaactaataaaaaacccgaacgcgaaaccctctaccgcgaactcgccgcgctcctacttctcgtacttacgcttatacgaatccatctacgacatacccaccaccgtataacgacaacccgaaaaaatacaataaaaatacgaacacttaaacttatacttacaatcgaacacgacgcaatcgacgctaaaactaaactaacaaaaacccgcgacgctaatcacgtcctatttaccgtaatacttacgatacgccgtaaccttaatactatcgatacaacgaaaacgacaacgcaaacaataaaaatacgtactaatacccgaaaaaaaacaatcgacgaaataacaactaaataaaaccttaaaacgcttaaaatcgtccaacaccaaattatccacgcgatcgtaatactacgcgtacttatacatatacgtacgcccgcaaaacttataaccgcaattctcgcgcgtacaataataataaataaccttaaacgaaaactaacaaactacgtccttacaatcctcgtaaaaatcgaaacgccgaaaaccctccaacatcataccctcgtccaacatcttccgaaaaaacgccgtcttccgccgcttaccgaaaaacgacatatcctcgataatccaaaaacgctttttaacccccgaaactatcgacataaaaataatattccctaaaaaaaaacaaaaaaatcaa

SEQ ID NO: 29961 - DNA, 761 bp, Artificial Sequence
  chemically treated genomic DNA (Homo sapiens) CpG-island No: 29961
tcgttgaggtcgagtcgggttgtttttggcgagttatttattgggttatggcggcggatagagtagaatcgaagagcggcgacgcgcggaggacgagtgagggaaagattcgtagcggttttttttagaaattgcggtcgtttacgtttcgtttttcggcgtcggttaatcgaatggaagggggtggagttatgaagttatattattggtttttttcgacgtttgttagattattcgaggtaaacgtgttcgtttattttcgggggtcggattagtggagcgtcgagtatttagatgatattgtttcggcgaggtttcgggtttttcgtttacgcgtagagtttttcgttcgttttagttgtatttcggttttgtaggtcgttcgtttggcgtagttgtagttatagtaatttacgtaggatcgcgttttatagtttattaggtattcggacgtttttggcgcgagcgttcgtcgttttttttttaggttattgcggtgtatcgtgcgggttcgcgtcgtgtttttcgtttcggagtagggatcgggcgtgttcgtttagttttgtgcgtattcggaatggggtcggggaaggttgagttttagggcgattttgatgtggagtcgtgcgatcgtttattgcggttgaagagatttaggcgtagatagcgtaggcggggtatgtattggttggagtatgatggggttaggatttgagttttttatttaggttcggagttaacggtattgaatttttttttat

SEQ ID NO: 29962 - DNA, 761 bp, Artificial Sequence
  chemically treated genomic DNA (Homo sapiens) CpG-island No: 29962
ataaaaaaaaattcaataccgttaactccgaacctaaataaaaaactcaaatcctaaccccatcatactccaaccaatacataccccgcctacgctatctacgcctaaatctcttcaaccgcaataaacgatcgcacgactccacatcaaaatcgccctaaaactcaaccttccccgaccccattccgaatacgcacaaaactaaacgaacacgcccgatccctactccgaaacgaaaaacacgacgcgaacccgcacgatacaccgcaataacctaaaaaaaaaacgacgaacgctcgcgccaaaaacgtccgaatacctaataaactataaaacgcgatcctacgtaaattactataactacaactacgccaaacgaacgacctacaaaaccgaaatacaactaaaacgaacgaaaaactctacgcgtaaacgaaaaacccgaaacctcgccgaaacaatatcatctaaatactcgacgctccactaatccgacccccgaaaataaacgaacacgtttacctcgaataatctaacaaacgtcgaaaaaaaccaataatataacttcataactccacccccttccattcgattaaccgacgccgaaaaacgaaacgtaaacgaccgcaatttctaaaaaaaaccgctacgaatctttccctcactcgtcctccgcgcgtcgccgctcttcgattctactctatccgccgccataacccaataaataactcgccaaaaacaacccgactcgacctcaacga

SEQ ID NO: 29963 - DNA, 761 bp, Artificial Sequence
  chemically treated genomic DNA (Homo sapiens) CpG-island No: 29963
atgagaaggggtttaatatcgttaatttcgggtttgggtaaaagatttaagttttgattttattatattttaattaatatatatttcgtttgcgttgtttgcgtttgggtttttttaatcgtagtgagcggtcgtacggttttatattagggtcgttttgaggtttagtttttttcggttttatttcgagtgcgtataggattgaacgagtacgttcggtttttgtttcggagcggaggatacgacgcggattcgtacggtgtatcgtagtgatttgaggaaggagcgacgggcgttcgcgttaaaggcgttcgagtgtttggtaaattgtaaagcgcggttttgcgtgagttgttatggttatagttgcgttaggcggacggtttgtaggatcgaggtgtagttgggacgagcggaaagttttgcgcgtgggcggggagttcggagtttcgtcggggtaatgttatttaggtgttcggcgttttattgattcggttttcgggggtgggcgggtacgtttgtttcggatggtttaataggcgtcggggagagttaatggtgtggttttatggttttatttttttttattcgattggtcggcgtcgaaaagcggggcgtgagcggtcgtagtttttggagggagtcgttgcgggttttttttttattcgtttttcgcgcgtcgtcgtttttcggttttgttttgttcgtcgttatggtttagtgagtgattcgttaggggtagttcggttcggttttagcgg

SEQ ID NO: 29964 - DNA, 761 bp, Artificial Sequence
  chemically treated genomic DNA (Homo sapiens) CpG-island No: 29964
ccgctaaaaccgaaccgaactacccctaacgaatcactcactaaaccataacgacgaacaaaacaaaaccgaaaaacgacgacgcgcgaaaaacgaataaaaaaaaaacccgcaacgactccctccaaaaactacgaccgctcacgccccgcttttcgacgccgaccaatcgaataaaaaaaaataaaaccataaaaccacaccattaactctccccgacgcctattaaaccatccgaaacaaacgtacccgcccacccccgaaaaccgaatcaataaaacgccgaacacctaaataacattaccccgacgaaactccgaactccccgcccacgcgcaaaactttccgctcgtcccaactacacctcgatcctacaaaccgtccgcctaacgcaactataaccataacaactcacgcaaaaccgcgctttacaatttaccaaacactcgaacgcctttaacgcgaacgcccgtcgctccttcctcaaatcactacgatacaccgtacgaatccgcgtcgtatcctccgctccgaaacaaaaaccgaacgtactcgttcaatcctatacgcactcgaaataaaaccgaaaaaaactaaacctcaaaacgaccctaatataaaaccgtacgaccgctcactacgattaaaaaaacccaaacgcaaacaacgcaaacgaaatatatattaattaaaatataataaaatcaaaacttaaatcttttacccaaacccgaaattaacgatattaaaccccttctcat

SEQ ID NO: 29965 - DNA, 795 bp, Artificial Sequence
  chemically treated genomic DNA (Homo sapiens) CpG-island No: 29965
agttttgggtttgattggttcgtatcgcgtttttgtattagtaacgaggggtcgacgtttttagggttagcgttttagagtttcggttcgaatcgtttatcgcgtacgggcgttatttggaatgtttaatgtcgacgttgtatttttacgaaaattttatttgagaaggggaaatcgaggatttatcgtaaggttagaaggtggtttttcgtcgtcggatttcggcgttcgtacgtttttttagaatcgttttttttttagttagcgtaggttagggtttagtcgcgttgtcgcggaaatcgttttttagtattattcgcggtagttaagttaacgtatgcgtagtcgcggggggcgttcgggggcggggtgtcgatgagaagtcgtcgggggttgtcgggtatttttttgtttagaaattcgacgtcgttttgttttagtttagttcgattttcgtttttttgtatttgttggtaagagaatcgttgttgtttttcggttttcgtttttttttttattattgcgggtcgattttgggtaaacgtaggagggtcgagaaggggcggtggtgcgcggttaggtcggattttttcgtcgcggcgcgagcgacgggtcgcgcgggcggataaagtacgtagtttcgttttgtttcgcgcgttttttggcggcgtttcgttgaggggatttcgtcgtcggtttttagttagttttttgtttagtttgttttgcggaggtggtcgggcgacgcggggatatgattatcgaggttattgttgtattttagagtttgattta

SEQ ID NO: 29966 - DNA, 795 bp, Artificial Sequence
  chemically treated genomic DNA (Homo sapiens) CpG-island No: 29966
taaatcaaactctaaaatacaacaataacctcgataatcatatccccgcgtcgcccgaccacctccgcaaaacaaactaaacaaaaaactaactaaaaaccgacgacgaaatcccctcaacgaaacgccgccaaaaaacgcgcgaaacaaaacgaaactacgtactttatccgcccgcgcgacccgtcgctcgcgccgcgacgaaaaaatccgacctaaccgcgcaccaccgccccttctcgaccctcctacgtttacccaaaatcgacccgcaataataaaaaaaaaaacgaaaaccgaaaaacaacaacgattctcttaccaacaaatacaaaaaaacgaaaatcgaactaaactaaaacaaaacgacgtcgaatttctaaacaaaaaaatacccgacaacccccgacgacttctcatcgacaccccgcccccgaacgccccccgcgactacgcatacgttaacttaactaccgcgaataatactaaaaaacgatttccgcgacaacgcgactaaaccctaacctacgctaactaaaaaaaaaacgattctaaaaaaacgtacgaacgccgaaatccgacgacgaaaaaccaccttctaaccttacgataaatcctcgatttccccttctcaaataaaattttcgtaaaaatacaacgtcgacattaaacattccaaataacgcccgtacgcgataaacgattcgaaccgaaactctaaaacgctaaccctaaaaacgtcgacccctcgttactaatacaaaaacgcgatacgaaccaatcaaacccaaaact

SEQ ID NO: 29967 - DNA, 795 bp, Artificial Sequence
  chemically treated genomic DNA (Homo sapiens) CpG-island No: 29967
tgaattaggttttggggtgtagtagtgatttcggtggttatgttttcgcgtcgttcggttattttcgtagagtaagttgagtagggggttggttggaggtcgacggcggaatttttttaacggagcgtcgttagggggcgcgcgaggtagggcggagttgcgtattttgttcgttcgcgcggttcgtcgttcgcgtcgcggcgggaaaattcgatttggtcgcgtattatcgttttttttcggtttttttgcgtttgtttagggtcggttcgtagtgatggaggaggaggcggagatcgaggagtagtagcgatttttttattaataggtataggaaaacgggggtcgggttgggttggggtaggacggcgtcgagtttttggatagaaaagtattcggtagttttcggcggttttttatcggtatttcgttttcgggcgtttttcgcggttgcgtatgcgttggtttaattgtcgcgggtggtgttgggaggcggttttcgcggtaacgcggttggattttggtttgcgttggttggggaggaagcggttttaggggagcgtgcgggcgtcggggttcggcggcgagaggttattttttggttttgcgatgaattttcggttttttttttttagatggggttttcgtgagggtataacgtcggtattagatattttaggtgacgttcgtacgcggtgggcggttcgggtcggagttttggaacgttggttttggaggcgtcgatttttcgttattgatgtagggacgcggtgcggattagttaggtttagagtt

SEQ ID NO: 29968 - DNA, 795 bp, Artificial Sequence
  chemically treated genomic DNA (Homo sapiens) CpG-island No: 29968
aactctaaacctaactaatccgcaccgcgtccctacatcaataacgaaaaatcgacgcctccaaaaccaacgttccaaaactccgacccgaaccgcccaccgcgtacgaacgtcacctaaaatatctaataccgacgttataccctcacgaaaaccccatctaaaaaaaaaaaaccgaaaattcatcgcaaaaccaaaaaataacctctcgccgccgaaccccgacgcccgcacgctcccctaaaaccgcttcctccccaaccaacgcaaaccaaaatccaaccgcgttaccgcgaaaaccgcctcccaacaccacccgcgacaattaaaccaacgcatacgcaaccgcgaaaaacgcccgaaaacgaaataccgataaaaaaccgccgaaaactaccgaatacttttctatccaaaaactcgacgccgtcctaccccaacccaacccgacccccgttttcctatacctattaataaaaaaatcgctactactcctcgatctccgcctcctcctccatcactacgaaccgaccctaaacaaacgcaaaaaaaccgaaaaaaaacgataatacgcgaccaaatcgaattttcccgccgcgacgcgaacgacgaaccgcgcgaacgaacaaaatacgcaactccgccctacctcgcgcgccccctaacgacgctccgttaaaaaaattccgccgtcgacctccaaccaaccccctactcaacttactctacgaaaataaccgaacgacgcgaaaacataaccaccgaaatcactactacaccccaaaacctaattca

SEQ ID NO: 29969 - DNA, 756 bp, Artificial Sequence
  chemically treated genomic DNA (Homo sapiens) CpG-island No: 29969
gttgcgcggtcgattttagtattagaaaatattcgttattttatttaagacgggtacgaaggttaacggacgtttttttttagaacgtttagtatatagagtaattttttacgtttatttttaaatggcgtattttaaattagtattttcgacgtttagttgtgaatttagagcggcggaaagtttttgaatttagcgttcgggtatgcgtagacgcgttgttgtggtgggcgtggtttttttcggattcggcgtttcgtttttcgtttcgtgttcgtatgcgcgattgagtcgggtggatggtattgttgtattcgggtgtttggaggttgtggtcgttttgtttttttggttaaaatcgggggagtgaggcgggtcggcgcggcgcgatatcgggtttcggaattattgtacgacggggttggacgtaagtgtcgggcggggagtgggggtaagagagtagcggtcgtaggttggagaggtttcggagtcggggtcgtttgacgggttggtgtttatagtataggttcgttgtcgttattttttcggaagtcgtagattcgggttgagtcgtcgcggatttttttttttttgggttcggcggcgttaggagaaggcgacggcgtttagatttcgttaagacggagaggggatcgcgttttttttcgggatattttaggatttttggaaaatttttcgattttttattttatagttggataagtcgaagtttcgagaaaggagcgtgattcggtt

SEQ ID NO: 29970 - DNA, 756 bp, Artificial Sequence
  chemically treated genomic DNA (Homo sapiens) CpG-island No: 29970
aaccgaatcacgctcctttctcgaaacttcgacttatccaactataaaataaaaaatcgaaaaattttccaaaaatcctaaaatatcccgaaaaaaaacgcgatcccctctccgtcttaacgaaatctaaacgccgtcgccttctcctaacgccgccgaacccaaaaaaaaaaaaatccgcgacgactcaacccgaatctacgacttccgaaaaaataacgacaacgaacctatactataaacaccaacccgtcaaacgaccccgactccgaaacctctccaacctacgaccgctactctcttacccccactccccgcccgacacttacgtccaaccccgtcgtacaataattccgaaacccgatatcgcgccgcgccgacccgcctcactcccccgattttaaccaaaaaaacaaaacgaccacaacctccaaacacccgaatacaacaataccatccacccgactcaatcgcgcatacgaacacgaaacgaaaaacgaaacgccgaatccgaaaaaaaccacgcccaccacaacaacgcgtctacgcatacccgaacgctaaattcaaaaactttccgccgctctaaattcacaactaaacgtcgaaaatactaatttaaaatacgccatttaaaaataaacgtaaaaaattactctatatactaaacgttctaaaaaaaaacgtccgttaaccttcgtacccgtcttaaataaaataacgaatattttctaatactaaaatcgaccgcgcaac

SEQ ID NO: 29971 - DNA, 756 bp, Artificial Sequence
  chemically treated genomic DNA (Homo sapiens) CpG-island No: 29971
ggtcgggttacgtttttttttcggggtttcggtttgtttagttgtgaagtgggggatcgggggattttttagggattttggggtgtttcgggggagggcgcggtttttttttcgttttggcggggtttggacgtcgtcgtttttttttggcgtcgtcggatttaggagaggagaggttcgcggcggtttagttcgggtttgcggttttcgggagggtggcggtaacgagtttgtgttgtgggtattagttcgttagacggtttcggtttcgaggtttttttagtttgcggtcgttatttttttatttttatttttcgttcgatatttacgtttagtttcgtcgtgtagtggtttcggagttcggtgtcgcgtcgcgtcggttcgttttattttttcgattttagttaagaaaataaaacggttatagtttttagatattcggatgtagtagtattatttattcggtttagtcgcgtatgcggatacggggcggagggcggggcgtcgggttcggagggagttacgtttattataataacgcgtttgcgtatgttcgggcgttgggtttaggggtttttcgtcgttttgggtttatagttggacgtcgggagtgttagtttggagtacgttatttgagagtaggcgtgagaagttgttttgtgtgttgagcgttttaaaggaaggcgttcgttggttttcgtattcgttttgagtgaggtgacgagtgttttttagtattggggtcggtcgcgtagt

SEQ ID NO: 29972 - DNA, 756 bp, Artificial Sequence
  chemically treated genomic DNA (Homo sapiens) CpG-island No: 29972
actacgcgaccgaccccaatactaaaaaacactcgtcacctcactcaaaacgaatacgaaaaccaacgaacgccttcctttaaaacgctcaacacacaaaacaacttctcacgcctactctcaaataacgtactccaaactaacactcccgacgtccaactataaacccaaaacgacgaaaaacccctaaacccaacgcccgaacatacgcaaacgcgttattataataaacgtaactccctccgaacccgacgccccgccctccgccccgtatccgcatacgcgactaaaccgaataaataatactactacatccgaatatctaaaaactataaccgttttattttcttaactaaaatcgaaaaaataaaacgaaccgacgcgacgcgacaccgaactccgaaaccactacacgacgaaactaaacgtaaatatcgaacgaaaaataaaaataaaaaaataacgaccgcaaactaaaaaaacctcgaaaccgaaaccgtctaacgaactaatacccacaacacaaactcgttaccgccaccctcccgaaaaccgcaaacccgaactaaaccgccgcgaacctctcctctcctaaatccgacgacgccaaaaaaaaacgacgacgtccaaaccccgccaaaacgaaaaaaaaaccgcgccctcccccgaaacaccccaaaatccctaaaaaatcccccgatcccccacttcacaactaaacaaaccgaaaccccgaaaaaaaaacgtaacccgacc

SEQ ID NO: 29973 - DNA, 624 bp, Artificial Sequence
  chemically treated genomic DNA (Homo sapiens) CpG-island No: 29973
tagggcgcggtttggggagggaggaggtagggcggtggttgggtaagagaagagtcgcgtttattacggaatatttttgcgtatgcgtcgggggttagtttttggtatttttgacgcgtttgttaacgtagttttttagtgcgtattcggacgtaggaggtggaggttgtggaattcgtcgttcgaaagtagggattaaaagttttatttcgttttacgtttcgaaaggaaggcgtttgttgagttttttttttagtcgtgagggaggcgtcgacggcgtgcggtaagttttttgttgacggggttttttaggattatcgtagtggttttttaggagtgagggacgggaaacgtgtcgggtttcgcgtttggggaacgtagcgtttcgttttaaggtcgcggttttagggcgtcgagcggggtttttagggttcggtttttgtcgcggcggtcgtcgttcgcgtcgtggtttcgtttttcggaggtttttcgattgtggttttcgggtggttaggcgtcggttttcgcgattcgatttgtttttttttttttggttttttaggaagttttgagttgaggtttgcgggatttttttcggagaaagcgtaggttaaagtcgtaggt

SEQ ID NO: 29974 - DNA, 624 bp, Artificial Sequence
  chemically treated genomic DNA (Homo sapiens) CpG-island No: 29974
acctacgactttaacctacgctttctccgaaaaaaatcccgcaaacctcaactcaaaacttcctaaaaaaccaaaaaaaaaaaaacaaatcgaatcgcgaaaaccgacgcctaaccacccgaaaaccacaatcgaaaaacctccgaaaaacgaaaccacgacgcgaacgacgaccgccgcgacaaaaaccgaaccctaaaaaccccgctcgacgccctaaaaccgcgaccttaaaacgaaacgctacgttccccaaacgcgaaacccgacacgtttcccgtccctcactcctaaaaaaccactacgataatcctaaaaaaccccgtcaacaaaaaacttaccgcacgccgtcgacgcctccctcacgactaaaaaaaaaactcaacaaacgccttcctttcgaaacgtaaaacgaaataaaacttttaatccctactttcgaacgacgaattccacaacctccacctcctacgtccgaatacgcactaaaaaactacgttaacaaacgcgtcaaaaataccaaaaactaacccccgacgcatacgcaaaaatattccgtaataaacgcgactcttctcttacccaaccaccgccctacctcctccctccccaaaccgcgcccta

SEQ ID NO: 29975 - DNA, 624 bp, Artificial Sequence
  chemically treated genomic DNA (Homo sapiens) CpG-island No: 29975
atttgcggttttagtttgcgtttttttcggaaaggatttcgtaagttttaatttaggattttttaaaaaattaagagagaaaaaataagtcgagtcgcggaagtcggcgtttggttattcggaagttatagtcggggaattttcgggaggcggagttacggcgcgggcggcgatcgtcgcgataggaatcgagttttagaaatttcgttcggcgttttgaggtcgcggttttgaagcgaaacgttgcgttttttaaacgcggggttcggtacgtttttcgttttttatttttgagagattattgcggtggttttgagagatttcgttagtagaaaatttatcgtacgtcgtcgacgttttttttacgattgagagaaaggtttaatagacgtttttttttcggaacgtaagacgaagtggggtttttagtttttgttttcgaacggcgaattttataatttttattttttacgttcggatgcgtattgagggattacgttagtagacgcgttaaaagtattagaagttggttttcggcgtatgcgtagagatgtttcgtggtgggcgcggttttttttttgtttaattatcgttttgttttttttttttttaagtcgcgttttg

SEQ ID NO: 29976 - DNA, 624 bp, Artificial Sequence
  chemically treated genomic DNA (Homo sapiens) CpG-island No: 29976
caaaacgcgacttaaaaaaaaaaaaaacaaaacgataattaaacaaaaaaaaaaccgcgcccaccacgaaacatctctacgcatacgccgaaaaccaacttctaatacttttaacgcgtctactaacgtaatccctcaatacgcatccgaacgtaaaaaataaaaattataaaattcgccgttcgaaaacaaaaactaaaaaccccacttcgtcttacgttccgaaaaaaaaacgtctattaaacctttctctcaatcgtaaaaaaaacgtcgacgacgtacgataaattttctactaacgaaatctctcaaaaccaccgcaataatctctcaaaaataaaaaacgaaaaacgtaccgaaccccgcgtttaaaaaacgcaacgtttcgcttcaaaaccgcgacctcaaaacgccgaacgaaatttctaaaactcgattcctatcgcgacgatcgccgcccgcgccgtaactccgcctcccgaaaattccccgactataacttccgaataaccaaacgccgacttccgcgactcgacttattttttctctcttaattttttaaaaaatcctaaattaaaacttacgaaatcctttccgaaaaaaacgcaaactaaaaccgcaaat

SEQ ID NO: 29977 - DNA, 530 bp, Artificial Sequence
  chemically treated genomic DNA (Homo sapiens) CpG-island No: 29977
acgtgaacgatatgtggtcgggttcgtcgtaggagaaggattcgttttcgatttcgcggtcgggcgggtttagtcggttgtcgtcgcggtttaggagtcgttttttttttagaagttttcggttttattttcgcgtttcgagtcggttttcgtttaggagtcggaggagtaagtttaggtttcgttttcgaaggcgttattagcggaagtataggcgttattcgcggttatattcgcggagtcggtcgcgatttcgtagtcgtcgttatcgagagaggcgttacgggtttattaggagatattatcggtttttttcgcggtatcggtttcggtttcgtagtaggtcgcgttttcggggaaggtcgtattgcggaagggcgtacgcgatcgcgcggggatagcgttattacggttttggtcgtatagtgtattcggaggagtatagtagatggagggatagatttaggacgaggtcgcggagtagaattttttttcgtttaagtgaaaaaggtgggtgggttatttatttt

SEQ ID NO: 29978 - DNA, 530 bp, Artificial Sequence
  chemically treated genomic DNA (Homo sapiens) CpG-island No: 29978
aaaataaataacccacccacctttttcacttaaacgaaaaaaaattctactccgcgacctcgtcctaaatctatccctccatctactatactcctccgaatacactatacgaccaaaaccgtaataacgctatccccgcgcgatcgcgtacgcccttccgcaatacgaccttccccgaaaacgcgacctactacgaaaccgaaaccgataccgcgaaaaaaaccgataatatctcctaataaacccgtaacgcctctctcgataacgacgactacgaaatcgcgaccgactccgcgaatataaccgcgaataacgcctatacttccgctaataacgccttcgaaaacgaaacctaaacttactcctccgactcctaaacgaaaaccgactcgaaacgcgaaaataaaaccgaaaacttctaaaaaaaaaacgactcctaaaccgcgacgacaaccgactaaacccgcccgaccgcgaaatcgaaaacgaatccttctcctacgacgaacccgaccacatatcgttcacgt

SEQ ID NO: 29979 - DNA, 530 bp, Artificial Sequence
  chemically treated genomic DNA (Homo sapiens) CpG-island No: 29979
aaggtaaatgatttatttattttttttatttaagcgaaagggggttttgtttcgcgatttcgttttggatttgtttttttatttgttgtgttttttcgggtatattgtgcgattaaagtcgtagtagcgttgttttcgcgcgatcgcgtacgttttttcgtagtacgatttttttcgagagcgcgatttgttacgggatcgggatcggtatcgcgaaggagatcggtagtattttttggtgaattcgtagcgtttttttcggtaacggcggttgcgggatcgcgatcggtttcgcgagtatgatcgcgagtagcgtttgtattttcgttggtggcgttttcgggaacgggatttggatttgttttttcgatttttggacgaaaatcggttcgagacgcgggaatgggatcgagagtttttggaaaaagagcggtttttagatcgcgacgatagtcggttggattcgttcgatcgcgaggtcgagggcgaattttttttttgcggcgagttcggttatatgtcgtttacgt

SEQ ID NO: 29980 - DNA, 530 bp, Artificial Sequence
  chemically treated genomic DNA (Homo sapiens) CpG-island No: 29980
acgtaaacgacatataaccgaactcgccgcaaaaaaaaaattcgccctcgacctcgcgatcgaacgaatccaaccgactatcgtcgcgatctaaaaaccgctctttttccaaaaactctcgatcccattcccgcgtctcgaaccgattttcgtccaaaaatcgaaaaaacaaatccaaatcccgttcccgaaaacgccaccaacgaaaatacaaacgctactcgcgatcatactcgcgaaaccgatcgcgatcccgcaaccgccgttaccgaaaaaaacgctacgaattcaccaaaaaatactaccgatctccttcgcgataccgatcccgatcccgtaacaaatcgcgctctcgaaaaaaatcgtactacgaaaaaacgtacgcgatcgcgcgaaaacaacgctactacgactttaatcgcacaatatacccgaaaaaacacaacaaataaaaaaacaaatccaaaacgaaatcgcgaaacaaaaccccctttcgcttaaataaaaaaaataaataaatcatttacctt

SEQ ID NO: 29981 - DNA, 668 bp, Artificial Sequence
  chemically treated genomic DNA (Homo sapiens) CpG-island No: 29981
cgttttcgatacggagtatttttttagttttttcgtttttaggattgacgtttaggtttttttttcgttttagtttaatttgttttttcgtttcgtaaatttcggtttttttttatttttaattttttttattatacgtttttttttttttattttttacgttacgaatttcgatttttagatttttttttttcgtttttttttttttttttttttttttttaattttttattcgtttttattttagattttgcgcgtatttaatttagtcgttcgttttcgttcggtttttcgaagttatggcgggatttgggggttggagggatagggaggttacggatttgggttatttgtcggtgagtagaggacgttcgtcgtttttcgaaatgtttttttttggcgggttttgcgtattagagggagggagcggacgtttttaaaacgggttagattaggatttcgacgggtttttcgggcgcggaaggggattttgggagtcggtatgcggaaaaggcgttttttgggtatcgggatcgtattaaattttaacgaaaggtaaaggtacggggcggtgggaaggagagatagagaaagagatggtagtggggtgttgcggattttaaatagcggggtattttaaatatgtgattcgttttgtttagcggagt

SEQ ID NO: 29982 - DNA, 668 bp, Artificial Sequence
  chemically treated genomic DNA (Homo sapiens) CpG-island No: 29982
actccgctaaacaaaacgaatcacatatttaaaataccccgctatttaaaatccgcaacaccccactaccatctctttctctatctctccttcccaccgccccgtacctttacctttcgttaaaatttaatacgatcccgatacccaaaaaacgccttttccgcataccgactcccaaaatccccttccgcgcccgaaaaacccgtcgaaatcctaatctaacccgttttaaaaacgtccgctccctccctctaatacgcaaaacccgccaaaaaaaaacatttcgaaaaacgacgaacgtcctctactcaccgacaaataacccaaatccgtaacctccctatccctccaacccccaaatcccgccataacttcgaaaaaccgaacgaaaacgaacgactaaattaaatacgcgcaaaatctaaaataaaaacgaataaaaaattaaaaaaaaaaaaaaaaaaaaaaaaaaacgaaaaaaaaaaatctaaaaatcgaaattcgtaacgtaaaaaataaaaaaaaaaaaacgtataataaaaaaaattaaaaataaaaaaaaaccgaaatttacgaaacgaaaaaacaaattaaactaaaacgaaaaaaaaacctaaacgtcaatcctaaaaacgaaaaaactaaaaaaatactccgtatcgaaaacg

SEQ ID NO: 29983 - DNA, 668 bp, Artificial Sequence
  chemically treated genomic DNA (Homo sapiens) CpG-island No: 29983
gtttcgttagataaggcgggttatatatttaaaatgtttcgttgtttagggttcgtagtattttattgttatttttttttttgttttttttttttatcgtttcgtgtttttgtttttcgttggagtttggtgcggtttcggtgtttagggggcgtttttttcgtatgtcggtttttaggattttttttcgcgttcgggggattcgtcgaagttttggtttagttcgttttgagggcgttcgttttttttttttggtacgtagaattcgttaaaagagagtatttcggggggcgacgggcgttttttatttatcggtaggtggtttagattcgtgatttttttgtttttttagtttttaggtttcgttatggtttcgaggagtcgaacgggagcgggcgattgaattgggtgcgcgtagagtttgaggtggaagcggatgaagagttgaagggaggagagaggaaggaggagggcgggagagaggagtttggggatcggggttcgtggcgtgggagatagaggaggggaaacgtgtagtgaaaagagttgggagtggagggaaatcggagtttgcgaggcgggaaagtaagttgggttaaggcgagagaggagtttgagcgttagttttggagacgaagaagttagaagggtgtttcgtgtcgagagcg

SEQ ID NO: 29984 - DNA, 668 bp, Artificial Sequence
  chemically treated genomic DNA (Homo sapiens) CpG-island No: 29984
cgctctcgacacgaaacacccttctaacttcttcgtctccaaaactaacgctcaaactcctctctcgccttaacccaacttactttcccgcctcgcaaactccgatttccctccactcccaactcttttcactacacgtttcccctcctctatctcccacgccacgaaccccgatccccaaactcctctctcccgccctcctccttcctctctcctcccttcaactcttcatccgcttccacctcaaactctacgcgcacccaattcaatcgcccgctcccgttcgactcctcgaaaccataacgaaacctaaaaactaaaaaaacaaaaaaatcacgaatctaaaccacctaccgataaataaaaaacgcccgtcgccccccgaaatactctcttttaacgaattctacgtaccaaaaaaaaaaaacgaacgccctcaaaacgaactaaaccaaaacttcgacgaatcccccgaacgcgaaaaaaaatcctaaaaaccgacatacgaaaaaaacgccccctaaacaccgaaaccgcaccaaactccaacgaaaaacaaaaacacgaaacgataaaaaaaaaaaacaaaaaaaaaaataacaataaaatactacgaaccctaaacaacgaaacattttaaatatataacccgccttatctaacgaaac

SEQ ID NO: 29985 - DNA, 643 bp, Artificial Sequence
  chemically treated genomic DNA (Homo sapiens) CpG-island No: 29985
aacgcggcgaacggtcgcgttgggaggttgaggcggggttttagcgagtcggcggttgggaaataatggcgcgagcgtgacgtgggtcggaggcgtcgcggcggcgcggaggaaggggttgtcgtggggcgggggtcgtatcgagggagttgggaggcgtgcggcgttcgcgagcgcgttggcggggattcggtttaaggagaggggttttggggttatggtttttgggggtcgggggcgggggtaggcggcggtcgttattttggggtcgcgtgttcggtcgcgtatttttttatttagtttttcgttcgttcgtttttttttcgttcgtttacggggttcgtcgtatttatcggttttagcgtacggtaataattttagcgcgtaattgtcgtagtcgttttaacgcgcgtttttttcgttttcgtcgttcggtatcgtttcgcgtcgtttttttgttcgcgttcggttagggatcggcgcgttgtttcgttttttagtttcgtcgtagagttcggcgaagtcgacgttttttgatcgcgttgcgtttgtttgtttcgcgggtttggagatttttaaacgatggaatatcggttttgtttttttgagggtttttattttttggtattttgtttgcgttttt

SEQ ID NO: 29986 - DNA, 643 bp, Artificial Sequence
  chemically treated genomic DNA (Homo sapiens) CpG-island No: 29986
aaaaacgcaaacaaaataccaaaaaataaaaaccctcaaaaaaacaaaaccgatattccatcgtttaaaaatctccaaacccgcgaaacaaacaaacgcaacgcgatcaaaaaacgtcgacttcgccgaactctacgacgaaactaaaaaacgaaacaacgcgccgatccctaaccgaacgcgaacaaaaaaacgacgcgaaacgataccgaacgacgaaaacgaaaaaaacgcgcgttaaaacgactacgacaattacgcgctaaaattattaccgtacgctaaaaccgataaatacgacgaaccccgtaaacgaacgaaaaaaaaacgaacgaacgaaaaactaaataaaaaaatacgcgaccgaacacgcgaccccaaaataacgaccgccgcctacccccgcccccgacccccaaaaaccataaccccaaaacccctctccttaaaccgaatccccgccaacgcgctcgcgaacgccgcacgcctcccaactccctcgatacgacccccgccccacgacaaccccttcctccgcgccgccgcgacgcctccgacccacgtcacgctcgcgccattatttcccaaccgccgactcgctaaaaccccgcctcaacctcccaacgcgaccgttcgccgcgtt

SEQ ID NO: 29987 - DNA, 643 bp, Artificial Sequence
  chemically treated genomic DNA (Homo sapiens) CpG-island No: 29987
aggggcgtaggtagaatgttaagggatggagatttttagaagggtaaagtcggtgttttatcgtttgaagatttttagattcgcgggatagatagacgtagcgcggttagggagcgtcggtttcgtcgaattttgcggcggagttgggggacggaatagcgcgtcggtttttggtcgggcgcgagtagaggggcggcgcggggcggtgtcgggcggcgggggcggggagggcgcgcgttgaggcggttgcggtagttgcgcgttgggattgttgtcgtgcgttggagtcggtgagtgcggcgggtttcgtgggcgggcggggaaggagcgggcgaacggggagttaggtggggaggtgcgcggtcgaatacgcgattttagggtagcggtcgtcgtttgttttcgttttcggtttttagggattatggttttaaggtttttttttttaggtcgagttttcgttagcgcgttcgcggacgtcgtacgttttttaattttttcggtgcggttttcgttttacggtagttttttttttcgcgtcgtcgcgacgttttcggtttacgttacgttcgcgttattgttttttagtcgtcggttcgttgggatttcgttttagttttttagcgcggtcgttcgtcgcgtt

SEQ ID NO: 29988 - DNA, 643 bp, Artificial Sequence
  chemically treated genomic DNA (Homo sapiens) CpG-island No: 29988
aacgcgacgaacgaccgcgctaaaaaactaaaacgaaatcccaacgaaccgacgactaaaaaacaataacgcgaacgtaacgtaaaccgaaaacgtcgcgacgacgcgaaaaaaaaaactaccgtaaaacgaaaaccgcaccgaaaaaattaaaaaacgtacgacgtccgcgaacgcgctaacgaaaactcgacctaaaaaaaaaaaccttaaaaccataatccctaaaaaccgaaaacgaaaacaaacgacgaccgctaccctaaaatcgcgtattcgaccgcgcacctccccacctaactccccgttcgcccgctccttccccgcccgcccacgaaacccgccgcactcaccgactccaacgcacgacaacaatcccaacgcgcaactaccgcaaccgcctcaacgcgcgccctccccgcccccgccgcccgacaccgccccgcgccgcccctctactcgcgcccgaccaaaaaccgacgcgctattccgtcccccaactccgccgcaaaattcgacgaaaccgacgctccctaaccgcgctacgtctatctatcccgcgaatctaaaaatcttcaaacgataaaacaccgactttacccttctaaaaatctccatcccttaacattctacctacgcccct

SEQ ID NO: 29989 - DNA, 559 bp, Artificial Sequence
  chemically treated genomic DNA (Homo sapiens) CpG-island No: 29989
gaagcggtgtttaggtcggggggcgtttagaggaaaggcggtttttttttgtttcgggacggggcgtttttttttttcgtttttttttcgtttttcgttagtttgtttcggttttcggggttttggtttagcgtttcgtattttcggtcggcgcgggggttgtacgtatttggtgtatgttgggttggtggcgtcgcgggttgcgggcgtggagcgcggattcgggatcgtagcggcggagcgtacggtggggggtttcgtgtggttgtggtagtggtagtggttgaggtgttggcggtggagatatcggcggcggcgcgggttttgtacgtattttcgcggtcgatcgttagtcgttgtatcggggaggtggtattagttttaaatgtcgttcgtttcgtttacgttttcgttagggcgtaggttagcggacgtttcggagggtaggaaattcgtcggcgcgcgcgtagggagggggatcgatagttaggggtcgggagagtttaggattgaggattttttgggaatttttttttttttagtagtcgaacgttagggg

SEQ ID NO: 29990 - DNA, 559 bp, Artificial Sequence
  chemically treated genomic DNA (Homo sapiens) CpG-island No: 29990
cccctaacgttcgactactaaaaaaaaaaaaattcccaaaaaatcctcaatcctaaactctcccgacccctaactatcgatccccctccctacgcgcgcgccgacgaatttcctaccctccgaaacgtccgctaacctacgccctaacgaaaacgtaaacgaaacgaacgacatttaaaactaataccacctccccgatacaacgactaacgatcgaccgcgaaaatacgtacaaaacccgcgccgccgccgatatctccaccgccaacacctcaaccactaccactaccacaaccacacgaaaccccccaccgtacgctccgccgctacgatcccgaatccgcgctccacgcccgcaacccgcgacgccaccaacccaacatacaccaaatacgtacaacccccgcgccgaccgaaaatacgaaacgctaaaccaaaaccccgaaaaccgaaacaaactaacgaaaaacgaaaaaaaaacgaaaaaaaaaaacgccccgtcccgaaacaaaaaaaaaccgcctttcctctaaacgccccccgacctaaacaccgcttc

SEQ ID NO: 29991 - DNA, 559 bp, Artificial Sequence
  chemically treated genomic DNA (Homo sapiens) CpG-island No: 29991
tttttggcgttcggttattaaagggaaggggatttttagggggtttttaattttggattttttcgatttttagttgtcggtttttttttttgcgcgcgcgtcggcgggttttttatttttcgaggcgttcgttggtttgcgttttggcggggacgtgggcggggcgggcggtatttaaggttggtgttattttttcggtgtagcggttggcgatcggtcgcggaggtgcgtgtagggttcgcgtcgtcgtcggtatttttatcgttaatattttagttattgttattgttatagttatacgaggttttttatcgtgcgtttcgtcgttgcggtttcggattcgcgttttacgttcgtagttcgcggcgttattagtttagtatgtattaggtgcgtgtagttttcgcgtcggtcgaggatgcgagacgttgggttaaggtttcggggatcggagtaggttgacgggaagcgaggaaaaggcgaagaggagaaacgtttcgtttcggggtaaggggaggtcgttttttttttgagcgtttttcggtttgggtatcgtttt

SEQ ID NO: 29992 - DNA, 559 bp, Artificial Sequence
  chemically treated genomic DNA (Homo sapiens) CpG-island No: 29992
aaaacgatacccaaaccgaaaaacgctcaaaaaaaaaacgacctccccttaccccgaaacgaaacgtttctcctcttcgccttttcctcgcttcccgtcaacctactccgatccccgaaaccttaacccaacgtctcgcatcctcgaccgacgcgaaaactacacgcacctaatacatactaaactaataacgccgcgaactacgaacgtaaaacgcgaatccgaaaccgcaacgacgaaacgcacgataaaaaacctcgtataactataacaataacaataactaaaatattaacgataaaaataccgacgacgacgcgaaccctacacgcacctccgcgaccgatcgccaaccgctacaccgaaaaaataacaccaaccttaaataccgcccgccccgcccacgtccccgccaaaacgcaaaccaacgaacgcctcgaaaaataaaaaacccgccgacgcgcgcgcaaaaaaaaaaaccgacaactaaaaatcgaaaaaatccaaaattaaaaaccccctaaaaatccccttccctttaataaccgaacgccaaaaa

SEQ ID NO: 29993 - DNA, 756 bp, Artificial Sequence
  chemically treated genomic DNA (Homo sapiens) CpG-island No: 29993
gttcgcgtaacgtttcgttgtatttgcggaggagggagagcgtttgggtgcgttatggaacgttcgtatcgcgtttttcgcgtttcgttcgtttgttcgcgaacggttgcgagttattttcgtattttttatatttttgttttttttagtcgtgcgcgggagagggggttagtatcgtaatgtttggaagagcggtcgcgcgaggggtttggggataggatagtttttcggtttcgaggcgaggttcgaatgcgcgtatattcggcgagcggggcggcgattggggagtcggagacgagagagggcggaagtgcgggacgtttcgtagtatttttataggtcgcggagttcgagattttcgtcgggtggcgagggcgtgggtgtttacgttatgcgtgacgtttgagtcgcggttcgagtttacgagttgggtgaggtcgttgtcgtcgtcgtcgttacgaagtttggcgggcggcgcggagtttcggggagttggttttttcgggcgggtacgtgacggggttggtagcgttcgggtttcggttgggagggggaagaagcggggagtagaaggtcgcgggcgggcggttggcgcgttgtgtatttaggtcgtgtgttggggttttttttttttaggagtcggcggggggaggggagggggaggggttatcgtttcgttttttttttttcgtaatgttgacgtaatttataaatagtggaataaaaggattaattttttcggagttttgttgaaat

SEQ ID NO: 29994 - DNA, 756 bp, Artificial Sequence
  chemically treated genomic DNA (Homo sapiens) CpG-island No: 29994
atttcaacaaaactccgaaaaaattaatccttttattccactatttataaattacgtcaacattacgaaaaaaaaaaaacgaaacgataacccctccccctcccctccccccgccgactcctaaaaaaaaaaaaccccaacacacgacctaaatacacaacgcgccaaccgcccgcccgcgaccttctactccccgcttcttccccctcccaaccgaaacccgaacgctaccaaccccgtcacgtacccgcccgaaaaaaccaactccccgaaactccgcgccgcccgccaaacttcgtaacgacgacgacgacaacgacctcacccaactcgtaaactcgaaccgcgactcaaacgtcacgcataacgtaaacacccacgccctcgccacccgacgaaaatctcgaactccgcgacctataaaaatactacgaaacgtcccgcacttccgccctctctcgtctccgactccccaatcgccgccccgctcgccgaatatacgcgcattcgaacctcgcctcgaaaccgaaaaactatcctatccccaaacccctcgcgcgaccgctcttccaaacattacgatactaaccccctctcccgcgcacgactaaaaaaaacaaaaatataaaaaatacgaaaataactcgcaaccgttcgcgaacaaacgaacgaaacgcgaaaaacgcgatacgaacgttccataacgcacccaaacgctctccctcctccgcaaatacaacgaaacgttacgcgaac

SEQ ID NO: 29995 - DNA, 756 bp, Artificial Sequence
  chemically treated genomic DNA (Homo sapiens) CpG-island No: 29995
gttttagtaaagtttcgaggaagttggtttttttgttttattatttatagattgcgttaatattgcgaaaaggagaaggcggagcggtggtttttttttttttttttttttcgtcggtttttgggagagaaaagttttagtatacgatttaagtatatagcgcgttagtcgttcgttcgcggttttttgtttttcgtttttttttttttttagtcggggttcgaacgttgttaatttcgttacgtgttcgttcgggaaaattagtttttcggggtttcgcgtcgttcgttaggtttcgtggcggcggcggcggtagcggttttatttagttcgtgggttcgggtcgcggtttaggcgttacgtatagcgtgggtatttacgttttcgttattcgacgaggatttcgggtttcgcgatttgtgggagtgttgcggggcgtttcgtattttcgttttttttcgttttcggttttttagtcgtcgtttcgttcgtcgagtgtgcgcgtattcgggtttcgtttcggagtcgggaggttgttttgtttttaggtttttcgcgcggtcgtttttttaggtattgcggtgttagttttttttttcgcgtacgattggggagggtagaggtgtgagggatgcgggggtggttcgtagtcgttcgcgggtaggcgggcggagcgcgggaagcgcggtgcgggcgttttatggcgtatttagacgttttttttttttcgtaggtgtagcggggcgttgcgcgagt

SEQ ID NO: 29996 - DNA, 756 bp, Artificial Sequence
  chemically treated genomic DNA (Homo sapiens) CpG-island No: 29996
actcgcgcaacgccccgctacacctacgaaaaaaaaaaaacgtctaaatacgccataaaacgcccgcaccgcgcttcccgcgctccgcccgcctacccgcgaacgactacgaaccacccccgcatccctcacacctctaccctccccaatcgtacgcgaaaaaaaaaactaacaccgcaatacctaaaaaaacgaccgcgcgaaaaacctaaaaacaaaacaacctcccgactccgaaacgaaacccgaatacgcgcacactcgacgaacgaaacgacgactaaaaaaccgaaaacgaaaaaaaacgaaaatacgaaacgccccgcaacactcccacaaatcgcgaaacccgaaatcctcgtcgaataacgaaaacgtaaatacccacgctatacgtaacgcctaaaccgcgacccgaacccacgaactaaataaaaccgctaccgccgccgccgccacgaaacctaacgaacgacgcgaaaccccgaaaaactaattttcccgaacgaacacgtaacgaaattaacaacgttcgaaccccgactaaaaaaaaaaaaaaacgaaaaacaaaaaaccgcgaacgaacgactaacgcgctatatacttaaatcgtatactaaaacttttctctcccaaaaaccgacgaaaaaaaaaaaaaaaaaaaaaccaccgctccgccttctccttttcgcaatattaacgcaatctataaataataaaacaaaaaaaccaacttcctcgaaactttactaaaac

SEQ ID NO: 29997 - DNA, 729 bp, Artificial Sequence
  chemically treated genomic DNA (Homo sapiens) CpG-island No: 29997
cggcgcggttcgcgtttttttttcggttcgggttgtggggcggttcgtttttttcggcgtttcggcgagttatttttttttttcggttcgaggttcgggttagggtttggggagcgcgcgcggttggagtattgtttgcgtatatcgtcgttttattcgtttatgagttcggttttcgagcgtcgagtcgttattgcggttttttttttttttttttttttttttttttttttttttttttcggttgcggtttttttcggttcgagttagtatttttcgcggtttcgttcggttcggtttttttcgcgcggattacggttttttcgaagcgagaatagtttagaagttggacgaaaagttttagtgcgacgtcgcgagtttcgattttttttatttcgttttcgggcgcgggtttcggtttttgttcgcggttcgtcgtcgcgtttattgttcgtcgtcggtcggggaggaggtggtagttggggttgggggcggtgtttgtttgtttgttcgttagcgcgattggttagttgcgggattttaagggggagggtttacgtcgcgtttcggcggttatttttaaaagtaggttatttattttgtttttgtcgttttcgttgttcgtacgttcgcgcgttttttttgatttcgtttttttttttttcgatttttttttggagtttttgttattttttttttttttttgttggtttttaaaatttatagtga

SEQ ID NO: 29998 - DNA, 729 bp, Artificial Sequence
  chemically treated genomic DNA (Homo sapiens) CpG-island No: 29998
tcactataaattttaaaaaccaacaaaaaaaaaaaaaaaataacaaaaactccaaaaaaaaatcgaaaaaaaaaaaaacgaaatcaaaaaaaacgcgcgaacgtacgaacaacgaaaacgacaaaaacaaaataaataacctacttttaaaaataaccgccgaaacgcgacgtaaaccctcccccttaaaatcccgcaactaaccaatcgcgctaacgaacaaacaaacaaacaccgcccccaaccccaactaccacctcctccccgaccgacgacgaacaataaacgcgacgacgaaccgcgaacaaaaaccgaaacccgcgcccgaaaacgaaataaaaaaaatcgaaactcgcgacgtcgcactaaaacttttcgtccaacttctaaactattctcgcttcgaaaaaaccgtaatccgcgcgaaaaaaaccgaaccgaacgaaaccgcgaaaaatactaactcgaaccgaaaaaaaccgcaaccgaaaaaaaaaaaaaaaaaaaaaaaaaaaaaaaaaaaaaaaaaaccgcaataacgactcgacgctcgaaaaccgaactcataaacgaataaaacgacgatatacgcaaacaatactccaaccgcgcgcgctccccaaaccctaacccgaacctcgaaccgaaaaaaaaaaataactcgccgaaacgccgaaaaaaacgaaccgccccacaacccgaaccgaaaaaaaaacgcgaaccgcgccg

SEQ ID NO: 29999 - DNA, 729 bp, Artificial Sequence
  chemically treated genomic DNA (Homo sapiens) CpG-island No: 29999
ttattgtggattttggaaattagtagaaagaggaaagaggtagtaagagttttagagagaagtcgaggaagagagagacggggttagagagagcgcgcgggcgtgcgagtagcgaaagcgataggggtaaagtgagtgatttgtttttgggggtgatcgtcggagcgcggcgtgagtttttttttttgggatttcgtagttgattagtcgcgttgacggatagatagatagatatcgtttttagttttagttattatttttttttcggtcggcggcggatagtggacgcggcggcgagtcgcgggtaggggtcggagttcgcgttcggaggcggggtggagggggtcggggttcgcggcgtcgtattgaaatttttcgtttaatttttgggttgttttcgtttcggaggagtcgtggttcgcgcgggggaagtcgagtcgagcggagtcgcgagaagtgttagttcgggtcgggaggagtcgtagtcggaggagggggaggaggaagaagagaaggaagaggagagggggtcgtagtggcgattcggcgttcggaagtcgggtttatggacgggtgaggcggcggtgtgcgtagatagtgttttagtcgcgcgcgttttttaggttttggttcgggtttcgggtcggggaggaagagtagttcgtcgaggcgtcgaggagagcgggtcgttttatagttcgagtcggagagggagcgcgagtcgcgtcg

SEQ ID NO: 30000 - DNA, 729 bp, Artificial Sequence
  chemically treated genomic DNA (Homo sapiens) CpG-island No: 30000
cgacgcgactcgcgctccctctccgactcgaactataaaacgacccgctctcctcgacgcctcgacgaactactcttcctccccgacccgaaacccgaaccaaaacctaaaaaacgcgcgcgactaaaacactatctacgcacaccgccgcctcacccgtccataaacccgacttccgaacgccgaatcgccactacgaccccctctcctcttccttctcttcttcctcctccccctcctccgactacgactcctcccgacccgaactaacacttctcgcgactccgctcgactcgacttcccccgcgcgaaccacgactcctccgaaacgaaaacaacccaaaaattaaacgaaaaatttcaatacgacgccgcgaaccccgaccccctccaccccgcctccgaacgcgaactccgacccctacccgcgactcgccgccgcgtccactatccgccgccgaccgaaaaaaaaataataactaaaactaaaaacgatatctatctatctatccgtcaacgcgactaatcaactacgaaatcccaaaaaaaaaaactcacgccgcgctccgacgatcacccccaaaaacaaatcactcactttacccctatcgctttcgctactcgcacgcccgcgcgctctctctaaccccgtctctctcttcctcgacttctctctaaaactcttactacctctttcctctttctactaatttccaaaatccacaataa

SEQ ID NO: 30001 - DNA, 1025 bp, Artificial Sequence
  chemically treated genomic DNA (Homo sapiens) CpG-island No: 30001
tttgcggtattttatcgttttagagtacgatatttgataggtcgtgggtgtcgataaggttaagtaatgggatgtttttgtcgttcgtcgttacgattattcgtgtttttgaattttttacgacgtagcggatttcgtcgacggtgaatatcgaattgatcggatttattatcgtatcgtatttggcgatcgcgtagtacgcgattagttatttttagtagttcgggtcgtataacgtgattcggttatttggttcgatatcgatcgttacgagatcgttggcgattcggttcgattttgcgtttagttcgtagaaattgaacgatttcggtttcgacgattaacgttattttgttatcgaagcgacgcgtcgtttcgggaagaattttattaatcgtttcgtttatcgtcggagtttacgttgggaaacgaacgagtgttgtcgcgtttgttgtgacgtacggatcgattttttggtggttagtattagttgatttttttggttatgtcgatttaaaagggttcgcgtagtttgtatttttgtagtttgtcggttgtcgtgtcggcgagttcggtgcggaattcgacggacgtcgggtatttgtattcggcgagtttcgatttgtagtattcgattagttggcgttcggtgatcgttgttttatcgacggggacgatgagggttttgatcgttttattttatttttcgtgcggtatttcgattatcgttatttcgtttattttcggatgggagaatagtacgttttcgatttcgatcgagttgacgtttttttcgtcggagatgatgacgttttttttgcggtcggtgatcgcgaagtagttttcgtcgtcgacgatttcgtcgtcgtcggtgtggaattaatcgttttcgatcgtttcggtagttgttttcgggtttcgttagtagttggtgaggatgtggttcgttcgtgcgatgatttcgtttttcgggttgattttgacggcgacgtcgatggcgggtgcgtttgttcgttttagttatg

SEQ ID NO: 30002 - DNA, 1025 bp, Artificial Sequence
  chemically treated genomic DNA (Homo sapiens) CpG-island No: 30002
cataactaaaacgaacaaacgcacccgccatcgacgtcgccgtcaaaatcaacccgaaaaacgaaatcatcgcacgaacgaaccacatcctcaccaactactaacgaaacccgaaaacaactaccgaaacgatcgaaaacgattaattccacaccgacgacgacgaaatcgtcgacgacgaaaactacttcgcgatcaccgaccgcaaaaaaaacgtcatcatctccgacgaaaaaaacgtcaactcgatcgaaatcgaaaacgtactattctcccatccgaaaataaacgaaataacgataatcgaaataccgcacgaaaaataaaataaaacgatcaaaaccctcatcgtccccgtcgataaaacaacgatcaccgaacgccaactaatcgaatactacaaatcgaaactcgccgaatacaaatacccgacgtccgtcgaattccgcaccgaactcgccgacacgacaaccgacaaactacaaaaatacaaactacgcgaacccttttaaatcgacataaccaaaaaaatcaactaatactaaccaccaaaaaatcgatccgtacgtcacaacaaacgcgacaacactcgttcgtttcccaacgtaaactccgacgataaacgaaacgattaataaaattcttcccgaaacgacgcgtcgcttcgataacaaaataacgttaatcgtcgaaaccgaaatcgttcaatttctacgaactaaacgcaaaatcgaaccgaatcgccaacgatctcgtaacgatcgatatcgaaccaaataaccgaatcacgttatacgacccgaactactaaaaataactaatcgcgtactacgcgatcgccaaatacgatacgataataaatccgatcaattcgatattcaccgtcgacgaaatccgctacgtcgtaaaaaattcaaaaacacgaataatcgtaacgacgaacgacaaaaacatcccattacttaaccttatcgacacccacgacctatcaaatatcgtactctaaaacgataaaataccgcaaa

SEQ ID NO: 30003 - DNA, 1025 bp, Artificial Sequence
  chemically treated genomic DNA (Homo sapiens) CpG-island No: 30003
tataattgggacgggtaggcgtattcgttatcggcgtcgtcgttagggttagttcggaaggcgagattatcgtacgggcgaattatatttttattaattattggcgaaattcggaagtaattgtcgaggcgatcgaggacggttggttttatatcggcgacggcgggatcgtcgacgacgagggttatttcgcgattatcgatcgtaagaaggacgttattattttcggcggagagaacgttagttcgatcgaggtcgaagacgtgttgtttttttattcggaggtgagcgaggtagcggtgatcggggtgtcgtacgagaagtggggtgagacggttaaggtttttatcgttttcgtcgatggagtaacgattatcgagcgttagttgatcgagtattgtaagtcgaagttcgtcggatataagtgttcgacgttcgtcgagtttcgtatcgaattcgtcggtacggtaatcggtaaattgtagaagtataagttgcgcgaatttttttggatcggtatgattaggaaggttaattgatgttgattattaagaagtcggttcgtgcgttatagtagacgcggtagtattcgttcgttttttaacgtaggtttcggcggtgagcgagacgattggtgagatttttttcgaggcggcgcgtcgtttcggtgataaggtggcgttgatcgtcggagtcggagtcgtttagtttttgcgagttggacgtaaggtcgaatcgggtcgttaacggtttcgtggcggtcggtgtcgagttaggtgatcgggttacgttgtacggttcgaattgttgggaatggttggtcgcgtattacgcgatcgttaagtgcggtgcggtggtgaattcgattagttcgatgtttatcgtcgacgaagttcgttgcgtcgtgggagatttaggggtacgggtggtcgtggcggcgagcgataaaggtattttattgtttgattttgtcggtatttacggtttgttaagtgtcgtgttttggggcgatgaggtgtcgtagg

SEQ ID NO: 30004 - DNA, 1025 bp, Artificial Sequence
  chemically treated genomic DNA (Homo sapiens) CpG-island No: 30004
cctacgacacctcatcgccccaaaacacgacacttaacaaaccgtaaataccgacaaaatcaaacaataaaatacctttatcgctcgccgccacgaccacccgtacccctaaatctcccacgacgcaacgaacttcgtcgacgataaacatcgaactaatcgaattcaccaccgcaccgcacttaacgatcgcgtaatacgcgaccaaccattcccaacaattcgaaccgtacaacgtaacccgatcacctaactcgacaccgaccgccacgaaaccgttaacgacccgattcgaccttacgtccaactcgcaaaaactaaacgactccgactccgacgatcaacgccaccttatcaccgaaacgacgcgccgcctcgaaaaaaatctcaccaatcgtctcgctcaccgccgaaacctacgttaaaaaacgaacgaatactaccgcgtctactataacgcacgaaccgacttcttaataatcaacatcaattaaccttcctaatcataccgatccaaaaaaattcgcgcaacttatacttctacaatttaccgattaccgtaccgacgaattcgatacgaaactcgacgaacgtcgaacacttatatccgacgaacttcgacttacaatactcgatcaactaacgctcgataatcgttactccatcgacgaaaacgataaaaaccttaaccgtctcaccccacttctcgtacgacaccccgatcaccgctacctcgctcacctccgaataaaaaaacaacacgtcttcgacctcgatcgaactaacgttctctccgccgaaaataataacgtccttcttacgatcgataatcgcgaaataaccctcgtcgtcgacgatcccgccgtcgccgatataaaaccaaccgtcctcgatcgcctcgacaattacttccgaatttcgccaataattaataaaaatataattcgcccgtacgataatctcgccttccgaactaaccctaacgacgacgccgataacgaatacgcctacccgtcccaattata

SEQ ID NO: 30005 - DNA, 577 bp, Artificial Sequence
  chemically treated genomic DNA (Homo sapiens) CpG-island No: 30005
cgttttcgacgcggaggtagtcggtgaggttaaggtggtggagttttgggtagtttcgagttaatttttgaatcgcggcgttttttacgttggcgttgacggttagagagaggttgcggagattagcgtcgcgtttttgcgttaggtatacgatggtttcgtttttgagttggcggtaggcggtgagatttagtttttttagggtcgggtagcgattagcgaggtcgcgtagcgttagttcgtttatttagttatagtgcgcgagcgataggcgttgtaggcgtgggtagttttcggttaaagttttaagcgttcggcgatttagttgttcgtagtcgtttaacgttatatttcgtagttgcggatttcgcgttagtatcggtattaggttttcgtttgatagttattcgtgatacggcgttagtgttagtttttgtagtttttcggtatttcgtagtagtcgggttaatgcggttcgcgggatttgcggatttatttgcgggcggggaggtattttaatttttagttcgtttcgtattttttagtcgtttatgtatttttgatttgagtttttttt

SEQ ID NO: 30006 - DNA, 577 bp, Artificial Sequence
  chemically treated genomic DNA (Homo sapiens) CpG-island No: 30006
aaaaaaaactcaaatcaaaaatacataaacgactaaaaaatacgaaacgaactaaaaattaaaatacctccccgcccgcaaataaatccgcaaatcccgcgaaccgcattaacccgactactacgaaataccgaaaaactacaaaaactaacactaacgccgtatcacgaataactatcaaacgaaaacctaataccgatactaacgcgaaatccgcaactacgaaatataacgttaaacgactacgaacaactaaatcgccgaacgcttaaaactttaaccgaaaactacccacgcctacaacgcctatcgctcgcgcactataactaaataaacgaactaacgctacgcgacctcgctaatcgctacccgaccctaaaaaaactaaatctcaccgcctaccgccaactcaaaaacgaaaccatcgtatacctaacgcaaaaacgcgacgctaatctccgcaacctctctctaaccgtcaacgccaacgtaaaaaacgccgcgattcaaaaattaactcgaaactacccaaaactccaccaccttaacctcaccgactacctccgcgtcgaaaacg

SEQ ID NO: 30007 - DNA, 577 bp, Artificial Sequence
  chemically treated genomic DNA (Homo sapiens) CpG-island No: 30007
gaaaagaatttaggttaggggtgtataggcggttgaggagtgcgggacgggttgagagttggggtgttttttcgttcgtaggtgggttcgtagatttcgcgggtcgtattggttcggttgttgcgggatgtcgaggggttgtaggagttggtattggcgtcgtgttacgaatggttgttagacgaggatttggtgtcggtgttggcgcggaattcgtagttgcggagtgtggcgttgggcggttgcgggtaattgagtcgtcgggcgtttggggttttggtcgagggttgtttacgtttgtagcgtttgtcgttcgcgtattgtgattgggtggacgggttggcgttgcgcggtttcgttgatcgttgttcggttttggaggagttggattttatcgtttgtcgttagtttaaggacgaggttatcgtgtatttggcgtagaggcgcggcgttggttttcgtagtttttttttggtcgttaacgttaacgtgggggacgtcgcggtttaagagttggttcggaattgtttagaattttattattttgattttatcggttgttttcgcgtcggaagcg

SEQ ID NO: 30008 - DNA, 577 bp, Artificial Sequence
  chemically treated genomic DNA (Homo sapiens) CpG-island No: 30008
cgcttccgacgcgaaaacaaccgataaaatcaaaataataaaattctaaacaattccgaaccaactcttaaaccgcgacgtcccccacgttaacgttaacgaccaaaaaaaaactacgaaaaccaacgccgcgcctctacgccaaatacacgataacctcgtccttaaactaacgacaaacgataaaatccaactcctccaaaaccgaacaacgatcaacgaaaccgcgcaacgccaacccgtccacccaatcacaatacgcgaacgacaaacgctacaaacgtaaacaaccctcgaccaaaaccccaaacgcccgacgactcaattacccgcaaccgcccaacgccacactccgcaactacgaattccgcgccaacaccgacaccaaatcctcgtctaacaaccattcgtaacacgacgccaataccaactcctacaacccctcgacatcccgcaacaaccgaaccaatacgacccgcgaaatctacgaacccacctacgaacgaaaaaacaccccaactctcaacccgtcccgcactcctcaaccgcctatacacccctaacctaaattcttttc

SEQ ID NO: 30009 - DNA, 545 bp, Artificial Sequence
  chemically treated genomic DNA (Homo sapiens) CpG-island No: 30009
  unsure (162)
agcgtttcgtcgttcgagggtattttttggtagattcggcggcggcgatagtttggtcggatagtgtttcgtgcgtaggcgcggagttagatttcgttgtagtttttatcgttcggggagttttatttatcgagttcgttcgttggttcgttagtgtttttntcgtcgtttgttttttttagtttttttagtgtttgttttacgtatttcgatggcggagttgcggtttagcggcgttttcggttttatcgcgttttcggtttttggttcgattgttttttcggttttcgtttcgttttttttttcgggattgtacgttatttacggagagtgtcgtcgtttttattttgattagtcgaattcgttttaggttatcgttatcgttaagtattggtatgttttgggtcgcggggagacggataggcgcgggttggaaagggttaaagcgtcgagggcgaagtaatttgtgggaggtgggaggaggggtagagaatggttaaagtatttagaaggagggttttttgttgcgagggaaggagttaagg

SEQ ID NO: 30010 - DNA, 545 bp, Artificial Sequence
  chemically treated genomic DNA (Homo sapiens) CpG-island No: 30010
  unsure (384)
ccttaactccttccctcgcaacaaaaaaccctccttctaaatactttaaccattctctacccctcctcccacctcccacaaattacttcgccctcgacgctttaaccctttccaacccgcgcctatccgtctccccgcgacccaaaacataccaatacttaacgataacgataacctaaaacgaattcgactaatcaaaataaaaacgacgacactctccgtaaataacgtacaatcccgaaaaaaaaaacgaaacgaaaaccgaaaaaacaatcgaaccaaaaaccgaaaacgcgataaaaccgaaaacgccgctaaaccgcaactccgccatcgaaatacgtaaaacaaacactaaaaaaactaaaaaaaacaaacgacganaaaaacactaacgaaccaacgaacgaactcgataaataaaactccccgaacgataaaaactacaacgaaatctaactccgcgcctacgcacgaaacactatccgaccaaactatcgccgccgccgaatctaccaaaaaataccctcgaacgacgaaacgct

SEQ ID NO: 30011 - DNA, 545 bp, Artificial Sequence
  chemically treated genomic DNA (Homo sapiens) CpG-island No: 30011
  unsure (384)
ttttaattttttttttcgtagtaagaagttttttttttgagtgttttaattattttttatttttttttttattttttataaattatttcgttttcggcgttttaattttttttagttcgcgtttgttcgttttttcgcggtttagagtatattagtatttgacgatagcggtaatttggagcgggttcggttggttagggtaaaggcggcggtatttttcgtagatggcgtgtagtttcgggggaaagagcgaagcgaaggtcgggggggtagtcgggttaggggtcgggggcgcggtggggtcgggggcgtcgttaggtcgtagtttcgttatcggggtgcgtagggtaggtattgggggaattggagagggtaaacgacggngagagtattgacgggttagcgggcggattcggtgggtgagatttttcgagcgatgggggttgtagcgaggtttagtttcgcgtttgcgtacggggtattgttcggttaggttgtcgtcgtcgtcgagtttgttagaaggtgttttcgggcggcggggcgtt

SEQ ID NO: 30012 - DNA, 545 bp, Artificial Sequence
  chemically treated genomic DNA (Homo sapiens) CpG-island No: 30012
  unsure (162)
aacgccccgccgcccgaaaacaccttctaacaaactcgacgacgacgacaacctaaccgaacaataccccgtacgcaaacgcgaaactaaacctcgctacaacccccatcgctcgaaaaatctcacccaccgaatccgcccgctaacccgtcaatactctcnccgtcgtttaccctctccaattcccccaatacctaccctacgcaccccgataacgaaactacgacctaacgacgcccccgaccccaccgcgcccccgacccctaacccgactacccccccgaccttcgcttcgctctttcccccgaaactacacgccatctacgaaaaataccgccgcctttaccctaaccaaccgaacccgctccaaattaccgctatcgtcaaatactaatatactctaaaccgcgaaaaaacgaacaaacgcgaactaaaaaaaattaaaacgccgaaaacgaaataatttataaaaaataaaaaaaaaaataaaaaataattaaaacactcaaaaaaaaaacttcttactacgaaaaaaaaaattaaaa

SEQ ID NO: 30013 - DNA, 675 bp, Artificial Sequence
  chemically treated genomic DNA (Homo sapiens) CpG-island No: 30013
tattatcgtttttacggtttcgtcgcgttattcgaggtcgcgtcgttttggtgggtttgtttttcggtttacgttacgattttgcgtcggttttgcgtcgtcgtcggtatttcgggattgtcgttgtaggcgttcgcggcggtggtcgagagttgggcgtcgtggtcggagggcgggagtttgtaaatcgagttgcgttggggtcgcgtggagcgcgcgcggggtttttttttgtagttatcggatttcgtgcgtcgggagttgcggcgcgcgtacggtatttattttcgcgtcgacgtgcgcgttatttagcgtcgcggttagtttttgttgtaggcgacgtcgcgcgtgttcgagttcgattatcgcgtggagtggcgcgtgcggcgtcggttcgatagcggcgatagtagtttagttcgggaagtcgcggagcgcggtcgttttaggaagagtaagggtttgagttgaagtcgtcgtaaggtttaggggcgggttcgcgtgtacgcgtttggtttttttttgtgtgtgtcgtcgtcgataggtagaagtgagtttttatttgtgcgcgggaggcggacgcgttgtttatttgtttttttggttttttttatgattgtcggttagttttttgtatttgtttttttcgttttattgttggacggtgggagaagg

SEQ ID NO: 30014 - DNA, 675 bp, Artificial Sequence
  chemically treated genomic DNA (Homo sapiens) CpG-island No: 30014
ccttctcccaccgtccaacaataaaacgaaaaaaacaaatacaaaaaactaaccgacaatcataaaaaaaaccaaaaaaacaaataaacaacgcgtccgcctcccgcgcacaaataaaaactcacttctacctatcgacgacgacacacacaaaaaaaaaccaaacgcgtacacgcgaacccgcccctaaaccttacgacgacttcaactcaaacccttactcttcctaaaacgaccgcgctccgcgacttcccgaactaaactactatcgccgctatcgaaccgacgccgcacgcgccactccacgcgataatcgaactcgaacacgcgcgacgtcgcctacaacaaaaactaaccgcgacgctaaataacgcgcacgtcgacgcgaaaataaataccgtacgcgcgccgcaactcccgacgcacgaaatccgataactacaaaaaaaaaccccgcgcgcgctccacgcgaccccaacgcaactcgatttacaaactcccgccctccgaccacgacgcccaactctcgaccaccgccgcgaacgcctacaacgacaatcccgaaataccgacgacgacgcaaaaccgacgcaaaatcgtaacgtaaaccgaaaaacaaacccaccaaaacgacgcgacctcgaataacgcgacgaaaccgtaaaaacgataata

SEQ ID NO: 30015 - DNA, 675 bp, Artificial Sequence
  chemically treated genomic DNA (Homo sapiens) CpG-island No: 30015
tttttttttatcgtttagtaataaagcgagagaaataagtgtaggaaattggtcggtagttatgggagaagttaaaaagataggtgagtagcgcgttcgtttttcgcgtataggtgagggtttatttttgtttgtcggcggcggtatatataggaaagagttaagcgcgtgtacgcgggttcgtttttaggttttgcggcggttttagtttaggtttttgttttttttggggcggtcgcgtttcgcggtttttcgggttgggttgttgtcgtcgttgtcgggtcggcgtcgtacgcgttattttacgcggtggtcgggttcgagtacgcgcggcgtcgtttgtagtaggaattggtcgcggcgttgggtgacgcgtacgtcggcgcgggggtaggtgtcgtacgcgcgtcgtagttttcggcgtacgaagttcggtagttgtagaggggggtttcgcgcgcgttttacgcggttttagcgtagttcggtttgtaggttttcgtttttcggttacggcgtttagttttcggttatcgtcgcgggcgtttgtagcgatagtttcgagatgtcggcggcggcgtagggtcggcgtagggtcgtggcgtaggtcggagggtaggtttattagggcggcgcggtttcgggtggcgcggcggggtcgtagaagcggtggta

SEQ ID NO: 30016 - DNA, 675 bp, Artificial Sequence
  chemically treated genomic DNA (Homo sapiens) CpG-island No: 30016
taccaccgcttctacgaccccgccgcgccacccgaaaccgcgccgccctaataaacctaccctccgacctacgccacgaccctacgccgaccctacgccgccgccgacatctcgaaactatcgctacaaacgcccgcgacgataaccgaaaactaaacgccgtaaccgaaaaacgaaaacctacaaaccgaactacgctaaaaccgcgtaaaacgcgcgcgaaacccccctctacaactaccgaacttcgtacgccgaaaactacgacgcgcgtacgacacctacccccgcgccgacgtacgcgtcacccaacgccgcgaccaattcctactacaaacgacgccgcgcgtactcgaacccgaccaccgcgtaaaataacgcgtacgacgccgacccgacaacgacgacaacaacccaacccgaaaaaccgcgaaacgcgaccgccccaaaaaaaacaaaaacctaaactaaaaccgccgcaaaacctaaaaacgaacccgcgtacacgcgcttaactctttcctatatataccgccgccgacaaacaaaaataaaccctcacctatacgcgaaaaacgaacgcgctactcacctatctttttaacttctcccataactaccgaccaatttcctacacttatttctctcgctttattactaaacgataaaaaaaaa

SEQ ID NO: 30017 - DNA, 600 bp, Artificial Sequence
  chemically treated genomic DNA (Homo sapiens) CpG-island No: 30017
gggtatcgttgttttttcgagttatatcgtcggcggtaggaatgggcgtagcggagagggttgcggtgcgtagggtttttcgtttttcgcggggtcgattagtttgaagacgcggttgacggcggtgggcgtttcggggttttagtttgggagaggtagtcgtaaagtagcggcgttttttacgacgttttatagcggtttttaataggtagttggaaagggtagttgggggcgcggttaggagggtacgtggtgcgagggattggtcgcgagaaagcggagttaaaaggggcgggagttgtgagttatttttacgtaatagggtagaggttcgtttcgtttcggttggtagggagttaataggggaggcgcgacgggtcgggacgggtattcgtcggtttcgttttttgttcggttttacgtgataaaggtgtgttttgcgtacgcgcgttcgtaatttggttattatgacgacgaggttttcgtcggtttttgaggacgcgcgcggagtagttttggtagtagttgtggattggttagagtgattggaggtgtttttttcgcgttttttaagtttacggggttttcgtatttttgagt

SEQ ID NO: 30018 - DNA, 600 bp, Artificial Sequence
  chemically treated genomic DNA (Homo sapiens) CpG-island No: 30018
actcaaaaatacgaaaaccccgtaaacttaaaaaacgcgaaaaaaacacctccaatcactctaaccaatccacaactactaccaaaactactccgcgcgcgtcctcaaaaaccgacgaaaacctcgtcgtcataataaccaaattacgaacgcgcgtacgcaaaacacacctttatcacgtaaaaccgaacaaaaaacgaaaccgacgaatacccgtcccgacccgtcgcgcctcccctattaactccctaccaaccgaaacgaaacgaacctctaccctattacgtaaaaataactcacaactcccgccccttttaactccgctttctcgcgaccaatccctcgcaccacgtaccctcctaaccgcgcccccaactaccctttccaactacctattaaaaaccgctataaaacgtcgtaaaaaacgccgctactttacgactacctctcccaaactaaaaccccgaaacgcccaccgccgtcaaccgcgtcttcaaactaatcgaccccgcgaaaaacgaaaaaccctacgcaccgcaaccctctccgctacgcccattcctaccgccgacgatataactcgaaaaaacaacgataccc

SEQ ID NO: 30019 - DNA, 600 bp, Artificial Sequence
  chemically treated genomic DNA (Homo sapiens) CpG-island No: 30019
atttagaggtgcgaaggtttcgtagatttggaggacgcgaggaaaatatttttaattattttggttagtttatagttattgttaagattgtttcgcgcgcgtttttaggaatcggcgagggtttcgtcgttatggtaattagattgcgaacgcgcgtgcgtaagatatatttttgttacgtgaggtcgggtagggggcggggtcggcgaatgttcgtttcgattcgtcgcgttttttttgttagttttttgttagtcgaggcggggcgaatttttgttttgttgcgtgggagtgatttatagttttcgttttttttggtttcgttttttcgcggttagtttttcgtattacgtgtttttttggtcgcgtttttagttgttttttttaattgtttgttggaagtcgttgtaaaacgtcgtgaggagcgtcgttgttttacggttgttttttttagattagagtttcggagcgtttatcgtcgttagtcgcgtttttaagttagtcggtttcgcggagagcgagagattttgcgtatcgtagtttttttcgttgcgtttatttttgtcgtcggcgatgtaattcggggaggtagcggtgttt

SEQ ID NO: 30020 - DNA, 600 bp, Artificial Sequence
  chemically treated genomic DNA (Homo sapiens) CpG-island No: 30020
aaacaccgctacctccccgaattacatcgccgacgacaaaaataaacgcaacgaaaaaaactacgatacgcaaaatctctcgctctccgcgaaaccgactaacttaaaaacgcgactaacgacgataaacgctccgaaactctaatctaaaaaaaacaaccgtaaaacaacgacgctcctcacgacgttttacaacgacttccaacaaacaattaaaaaaaacaactaaaaacgcgaccaaaaaaacacgtaatacgaaaaactaaccgcgaaaaaacgaaaccaaaaaaaacgaaaactataaatcactcccacgcaacaaaacaaaaattcgccccgcctcgactaacaaaaaactaacaaaaaaaacgcgacgaatcgaaacgaacattcgccgaccccgccccctacccgacctcacgtaacaaaaatatatcttacgcacgcgcgttcgcaatctaattaccataacgacgaaaccctcgccgattcctaaaaacgcgcgcgaaacaatcttaacaataactataaactaaccaaaataattaaaaatattttcctcgcgtcctccaaatctacgaaaccttcgcacctctaaat

SEQ ID NO: 30021 - DNA, 515 bp, Artificial Sequence
  chemically treated genomic DNA (Homo sapiens) CpG-island No: 30021
cgcggttcggcgggaagatggggagttttggacggagcgagtcggcgcgtcgttgttatttgggtcgttttcgtcgcggggtatttttttgaagtagtcgttgagcgataggttgtggcggatggagttttgttagttcgttttgttgcgtttgtagaaagggaagttattagttacgtattggtagatttggttgagcgttagttttcgtagcggcgcgttttggatggttatggcgatgagcgtcgagtaggagtagggcggtcgtattagttttagtagtttttgttggtcggagaggtttagttaggcgaggtcggcgttcgttaggtcgttcggggcgtcgaggagcgggtcgggagtttcgtagttcggggtcgcgtagggcggcgtaggttcgggattcgaagcgtaggatttggggttgagcgttggcgcgtttatttataggagggggttttcgtttatcgcgtttagattttttggtttatagttcggggggtgcgcggtggttt

SEQ ID NO: 30022 - DNA, 515 bp, Artificial Sequence
  chemically treated genomic DNA (Homo sapiens) CpG-island No: 30022
aaaccaccgcgcaccccccgaactataaaccaaaaaatctaaacgcgataaacgaaaaccccctcctataaataaacgcgccaacgctcaaccccaaatcctacgcttcgaatcccgaacctacgccgccctacgcgaccccgaactacgaaactcccgacccgctcctcgacgccccgaacgacctaacgaacgccgacctcgcctaactaaacctctccgaccaacaaaaactactaaaactaatacgaccgccctactcctactcgacgctcatcgccataaccatccaaaacgcgccgctacgaaaactaacgctcaaccaaatctaccaatacgtaactaataacttccctttctacaaacgcaacaaaacgaactaacaaaactccatccgccacaacctatcgctcaacgactacttcaaaaaaataccccgcgacgaaaacgacccaaataacaacgacgcgccgactcgctccgtccaaaactccccatcttcccgccgaaccgcg

SEQ ID NO: 30023 - DNA, 515 bp, Artificial Sequence
  chemically treated genomic DNA (Homo sapiens) CpG-island No: 30023
aggttatcgcgtatttttcgggttatgagttaggggatttgggcgcggtgggcgggggtttttttttgtgggtgaacgcgttagcgtttagttttaagttttacgtttcgggtttcgggtttgcgtcgttttacgcggtttcgagttacggggttttcggttcgtttttcggcgtttcgggcggtttggcgggcgtcgatttcgtttggttgagttttttcggttagtaggagttgttgaggttggtgcggtcgttttatttttattcggcgtttatcgttatggttatttagagcgcgtcgttgcggaagttgacgtttagttagatttattagtacgtggttggtaatttttttttttataagcgtagtaaggcgggttggtagaattttattcgttataatttgtcgtttaacgattgttttaagaaggtgtttcgcgacgaggacgatttaggtaatagcggcgcgtcggttcgtttcgtttaggattttttattttttcgtcgggtcgcg

SEQ ID NO: 30024 - DNA, 515 bp, Artificial Sequence
  chemically treated genomic DNA (Homo sapiens) CpG-island No: 30024
cgcgacccgacgaaaaaataaaaaatcctaaacgaaacgaaccgacgcgccgctattacctaaatcgtcctcgtcgcgaaacaccttcttaaaacaatcgttaaacgacaaattataacgaataaaattctaccaacccgccttactacgcttataaaaaaaaaaattaccaaccacgtactaataaatctaactaaacgtcaacttccgcaacgacgcgctctaaataaccataacgataaacgccgaataaaaataaaacgaccgcaccaacctcaacaactcctactaaccgaaaaaactcaaccaaacgaaatcgacgcccgccaaaccgcccgaaacgccgaaaaacgaaccgaaaaccccgtaactcgaaaccgcgtaaaacgacgcaaacccgaaacccgaaacgtaaaacttaaaactaaacgctaacgcgttcacccacaaaaaaaaacccccgcccaccgcgcccaaatcccctaactcataacccgaaaaatacgcgataacct

SEQ ID NO: 30025 - DNA, 803 bp, Artificial Sequence
  chemically treated genomic DNA (Homo sapiens) CpG-island No: 30025
cgttttggatcggacgtttttttgatttttttttttttttttgtgcgattcgtttcgagtttatagtcgttcgcggttttggttgtagggattttaagttcgtagtttcgtttggttttacgggtttcgtagtttcgattgttttggatcgtattacgattttttaaggtttttagggttgtggtttgggagtttcgtttaatgcgcggtttttttgttcggttcgggatatttcgttttaaagaaattcgtttcgtcggggtttttgggttattcgggattcggggttagggatagagggcgattatattgcgtaagagatcgtaatgaagttcgtagatttttaggttggagtcgtagagcgaggtggcgaggtggagaacgcggggttgggtttggatagcggttttggggtcgtttggagttttcgtttttttaattcggaaggtagcggattgatatttgcgtcgaagtcgcgcgtattttacggagggtcgggattttggaaatttcgaacgttttagtagtttagggtagttatcgttttttttaagtcggggagttcggggtttcgttaggttttttcgcgttgtgatttcgggcgcgtagagcggagagcgttaagttttttgttgggtgtcggaggacgcgtcgaaaatagggacgtttttgtagtgcgttcgatattagttttttagttttgttgtcgttcggggttgttgtagttcgggttatttcggttttttaagttgttcggttttcggttttttttgtttttcgcgttgtggggtggcggaggatgg

SEQ ID NO: 30026 - DNA, 803 bp, Artificial Sequence
  chemically treated genomic DNA (Homo sapiens) CpG-island No: 30026
ccatcctccgccaccccacaacgcgaaaaacaaaaaaaaccgaaaaccgaacaacttaaaaaaccgaaataacccgaactacaacaaccccgaacgacaacaaaactaaaaaactaatatcgaacgcactacaaaaacgtccctattttcgacgcgtcctccgacacccaacaaaaaacttaacgctctccgctctacgcgcccgaaatcacaacgcgaaaaaacctaacgaaaccccgaactccccgacttaaaaaaaacgataactaccctaaactactaaaacgttcgaaatttccaaaatcccgaccctccgtaaaatacgcgcgacttcgacgcaaatatcaatccgctaccttccgaattaaaaaaacgaaaactccaaacgaccccaaaaccgctatccaaacccaaccccgcgttctccacctcgccacctcgctctacgactccaacctaaaaatctacgaacttcattacgatctcttacgcaatataatcgccctctatccctaaccccgaatcccgaataacccaaaaaccccgacgaaacgaatttctttaaaacgaaatatcccgaaccgaacaaaaaaaccgcgcattaaacgaaactcccaaaccacaaccctaaaaaccttaaaaaatcgtaatacgatccaaaacaatcgaaactacgaaacccgtaaaaccaaacgaaactacgaacttaaaatccctacaaccaaaaccgcgaacgactataaactcgaaacgaatcgcacaaaaaaaaaaaaaaaaatcaaaaaaacgtccgatccaaaacg

SEQ ID NO: 30027 - DNA, 803 bp, Artificial Sequence
  chemically treated genomic DNA (Homo sapiens) CpG-island No: 30027
ttatttttcgttattttatagcgcggggagtaggggaggtcgaaagtcgggtagtttggggggtcgggataattcgggttgtagtaatttcgggcggtagtaggattggagagttggtgtcggacgtattgtagagacgtttttgttttcggcgcgtttttcgatatttagtagagagtttggcgtttttcgttttgcgcgttcgaggttatagcgcggagaaatttggcggggtttcggatttttcggtttgggaaaagcgatgattgttttgaattgttggggcgttcgaaatttttagggtttcgatttttcgtggggtacgcgcgatttcggcgtagatgttagttcgttgtttttcgggttgagggagcgaggattttagacgattttagggtcgttgtttaggtttagtttcgcgttttttatttcgttatttcgttttgcggttttagtttggagatttacggattttattgcgattttttgcgtagtgtagtcgttttttatttttagtttcgagtttcgggtaatttaggggtttcggcgaggcgagtttttttggggcgagatgtttcgagtcgagtaaaggggtcgcgtattggacggggtttttaagttatagttttgggggttttgaggagtcgtggtacggtttagggtagtcggggttgcggggttcgtgaagttagacgaggttacggatttagggtttttgtaattaagatcgcgagcgattgtggattcgggacggatcgtataaaggaggaagggggaattagaggggcgttcggtttaggacg

SEQ ID NO: 30028 - DNA, 803 bp, Artificial Sequence
  chemically treated genomic DNA (Homo sapiens) CpG-island No: 30028
cgtcctaaaccgaacgcccctctaattcccccttcctcctttatacgatccgtcccgaatccacaatcgctcgcgatcttaattacaaaaaccctaaatccgtaacctcgtctaacttcacgaaccccgcaaccccgactaccctaaaccgtaccacgactcctcaaaacccccaaaactataacttaaaaaccccgtccaatacgcgacccctttactcgactcgaaacatctcgccccaaaaaaactcgcctcgccgaaacccctaaattacccgaaactcgaaactaaaaataaaaaacgactacactacgcaaaaaatcgcaataaaatccgtaaatctccaaactaaaaccgcaaaacgaaataacgaaataaaaaacgcgaaactaaacctaaacaacgaccctaaaatcgtctaaaatcctcgctccctcaacccgaaaaacaacgaactaacatctacgccgaaatcgcgcgtaccccacgaaaaatcgaaaccctaaaaatttcgaacgccccaacaattcaaaacaatcatcgcttttcccaaaccgaaaaatccgaaaccccgccaaatttctccgcgctataacctcgaacgcgcaaaacgaaaaacgccaaactctctactaaatatcgaaaaacgcgccgaaaacaaaaacgtctctacaatacgtccgacaccaactctccaatcctactaccgcccgaaattactacaacccgaattatcccgaccccccaaactacccgactttcgacctcccctactccccgcgctataaaataacgaaaaataa

SEQ ID NO: 30029 - DNA, 620 bp, Artificial Sequence
  chemically treated genomic DNA (Homo sapiens) CpG-island No: 30029
ggcgaggaagtcgcgtttgaagtcgcgcggtttggggattaggggaaggcgggcggcgggagtttcggttgggggtgcgcggggattttcgatttcgcgttcggggttggcgtgttttaggtcggcgtcgtggggtcggcgcgcggggggtagggcgtagaggaggtgggggagtcggtaggaggaggggaggagcgtcgggttcgttatttttaggcgtcggttttgcggttgttgaatcggaagtcgtagggaggattcggggaaataaagacgtcggagaatgatttttagcgaggtcgtttgagtcggggttcgcgtatagtttcgttagttttcggtatgggcgatcgtagcgggtagtaggagcgttcggtttcgtattttttaggggttttcgtgggtattagcgtcgtcgttgtgaacgggttgttgtataacggtttttattcgtcgttagtttagtcgtcgtacgtttgtagtcggggtttagtgggcggtagcgacgcggcgttttagcgtttttcgtttttgtcggagttgtagtcgtagttattgtttttttagtatgatttttcggttaagaaatgtcggttgcggaggaggatggattcggggag

SEQ ID NO: 30030 - DNA, 620 bp, Artificial Sequence
  chemically treated genomic DNA (Homo sapiens) CpG-island No: 30030
ctccccgaatccatcctcctccgcaaccgacatttcttaaccgaaaaatcatactaaaaaaacaataactacgactacaactccgacaaaaacgaaaaacgctaaaacgccgcgtcgctaccgcccactaaaccccgactacaaacgtacgacgactaaactaacgacgaataaaaaccgttatacaacaacccgttcacaacgacgacgctaatacccacgaaaacccctaaaaaatacgaaaccgaacgctcctactacccgctacgatcgcccataccgaaaactaacgaaactatacgcgaaccccgactcaaacgacctcgctaaaaatcattctccgacgtctttatttccccgaatcctccctacgacttccgattcaacaaccgcaaaaccgacgcctaaaaataacgaacccgacgctcctcccctcctcctaccgactcccccacctcctctacgccctaccccccgcgcgccgaccccacgacgccgacctaaaacacgccaaccccgaacgcgaaatcgaaaatccccgcgcacccccaaccgaaactcccgccgcccgccttcccctaatccccaaaccgcgcgacttcaaacgcgacttcctcgcc

SEQ ID NO: 30031 - DNA, 620 bp, Artificial Sequence
  chemically treated genomic DNA (Homo sapiens) CpG-island No: 30031
tttttcgagtttattttttttcgtagtcggtattttttggtcggggagttatgttgagggagtagtggttgcggttgtagtttcggtaggagcgggaggcgttggggcgtcgcgtcgttgtcgtttattggatttcggttgtagacgtgcggcggttggattggcggcggatggaagtcgttgtgtagtagttcgtttatagcggcggcgttggtgtttacgggggtttttggagagtgcgggatcgagcgtttttgttgttcgttgcggtcgtttatgtcgggggttggcggggttgtgcgcgggtttcggtttaggcggtttcgttggaggttatttttcggcgtttttattttttcggattttttttgcggttttcgatttagtagtcgtagagtcggcgtttggggatggcgaattcggcgttttttttttttttttgtcgatttttttattttttttgcgttttgtttttcgcgcgtcggttttacggcgtcggtttggagtacgttagtttcgggcgcggaatcggggattttcgcgtatttttagtcggggttttcgtcgttcgtttttttttgatttttaggtcgcgcgattttaaacgcggttttttcgtt

SEQ ID NO: 30032 - DNA, 620 bp, Artificial Sequence
  chemically treated genomic DNA (Homo sapiens) CpG-island No: 30032
aacgaaaaaaccgcgtttaaaatcgcgcgacctaaaaatcaaaaaaaaacgaacgacgaaaaccccgactaaaaatacgcgaaaatccccgattccgcgcccgaaactaacgtactccaaaccgacgccgtaaaaccgacgcgcgaaaaacaaaacgcaaaaaaaataaaaaaatcgacaaaaaaaaaaaaaaaacgccgaattcgccatccccaaacgccgactctacgactactaaatcgaaaaccgcaaaaaaaatccgaaaaaataaaaacgccgaaaaataacctccaacgaaaccgcctaaaccgaaacccgcgcacaaccccgccaacccccgacataaacgaccgcaacgaacaacaaaaacgctcgatcccgcactctccaaaaacccccgtaaacaccaacgccgccgctataaacgaactactacacaacgacttccatccgccgccaatccaaccgccgcacgtctacaaccgaaatccaataaacgacaacgacgcgacgccccaacgcctcccgctcctaccgaaactacaaccgcaaccactactccctcaacataactccccgaccaaaaaataccgactacgaaaaaaaataaactcgaaaaa

SEQ ID NO: 30033 - DNA, 678 bp, Artificial Sequence
  chemically treated genomic DNA (Homo sapiens) CpG-island No: 30033
tttttcgtcgtcgcggtttttcgtcgtcgtcgttattttttcgggcgtttagcggttgcggatttttcggaggttttagggaaagcggagagagaaagcgggaggaggttcgggcgagggcgaggcgggtagaggtcgtagagtgggtttaatcgcggggaaggggggcggtgggaggagggagtagagagagtcggcgtcgtagttagtagtttgttggcggggagaggaaatttgaggcgtcgaggaggagttcgagaattatttcgcgggaatttttttcgtcggttttcggtttcggcgtataggcgcgttcgcgttcgtttttcgcgggttcgtaggcggggtcgggcgtcgttattcggatatttgtgagggcgcggacgcgtaggcgggttttttttttttgcgaggttttcgcgaacgtttagggtcgttttttgggggatgcggttttttcgcggtggtttcgtcgggagatttagttttaggcgtttgttttcggttggttttttatgtgacgtcgtagttttttttcggtttttttcgaaattttcgcgttggggcggttcgggggttgcgggcgcgaattcggtttttttatattcgagatggggttggaggggtggtaggagggcgttttttgtagttcggttggttttcgatggtaattttttt

SEQ ID NO: 30034 - DNA, 678 bp, Artificial Sequence
  chemically treated genomic DNA (Homo sapiens) CpG-island No: 30034
aaaaaaattaccatcgaaaaccaaccgaactacaaaaaacgccctcctaccacccctccaaccccatctcgaatataaaaaaaccgaattcgcgcccgcaacccccgaaccgccccaacgcgaaaatttcgaaaaaaaccgaaaaaaaactacgacgtcacataaaaaaccaaccgaaaacaaacgcctaaaactaaatctcccgacgaaaccaccgcgaaaaaaccgcatcccccaaaaaacgaccctaaacgttcgcgaaaacctcgcaaaaaaaaaaaacccgcctacgcgtccgcgccctcacaaatatccgaataacgacgcccgaccccgcctacgaacccgcgaaaaacgaacgcgaacgcgcctatacgccgaaaccgaaaaccgacgaaaaaaattcccgcgaaataattctcgaactcctcctcgacgcctcaaatttcctctccccgccaacaaactactaactacgacgccgactctctctactccctcctcccaccgccccccttccccgcgattaaacccactctacgacctctacccgcctcgccctcgcccgaacctcctcccgctttctctctccgctttccctaaaacctccgaaaaatccgcaaccgctaaacgcccgaaaaaataacgacgacgacgaaaaaccgcgacgacgaaaaa

SEQ ID NO: 30035 - DNA, 678 bp, Artificial Sequence
  chemically treated genomic DNA (Homo sapiens) CpG-island No: 30035
agaagggttattatcgggagttagtcgggttgtaggaggcgtttttttgttatttttttagttttatttcgggtgtgggaagatcgagttcgcgttcgtagttttcgggtcgttttagcgcgggagtttcgaggggagtcgggggagagttgcggcgttatatggggggttagtcggggataggcgtttggggttgagtttttcggcgaagttatcgcgaaggggtcgtattttttagagaacgattttgggcgttcgcgaaggtttcgtagagagggggagttcgtttgcgcgttcgcgtttttataggtgttcgggtggcggcgttcggtttcgtttgcggattcgcgagaggcgggcgcgggcgcgtttgtgcgtcggggtcgggggtcggcgggggaggttttcgcgaggtggttttcgggttttttttcggcgttttaggtttttttttttcgttagtaggttgttggttgcggcgtcgattttttttattttttttttttatcgtttttttttttcgcggttgggtttattttgcggtttttgttcgtttcgttttcgttcgggttttttttcgtttttttttttcgttttttttggagttttcgaggagttcgtagtcgttgggcgttcgggaagatggcggcggcggcgggagatcgcggcggcgagggg

SEQ ID NO: 30036 - DNA, 678 bp, Artificial Sequence
  chemically treated genomic DNA (Homo sapiens) CpG-island No: 30036
cccctcgccgccgcgatctcccgccgccgccgccatcttcccgaacgcccaacgactacgaactcctcgaaaactccaaaaaaaacgaaaaaaaaaaacgaaaaaaaacccgaacgaaaacgaaacgaacaaaaaccgcaaaataaacccaaccgcgaaaaaaaaaaacgataaaaaaaaaaaataaaaaaaatcgacgccgcaaccaacaacctactaacgaaaaaaaaaaacctaaaacgccgaaaaaaaacccgaaaaccacctcgcgaaaacctcccccgccgacccccgaccccgacgcacaaacgcgcccgcgcccgcctctcgcgaatccgcaaacgaaaccgaacgccgccacccgaacacctataaaaacgcgaacgcgcaaacgaactccccctctctacgaaaccttcgcgaacgcccaaaatcgttctctaaaaaatacgaccccttcgcgataacttcgccgaaaaactcaaccccaaacgcctatccccgactaaccccccatataacgccgcaactctcccccgactcccctcgaaactcccgcgctaaaacgacccgaaaactacgaacgcgaactcgatcttcccacacccgaaataaaactaaaaaaataacaaaaaaacgcctcctacaacccgactaactcccgataataacccttct

SEQ ID NO: 30037 - DNA, 963 bp, Artificial Sequence
  chemically treated genomic DNA (Homo sapiens) CpG-island No: 30037
acggtttagattaaggcgggggagggcgatagcgatttcgcgggtgtagcgcgtgggcggtcgaggggtggtggttgcgttcggggtttgggggtggggtggttgcggtcgcgttttttgttgttttttaacgtgtcgtttgttttcgtagcgttcgtcgtcgtcgtgcgtaggttcggcgaggatatcgcgttttcgagtttttcgagttgcggttattatcgcgaggagttcgcgttgggttcggttaaagtcgttcgttaggtcgttcgggacggggcgcggttggcgttggttcgcgcggtattcgagtgttgcgcgttttcgattttcgaggtttcgggcgcgtcggcgtagttgtttttcgtgttgtttaattattatcgcgtgttggttcggcgcggatcgttggggggcgtcgtattcgtcgttttcggtttggtttgcgttttcggcggtttcgaggcggcgatcggcgcgttgcggtttcggtattcgagtttcgtcgttattttttcgttcggcgcgtttttgtcgtattatttgggcgtttcggttattattattaacgggaggtgattcgttggtcgttcgcgttaggagtttggattcggtttttcggggttgcggcgttatcgagttcggtaaatgcgtacgatttatattaatttatgtagagatagttgtttgaattggatttcgtcgtcgatttgcggatttttatcgcggaggtttcgcgcgtcggtgtcgagggtcgaggagcgttcgggttcgggtaggtgatcgttcgtttttgttttgcgagggtcggtgcgatttagttgttgggggtttggtttttttattttgaaatcgggttttacgcgttttgttttgtttttaacgttttataatagtttcgttgggggattgaagcggttttatttcgtaaatattttttatttttaggagggaaaatttatt

SEQ ID NO: 30038 - DNA, 963 bp, Artificial Sequence
  chemically treated genomic DNA (Homo sapiens) CpG-island No: 30038
aataaattttccctcctaaaaataaaaaatatttacgaaataaaaccgcttcaatcccccaacgaaactattataaaacgttaaaaacaaaacaaaacgcgtaaaacccgatttcaaaataaaaaaaccaaacccccaacaactaaatcgcaccgaccctcgcaaaacaaaaacgaacgatcacctacccgaacccgaacgctcctcgaccctcgacaccgacgcgcgaaacctccgcgataaaaatccgcaaatcgacgacgaaatccaattcaaacaactatctctacataaattaatataaatcgtacgcatttaccgaactcgataacgccgcaaccccgaaaaaccgaatccaaactcctaacgcgaacgaccaacgaatcacctcccgttaataataataaccgaaacgcccaaataatacgacaaaaacgcgccgaacgaaaaaataacgacgaaactcgaataccgaaaccgcaacgcgccgatcgccgcctcgaaaccgccgaaaacgcaaaccaaaccgaaaacgacgaatacgacgccccccaacgatccgcgccgaaccaacacgcgataataattaaacaacacgaaaaacaactacgccgacgcgcccgaaacctcgaaaatcgaaaacgcgcaacactcgaataccgcgcgaaccaacgccaaccgcgccccgtcccgaacgacctaacgaacgactttaaccgaacccaacgcgaactcctcgcgataataaccgcaactcgaaaaactcgaaaacgcgatatcctcgccgaacctacgcacgacgacgacgaacgctacgaaaacaaacgacacgttaaaaaacaacaaaaaacgcgaccgcaaccaccccacccccaaaccccgaacgcaaccaccacccctcgaccgcccacgcgctacacccgcgaaatcgctatcgccctcccccgccttaatctaaaccgt

SEQ ID NO: 30039 - DNA, 963 bp, Artificial Sequence
  chemically treated genomic DNA (Homo sapiens) CpG-island No: 30039
ggtgggtttttttttttgaaagtggaggatatttgcggagtgaaatcgttttaattttttagcgggattgttgtggaacgttggggataaggtaagacgcgtgaagttcgattttaaggtgaggaaattaagtttttagtaattgggtcgtatcggttttcgtaggatagaggcgggcggttatttgttcggattcgggcgtttttcggttttcggtatcggcgcgcggggttttcgcggtggaaattcgtaagtcggcggcggggtttaatttaaatagttgtttttgtataaattaatgtaggtcgtgcgtatttgtcgggttcggtggcgtcgtagtttcgggaggtcgggtttaggtttttggcgcgggcggttagcgggttatttttcgttggtgatgatgatcgaggcgtttaggtagtgcggtaggggcgcgtcgggcggggaggtggcggcggggttcgggtgtcggagtcgtagcgcgtcggtcgtcgtttcggggtcgtcgggagcgtaggttaggtcggaggcggcgggtgcggcgttttttagcggttcgcgtcgggttagtacgcggtggtagttgagtagtacgaagggtagttgcgtcggcgcgttcggggtttcgggggtcgggggcgcgtagtattcgggtgtcgcgcgggttagcgttagtcgcgtttcgtttcgggcggtttggcgggcggttttggtcgggtttagcgcgggtttttcgcggtagtggtcgtagttcgggaagttcgggggcgcggtgttttcgtcgaatttgcgtacggcggcggcgggcgttgcggggataggcgatacgttagagggtagtaaggggcgcggtcgtagttattttatttttaagtttcgggcgtagttattatttttcggtcgtttacgcgttgtattcgcggggtcgttgtcgttttttttcgttttagtttaggtcgt

SEQ ID NO: 30040 - DNA, 963 bp, Artificial Sequence
  chemically treated genomic DNA (Homo sapiens) CpG-island No: 30040
acgacctaaactaaaacgaaaaaaaacgacaacgaccccgcgaatacaacgcgtaaacgaccgaaaaataataactacgcccgaaacttaaaaataaaataactacgaccgcgccccttactaccctctaacgtatcgcctatccccgcaacgcccgccgccgccgtacgcaaattcgacgaaaacaccgcgcccccgaacttcccgaactacgaccactaccgcgaaaaacccgcgctaaacccgaccaaaaccgcccgccaaaccgcccgaaacgaaacgcgactaacgctaacccgcgcgacacccgaatactacgcgcccccgacccccgaaaccccgaacgcgccgacgcaactacccttcgtactactcaactaccaccgcgtactaacccgacgcgaaccgctaaaaaacgccgcacccgccgcctccgacctaacctacgctcccgacgaccccgaaacgacgaccgacgcgctacgactccgacacccgaaccccgccgccacctccccgcccgacgcgcccctaccgcactacctaaacgcctcgatcatcatcaccaacgaaaaataacccgctaaccgcccgcgccaaaaacctaaacccgacctcccgaaactacgacgccaccgaacccgacaaatacgcacgacctacattaatttatacaaaaacaactatttaaattaaaccccgccgccgacttacgaatttccaccgcgaaaaccccgcgcgccgataccgaaaaccgaaaaacgcccgaatccgaacaaataaccgcccgcctctatcctacgaaaaccgatacgacccaattactaaaaacttaatttcctcaccttaaaatcgaacttcacgcgtcttaccttatccccaacgttccacaacaatcccgctaaaaaattaaaacgatttcactccgcaaatatcctccactttcaaaaaaaaaaacccacc

SEQ ID NO: 30041 - DNA, 629 bp, Artificial Sequence
  chemically treated genomic DNA (Homo sapiens) CpG-island No: 30041
agggcgcgtgggtcgtggcgggaggtcgcgttgttgggagtttacggttttcgtttttcgttttaggtttttttttagttattcgtagattaagatttatttttcgtatttcgatttgtattcggggttcgcgtagttgcgcgcgtacggttttaaggtggtggtcgtcgtgggcgacgcggtgaagagtatcgacgatatcggcggcgttttgtttaagttgagcgagttgtacgtttatattttgcgcgtggattcggttaattttaaggtgcgcggggcgcggtgcgggcggggcggggcggggtcgcggggcgggcggggtcgcggggcggggtcgcggggcggggcggggtggggtcgcggggcggggcggggtcgcggggcggggcggggcggggcggggcgggcggggcggtcggggttcggcggggcggggcggggcggggaggggttgggcggggcggggcgcggggcggggcgggtcgggtcggggcggggtcgcggggcggggtcgcggggcggggcgcggggcggggcggggcggggtggggtcgcggggcggggttcgggttaggtttcgttttcgtattgagtcgttttcgtttttagtttttgttttattgttt

SEQ ID NO: 30042 - DNA, 629 bp, Artificial Sequence
  chemically treated genomic DNA (Homo sapiens) CpG-island No: 30042
aaacaataaaacaaaaactaaaaacgaaaacgactcaatacgaaaacgaaacctaacccgaaccccgccccgcgaccccaccccgccccgccccgccccgcgccccgccccgcgaccccgccccgcgaccccgccccgacccgacccgccccgccccgcgccccgccccgcccaacccctccccgccccgccccgccccgccgaaccccgaccgccccgcccgccccgccccgccccgccccgccccgcgaccccgccccgccccgcgaccccaccccgccccgccccgcgaccccgccccgcgaccccgcccgccccgcgaccccgccccgccccgcccgcaccgcgccccgcgcaccttaaaattaaccgaatccacgcgcaaaatataaacgtacaactcgctcaacttaaacaaaacgccgccgatatcgtcgatactcttcaccgcgtcgcccacgacgaccaccaccttaaaaccgtacgcgcgcaactacgcgaaccccgaatacaaatcgaaatacgaaaaataaatcttaatctacgaataactaaaaaaaaacctaaaacgaaaaacgaaaaccgtaaactcccaacaacgcgacctcccgccacgacccacgcgccct

SEQ ID NO: 30043 - DNA, 629 bp, Artificial Sequence
  chemically treated genomic DNA (Homo sapiens) CpG-island No: 30043
aggtagtgggataggagttgggggcgggggcggtttagtgcgggggcggggtttagttcgggtttcgtttcgcgattttatttcgtttcgtttcgtttcgcgtttcgtttcgcgatttcgtttcgcgatttcgtttcggttcggttcgtttcgtttcgcgtttcgtttcgtttagttttttttcgtttcgtttcgtttcgtcgggtttcggtcgtttcgttcgtttcgtttcgtttcgtttcgtttcgcgatttcgtttcgtttcgcgattttatttcgtttcgtttcgcgatttcgtttcgcggtttcgttcgtttcgcggtttcgtttcgtttcgttcgtatcgcgtttcgcgtattttgaagttgatcgggtttacgcgtaggatgtaggcgtgtagttcgtttagtttggatagggcgtcgtcgatgtcgtcgatgttttttatcgcgtcgtttacggcggttattattttggagtcgtgcgcgcgtaattgcgcggatttcgggtgtaggtcgaagtgcgggaagtaggttttggtttgcgggtggttgaggaagagtttgggacggggggcgggggtcgtgagtttttagtagcgcggtttttcgttacggtttacgcgtttt

SEQ ID NO: 30044 - DNA, 629 bp, Artificial Sequence
  chemically treated genomic DNA (Homo sapiens) CpG-island No: 30044
aaaacgcgtaaaccgtaacgaaaaaccgcgctactaaaaactcacgacccccgccccccgtcccaaactcttcctcaaccacccgcaaaccaaaacctacttcccgcacttcgacctacacccgaaatccgcgcaattacgcgcgcacgactccaaaataataaccgccgtaaacgacgcgataaaaaacatcgacgacatcgacgacgccctatccaaactaaacgaactacacgcctacatcctacgcgtaaacccgatcaacttcaaaatacgcgaaacgcgatacgaacgaaacgaaacgaaaccgcgaaacgaacgaaaccgcgaaacgaaatcgcgaaacgaaacgaaataaaatcgcgaaacgaaacgaaatcgcgaaacgaaacgaaacgaaacgaaacgaacgaaacgaccgaaacccgacgaaacgaaacgaaacgaaaaaaaactaaacgaaacgaaacgcgaaacgaaacgaaccgaaccgaaacgaaatcgcgaaacgaaatcgcgaaacgaaacgcgaaacgaaacgaaacgaaataaaatcgcgaaacgaaacccgaactaaaccccgcccccgcactaaaccgcccccgcccccaactcctatcccactacct

SEQ ID NO: 30045 - DNA, 585 bp, Artificial Sequence
  chemically treated genomic DNA (Homo sapiens) CpG-island No: 30045
cgggtgcgcgtattttttttcgttttaggattgggcgaagtttttcggttcgtattcgttcgttcgtgtgtttttcgatttcgttggagtcgatgcgcgtttagcgcgtgttaggtcggggcgggggtgcgggttgattttttttttcgttagggacgtttcggcgttcgaaaggaaagggtggcgttgcgtttcggggtgtacgagtcgatagcgttcgattttaacgggtcggtttcgttagcgtcgttatcgttttgttttcgggcgagcgggatgggcgggagtggagtggcgggtggagggtggagacgttttggttttcgtttcgcgtgtatttttaggggaggtcgagttcgtcgttcggtttcgcgtaggtttcgttcgggatttttttgcggtttaggtcgcgtttcgggtttcgcgttagttaatgagcgtcgttcggtcgggcgtgttttcgcgttttaagtataaattttggcgcgttcgcgggtcggtatttttttggtttttatagatttagagagaatttattatggtgttgttttttgtcgataagattaacgttaaggtcgtttgggg

SEQ ID NO: 30046 - DNA, 585 bp, Artificial Sequence
  chemically treated genomic DNA (Homo sapiens) CpG-island No: 30046
ccccaaacgaccttaacgttaatcttatcgacaaaaaacaacaccataataaattctctctaaatctataaaaaccaaaaaaataccgacccgcgaacgcgccaaaatttatacttaaaacgcgaaaacacgcccgaccgaacgacgctcattaactaacgcgaaacccgaaacgcgacctaaaccgcaaaaaaatcccgaacgaaacctacgcgaaaccgaacgacgaactcgacctcccctaaaaatacacgcgaaacgaaaaccaaaacgtctccaccctccacccgccactccactcccgcccatcccgctcgcccgaaaacaaaacgataacgacgctaacgaaaccgacccgttaaaatcgaacgctatcgactcgtacaccccgaaacgcaacgccaccctttcctttcgaacgccgaaacgtccctaacgaaaaaaaaaatcaacccgcacccccgccccgacctaacacgcgctaaacgcgcatcgactccaacgaaatcgaaaaacacacgaacgaacgaatacgaaccgaaaaacttcgcccaatcctaaaacgaaaaaaaatacgcgcacccg

SEQ ID NO: 30047 - DNA, 585 bp, Artificial Sequence
  chemically treated genomic DNA (Homo sapiens) CpG-island No: 30047
ttttaggcggttttgacgttggttttgtcggtaggagatagtattatggtgggttttttttgagtttgtggggattagaagagtgtcggttcgcgagcgcgttagggtttatgtttggggcgcgggggtacgttcggtcgggcggcgtttattggttggcgcggagttcggggcgcggtttggatcgtaggggagtttcgggcggggtttgcgcggggtcgggcggcgggttcggttttttttgggggtgtacgcggggcgggggttaggacgtttttattttttattcgttattttattttcgtttatttcgttcgttcgggggtagggcggtagcggcgttggcggggtcggttcgttggggtcgggcgttgtcggttcgtgtatttcggagcgtagcgttatttttttttttcgggcgtcggagcgtttttagcgagggagaaagttagttcgtattttcgtttcggtttggtacgcgttggacgcgtatcgattttagcgggatcggggaatatacgggcgagcgagtgcgagtcggagggtttcgtttaattttggggcggagaggaatgcgcgtattcg

SEQ ID NO: 30048 - DNA, 585 bp, Artificial Sequence
  chemically treated genomic DNA (Homo sapiens) CpG-island No: 30048
cgaatacgcgcattcctctccgccccaaaattaaacgaaaccctccgactcgcactcgctcgcccgtatattccccgatcccgctaaaatcgatacgcgtccaacgcgtaccaaaccgaaacgaaaatacgaactaactttctccctcgctaaaaacgctccgacgcccgaaaaaaaaaaataacgctacgctccgaaatacacgaaccgacaacgcccgaccccaacgaaccgaccccgccaacgccgctaccgccctacccccgaacgaacgaaataaacgaaaataaaataacgaataaaaaataaaaacgtcctaacccccgccccgcgtacacccccaaaaaaaaccgaacccgccgcccgaccccgcgcaaaccccgcccgaaactcccctacgatccaaaccgcgccccgaactccgcgccaaccaataaacgccgcccgaccgaacgtacccccgcgccccaaacataaaccctaacgcgctcgcgaaccgacactcttctaatccccacaaactcaaaaaaaacccaccataatactatctcctaccgacaaaaccaacgtcaaaaccgcctaaaa

SEQ ID NO: 30049 - DNA, 557 bp, Artificial Sequence
  chemically treated genomic DNA (Homo sapiens) CpG-island No: 30049
ttattcgtattgttatcgttattttgattgttatcgttattttgattgttatcgttattcgtattgttatttttattcgtattgttatttttatttatattgttatcgttattcgtattgttatcgttattcgtattgttatcgttattcgtattgttatcgttattttgattgttatttttattcgtattgttatcgttattttgattgttatcgttattcgtattgttatcgttatttatattgttatttttattcgtattgttatcgttatttatattgttatcgttattcgtattgttatcgttattttgattgttatttttattcgtattgttatcgttattttgattgttatcgttatttataatgttatttttattcgtattgttatcgttattcgtattgttatttttattcgtattgttatcgttattcgtattgttatcgttattcgtattgttatcgttatttatattgttatcgttattcggattttttttaattttagaagattatattttttatggttaatttaggtcgaagtcgaaggattt

SEQ ID NO: 30050 - DNA, 557 bp, Artificial Sequence
  chemically treated genomic DNA (Homo sapiens) CpG-island No: 30050
aaatccttcgacttcgacctaaattaaccataaaaaatataatcttctaaaattaaaaaaaatccgaataacgataacaatataaataacgataacaatacgaataacgataacaatacgaataacgataacaatacgaataaaaataacaatacgaataacgataacaatacgaataaaaataacattataaataacgataacaatcaaaataacgataacaatacgaataaaaataacaatcaaaataacgataacaatacgaataacgataacaatataaataacgataacaatacgaataaaaataacaatataaataacgataacaatacgaataacgataacaatcaaaataacgataacaatacgaataaaaataacaatcaaaataacgataacaatacgaataacgataacaatacgaataacgataacaatacgaataacgataacaatataaataaaaataacaatacgaataaaaataacaatacgaataacgataacaatcaaaataacgataacaatcaaaataacgataacaatacgaataa

SEQ ID NO: 30051 - DNA, 557 bp, Artificial Sequence
  chemically treated genomic DNA (Homo sapiens) CpG-island No: 30051
gggtttttcggtttcgatttgggttggttatggggagtgtagttttttaaggttggagggggttcgggtggcgatggtagtgtgggtggcgatggtagtgcgggtagcgatggtagtgcgggtagcgatggtagtgcgggtggggatggtagtgcgggtggcgatggtagtgcgggtggggatggtattgtgggtggcgatggtagttagggtggcgatggtagtgcgggtggggatggtagttagagtggcgatggtagtgcgggtggcgatggtagtgtgggtggcgatggtagtgcgggtggggatggtagtgtgggtggcgatggtagtgcgggtggcgatggtagttagggtggcgatggtagtgcgggtggggatggtagttagagtggcgatggtagtgcgggtggcgatggtagtgcgggtggcgatggtagtgcgggtggcgatggtagtgtgggtggggatggtagtgcgggtggggatggtagtgcgggtggcgatggtagttagggtggcgatggtagttagggtggcgatggtagtgcgggtgg

SEQ ID NO: 30052 - DNA, 557 bp, Artificial Sequence
  chemically treated genomic DNA (Homo sapiens) CpG-island No: 30052
ccacccgcactaccatcgccaccctaactaccatcgccaccctaactaccatcgccacccgcactaccatccccacccgcactaccatccccacccacactaccatcgccacccgcactaccatcgccacccgcactaccatcgccacccgcactaccatcgccactctaactaccatccccacccgcactaccatcgccaccctaactaccatcgccacccgcactaccatcgccacccacactaccatccccacccgcactaccatcgccacccacactaccatcgccacccgcactaccatcgccactctaactaccatccccacccgcactaccatcgccaccctaactaccatcgccacccacaataccatccccacccgcactaccatcgccacccgcactaccatccccacccgcactaccatcgctacccgcactaccatcgctacccgcactaccatcgccacccacactaccatcgccacccgaaccccctccaaccttaaaaaactacactccccataaccaacccaaatcgaaaccgaaaaaccc

SEQ ID NO: 30053 - DNA, 1189 bp, Artificial Sequence
  chemically treated genomic DNA (Homo sapiens) CpG-island No: 30053
aatttcgatcgggggatcgaggaggaagcgcggggtttcgttcgtttcgatttttaggatacgaagcgttttaaagggttattgtgtatttttaattcgcggcggggatttttaatttcgcgtcggcgttagatgagcgtataggtgcgttcggggtgttataatttcgtttcgttcgtagtttcggttttacgttttcgatggcgttcgcgtttttcgtttatcgtttttttcgttgtagtcggcggaggtaggcgggggtcgggtaagtagtagtagtagtagcggtttcgttattatcgcggttatcgtttcgttttcggtttcggtgttagttcggtttatggtttcgcgttcggttcggcgttattcggttcgcgtttcgcgtcgtcggttttcgtcgtcgttcgggtagtttttgtcgttttcgtttttgtcgttttcgtttttgttttcggcgtttatggttcggtcggttttcgtcgtcgtcgtttcgggtattttcgttcgtaggtttcgtttcgtaggtcgagtcgggaaggcgagggcggggtcggggggcgggatcggggggggcgcggacgtcggggggaggggttacgtggggcgtcggtaggggggaggggttacgtggggcgcgcgggggacggatcggggcgcgcgcggttcggggggacgttggagggagggcgcgggatggagggatcgcgggggttttaggacggagaggtcgcgtcgggcgcgttcggaatacgtaggaaatttttttcgaggcgtgggtttcgcggggttttttcgtcggttcgttgagttttagtttcgttcggtcgggattttcgtggtagttcggggagtcgcgggggtagaggcgtcgattttcgtttgggatcgagaggaattcgcgttttgttttgtttcgttcggcgcgcgtgggtttgagttaggcgttttagtacggggattttcgggtcggtttttacgtcgtagagtcgttgtaggtgcgtgttagatttacgtttttatgtatagacgagaaggttgtttgtgtttagggattgtagtattcgatcggggtggcggtttatacgggtgcgtggtattaattttcggcgttttgtatttggatggatttttattatgtaagatttgagtcgaaaaaaggaagcgataaagtttagaaaattcgggg

SEQ ID NO: 30054 - DNA, 1189 bp, Artificial Sequence
  chemically treated genomic DNA (Homo sapiens) CpG-island No: 30054
ccccgaattttctaaactttatcgcttccttttttcgactcaaatcttacataataaaaatccatccaaatacaaaacgccgaaaattaataccacgcacccgtataaaccgccaccccgatcgaatactacaatccctaaacacaaacaaccttctcgtctatacataaaaacgtaaatctaacacgcacctacaacgactctacgacgtaaaaaccgacccgaaaatccccgtactaaaacgcctaactcaaacccacgcgcgccgaacgaaacaaaacaaaacgcgaattcctctcgatcccaaacgaaaatcgacgcctctacccccgcgactccccgaactaccacgaaaatcccgaccgaacgaaactaaaactcaacgaaccgacgaaaaaaccccgcgaaacccacgcctcgaaaaaaatttcctacgtattccgaacgcgcccgacgcgacctctccgtcctaaaacccccgcgatccctccatcccgcgccctccctccaacgtccccccgaaccgcgcgcgccccgatccgtcccccgcgcgccccacgtaacccctcccccctaccgacgccccacgtaacccctccccccgacgtccgcgccccccccgatcccgccccccgaccccgccctcgccttcccgactcgacctacgaaacgaaacctacgaacgaaaatacccgaaacgacgacgacgaaaaccgaccgaaccataaacgccgaaaacaaaaacgaaaacgacaaaaacgaaaacgacaaaaactacccgaacgacgacgaaaaccgacgacgcgaaacgcgaaccgaataacgccgaaccgaacgcgaaaccataaaccgaactaacaccgaaaccgaaaacgaaacgataaccgcgataataacgaaaccgctactactactactacttacccgacccccgcctacctccgccgactacaacgaaaaaaacgataaacgaaaaacgcgaacgccatcgaaaacgtaaaaccgaaactacgaacgaaacgaaattataacaccccgaacgcacctatacgctcatctaacgccgacgcgaaattaaaaatccccgccgcgaattaaaaatacacaataaccctttaaaacgcttcgtatcctaaaaatcgaaacgaacgaaaccccgcgcttcctcctcgatcccccgatcgaaatt

SEQ ID NO: 30055 - DNA, 1189 bp, Artificial Sequence
  chemically treated genomic DNA (Homo sapiens) CpG-island No: 30055
tttcgagttttttaggttttatcgtttttttttttcggtttaaattttatatggtgggaatttatttaggtgtaaagcgtcgggagttgatgttacgtattcgtgtgaatcgttatttcgatcgggtattatagtttttaaatataagtagttttttcgtttgtgtataaaagcgtggatttgatacgtatttgtagcggttttgcggcgtgaaggtcggttcgggggttttcgtgttgaggcgtttgatttaggtttacgcgcgtcgggcggggtagggtagggcgcgggtttttttcggttttaggcggaggtcggcgtttttgttttcgcggtttttcgagttgttacggaggtttcggtcgagcggagttgggatttagcgaatcggcggggaagtttcgcggagtttacgtttcggggagaattttttgcgtgtttcgagcgcgttcggcgcgattttttcgttttgggattttcgcgatttttttatttcgcgttttttttttagcgttttttcggatcgcgcgcgtttcggttcgtttttcgcgcgttttacgtgattttttttttttatcggcgttttacgtgattttttttttcggcgttcgcgtttttttcggtttcgtttttcgatttcgttttcgttttttcggttcggtttgcggggcggggtttgcgggcggaagtgttcggggcgacggcggcggggatcggtcgggttatgggcgtcgggggtagaggcggaggcggtagaggcggaggcggtagaggttgttcgggcggcggcgggggtcggcggcgcgggacgcgggtcgggtagcgtcgggtcgagcgcggagttatgggtcgggttggtatcgggatcgggggcgaggcggtggtcgcggtggtggcggggtcgttgttgttgttgttgtttgttcggttttcgtttgttttcgtcggttatagcgggaagagcggtgagcgggaggcgcgggcgttatcgggggcgtggggtcggggttgcgggcggggcgggattgtgatatttcgggcgtatttgtgcgtttatttggcgtcggcgcggggttgggggttttcgtcgcgggttgggggtgtatagtggttttttggggcgtttcgtgttttaggggtcgaggcggacgggatttcgcgtttttttttcggtttttcgatcggggtt

SEQ ID NO: 30056 - DNA, 1189 bp, Artificial Sequence
  chemically treated genomic DNA (Homo sapiens) CpG-island No: 30056
aaccccgatcgaaaaaccgaaaaaaaaacgcgaaatcccgtccgcctcgacccctaaaacacgaaacgccccaaaaaaccactatacacccccaacccgcgacgaaaacccccaaccccgcgccgacgccaaataaacgcacaaatacgcccgaaatatcacaatcccgccccgcccgcaaccccgaccccacgcccccgataacgcccgcgcctcccgctcaccgctcttcccgctataaccgacgaaaacaaacgaaaaccgaacaaacaacaacaacaacaacgaccccgccaccaccgcgaccaccgcctcgcccccgatcccgataccaacccgacccataactccgcgctcgacccgacgctacccgacccgcgtcccgcgccgccgacccccgccgccgcccgaacaacctctaccgcctccgcctctaccgcctccgcctctacccccgacgcccataacccgaccgatccccgccgccgtcgccccgaacacttccgcccgcaaaccccgccccgcaaaccgaaccgaaaaaacgaaaacgaaatcgaaaaacgaaaccgaaaaaaacgcgaacgccgaaaaaaaaaatcacgtaaaacgccgataaaaaaaaaaaatcacgtaaaacgcgcgaaaaacgaaccgaaacgcgcgcgatccgaaaaaacgctaaaaaaaaaacgcgaaataaaaaaatcgcgaaaatcccaaaacgaaaaaatcgcgccgaacgcgctcgaaacacgcaaaaaattctccccgaaacgtaaactccgcgaaacttccccgccgattcgctaaatcccaactccgctcgaccgaaacctccgtaacaactcgaaaaaccgcgaaaacaaaaacgccgacctccgcctaaaaccgaaaaaaacccgcgccctaccctaccccgcccgacgcgcgtaaacctaaatcaaacgcctcaacacgaaaacccccgaaccgaccttcacgccgcaaaaccgctacaaatacgtatcaaatccacgcttttatacacaaacgaaaaaactacttatatttaaaaactataatacccgatcgaaataacgattcacacgaatacgtaacatcaactcccgacgctttacacctaaataaattcccaccatataaaatttaaaccgaaaaaaaaaaacgataaaacctaaaaaactcgaaa

SEQ ID NO: 30057 - DNA, 792 bp, Artificial Sequence
  chemically treated genomic DNA (Homo sapiens) CpG-island No: 30057
tcggggttcgtagttttcggtcggttgcgtttagtatagtaggttttggatttcgcggttcggtagggggatttttatttcggtttattcggttttttaaagggtttttgcggaagtggatttcgtgtacgtttatatgcgtttttttattcgcgttgatcgtttaaatgacgttttcgggtagttcggttttcgtcgcgtcggttacgtcggttacgtcgagttcgggttttcggatcgtcggcggtagtagtagtagtagtagtcgtaggagcgttatagcggtttttttaatcgtttaggtttttagtatggcggttattattacgggggtagttttcgtcgattttcgttttcggtcggttgttaggttatttcggatttagaaaaatagcgttacgggtcgtttcgtttgagtcgtcggggatatgtcgtttttaggtttttttttttttagttacgggtatcgttttttattttaggaataatttatttcgtcgttttgttttcggttacgacgttgtagttaattagcgttcggtttttattaattatttattatttcgtcgggaggcgttcgtttattggttgttaggcgcgggaaagggcgtggttttttttaggcgtcggtttagtagtcgggtattagatggagcgcgcgtagagggagtgagttcggttgaagcggcggttcgatgcggaagtggcgggtgtagcgtttaggcggtttcggaattttatagttgaatgggaaaggtggtttggggggggaaggtttagggtagggcgtat

SEQ ID NO: 30058 - DNA, 792 bp, Artificial Sequence
  chemically treated genomic DNA (Homo sapiens) CpG-island No: 30058
atacgccctaccctaaaccttccccccccaaaccacctttcccattcaactataaaattccgaaaccgcctaaacgctacacccgccacttccgcatcgaaccgccgcttcaaccgaactcactccctctacgcgcgctccatctaatacccgactactaaaccgacgcctaaaaaaaaccacgccctttcccgcgcctaacaaccaataaacgaacgcctcccgacgaaataataaataattaataaaaaccgaacgctaattaactacaacgtcgtaaccgaaaacaaaacgacgaaataaattattcctaaaataaaaaacgatacccgtaactaaaaaaaaaaaaacctaaaaacgacatatccccgacgactcaaacgaaacgacccgtaacgctatttttctaaatccgaaataacctaacaaccgaccgaaaacgaaaatcgacgaaaactacccccgtaataataaccgccatactaaaaacctaaacgattaaaaaaaccgctataacgctcctacgactactactactactactaccgccgacgatccgaaaacccgaactcgacgtaaccgacgtaaccgacgcgacgaaaaccgaactacccgaaaacgtcatttaaacgatcaacgcgaataaaaaaacgcatataaacgtacacgaaatccacttccgcaaaaaccctttaaaaaaccgaataaaccgaaataaaaatccccctaccgaaccgcgaaatccaaaacctactatactaaacgcaaccgaccgaaaactacgaaccccga

SEQ ID NO: 30059 - DNA, 792 bp, Artificial Sequence
  chemically treated genomic DNA (Homo sapiens) CpG-island No: 30059
gtgcgttttattttaaattttttttttttaggttattttttttatttagttgtgggatttcggggtcgtttgggcgttgtattcgttattttcgtatcgaatcgtcgttttaatcgaatttattttttttgcgcgcgttttatttggtgttcgattgttgggtcggcgtttgggaaaagttacgttttttttcgcgtttgatagttaatgagcgggcgtttttcggcggggtggtgggtaattaatgagggtcgggcgttgattggttgtagcgtcgtggtcgggggtagggcggcggggtaggttgtttttgaggtgggaggcggtattcgtggttgagaagaaggaggtttgagagcgatatgttttcggcggtttaggcggagcggttcgtggcgttgtttttttgagttcggggtggtttggtagtcggtcgaggacgagggtcggcgggggttgttttcgtggtggtggtcgttatgttgggagtttgggcggttgagggaatcgttgtggcgtttttgcgattgttgttgttgttgttgtcgtcggcgattcggggattcgggttcggcgtggtcggcgtggtcggcgcggcgggggtcgggttgttcgagagcgttatttgggcggttaacgcgggtggagaggcgtatgtggacgtgtacgggatttattttcgtaaggattttttggaaggtcgggtgggtcgaggtgagagtttttttgtcgagtcgcgggatttagggtttgttgtgttgggcgtagtcggtcgggggttgcgggtttcga

SEQ ID NO: 30060 - DNA, 792 bp, Artificial Sequence
  chemically treated genomic DNA (Homo sapiens) CpG-island No: 30060
tcgaaacccgcaacccccgaccgactacgcccaacacaacaaaccctaaatcccgcgactcgacaaaaaaactctcacctcgacccacccgaccttccaaaaaatccttacgaaaataaatcccgtacacgtccacatacgcctctccacccgcgttaaccgcccaaataacgctctcgaacaacccgacccccgccgcgccgaccacgccgaccacgccgaacccgaatccccgaatcgccgacgacaacaacaacaacaacaatcgcaaaaacgccacaacgattccctcaaccgcccaaactcccaacataacgaccaccaccacgaaaacaacccccgccgaccctcgtcctcgaccgactaccaaaccaccccgaactcaaaaaaacaacgccacgaaccgctccgcctaaaccgccgaaaacatatcgctctcaaacctccttcttctcaaccacgaataccgcctcccacctcaaaaacaacctaccccgccgccctacccccgaccacgacgctacaaccaatcaacgcccgaccctcattaattacccaccaccccgccgaaaaacgcccgctcattaactatcaaacgcgaaaaaaaacgtaacttttcccaaacgccgacccaacaatcgaacaccaaataaaacgcgcgcaaaaaaaataaattcgattaaaacgacgattcgatacgaaaataacgaatacaacgcccaaacgaccccgaaatcccacaactaaataaaaaaaataacctaaaaaaaaaaaatttaaaataaaacgcac

SEQ ID NO: 30061 - DNA, 576 bp, Artificial Sequence
  chemically treated genomic DNA (Homo sapiens) CpG-island No: 30061
  unsure (437)
gtcggagttttttagttaacgacggtcgtaattatcgtaacgttcggaacgagcgtatcgtaggaaattaacgtacgtatacgttcgatatgtaatcgttgtttcgttaaagtgttttcgagcgtatcgatatcgttagttaacgttacgcgtgatataattttaatcgttagtttcgtagttacgcggcgcgtattgttattagttaacgtattaattaatatattacggcgtaattttaaatggttttcgtttattttcgatatcgtatatttttttttttttttcgtaaacgttttattttttttttaaaaaagtagttcgtttttttcgttatcgcgtttttgtttttaatataacgtgcgtagcgtttagacgcgtatttttttttttcgttagggttatcgtacgtttcgcgatgagtttacgtatcgaanacgtatcgcgtttttttcgtattattgtttattagagtataaacgtttatacgttttacgattttaacgcgttaagcgtgatacgcgtaaacgatttaatcgtggtgatcgatgtaaacgattttattttttatcgttt

SEQ ID NO: 30062 - DNA, 576 bp, Artificial Sequence
  chemically treated genomic DNA (Homo sapiens) CpG-island No: 30062
  unsure (140)
aaacgataaaaaataaaatcgtttacatcgatcaccacgattaaatcgtttacgcgtatcacgcttaacgcgttaaaatcgtaaaacgtataaacgtttatactctaataaacaataatacgaaaaaaacgcgatacgtnttcgatacgtaaactcatcgcgaaacgtacgataaccctaacgaaaaaaaaaaatacgcgtctaaacgctacgcacgttatattaaaaacaaaaacgcgataacgaaaaaaacgaactacttttttaaaaaaaaaataaaacgtttacgaaaaaaaaaaaaaaatatacgatatcgaaaataaacgaaaaccatttaaaattacgccgtaatatattaattaatacgttaactaataacaatacgcgccgcgtaactacgaaactaacgattaaaattatatcacgcgtaacgttaactaacgatatcgatacgctcgaaaacactttaacgaaacaacgattacatatcgaacgtatacgtacgttaatttcctacgatacgctcgttccgaacgttacgataattacgaccgtcgttaactaaaaaactccgac

SEQ ID NO: 30063 - DNA, 576 bp, Artificial Sequence
  chemically treated genomic DNA (Homo sapiens) CpG-island No: 30063
  unsure (140)
aggcggtaaggggtggggtcgtttgtatcgattattacggttaggtcgtttgcgcgtattacgtttagcgcgttgggatcgtaaggcgtgtaggcgtttatgttttgataggtagtagtgcgggggaagcgcgatgcgtnttcggtgcgtggatttatcgcggggcgtgcggtggttttggcggagagaggggatacgcgtttaagcgttacgtacgttgtgttagggatagagacgcggtagcggggggggcgaattgtttttttgagaggaaggtgaggcgtttgcggagaaggggaaggagtgtgcggtgtcgggggtgggcgagagttatttaggattgcgtcgtggtatgttagttggtgcgttggttgataatagtgcgcgtcgcgtagttgcgaagttggcggttggggttgtattacgcgtgacgttggttggcggtgtcggtgcgttcgggaatattttagcgggataacggttgtatatcgaacgtgtgcgtgcgttggttttttacggtgcgttcgtttcgggcgttacgatggttgcggtcgtcgttgattagggggtttcggt

SEQ ID NO: 30064 - DNA, 576 bp, Artificial Sequence
  chemically treated genomic DNA (Homo sapiens) CpG-island No: 30064
  unsure (437)
accgaaaccccctaatcaacgacgaccgcaaccatcgtaacgcccgaaacgaacgcaccgtaaaaaaccaacgcacgcacacgttcgatatacaaccgttatcccgctaaaatattcccgaacgcaccgacaccgccaaccaacgtcacgcgtaatacaaccccaaccgccaacttcgcaactacgcgacgcgcactattatcaaccaacgcaccaactaacataccacgacgcaatcctaaataactctcgcccacccccgacaccgcacactccttccccttctccgcaaacgcctcaccttcctctcaaaaaaacaattcgccccccccgctaccgcgtctctatccctaacacaacgtacgtaacgcttaaacgcgtatcccctctctccgccaaaaccaccgcacgccccgcgataaatccacgcaccgaanacgcatcgcgcttcccccgcactactacctatcaaaacataaacgcctacacgccttacgatcccaacgcgctaaacgtaatacgcgcaaacgacctaaccgtaataatcgatacaaacgaccccaccccttaccgcct

SEQ ID NO: 30065 - DNA, 518 bp, Artificial Sequence
  chemically treated genomic DNA (Homo sapiens) CpG-island No: 30065
tttcggatttttgtttttataagttttgtttcggaggcgggggagttggattagtagtcgtttggagcgttcgagttatcgtcgtcggggttttcgcgttttttagaacggtgggacgcggggttcggtagtcgttagcggaatatggcgttttggacgttgtggcgttgttgttagcgcgtcgtgggttgggtgtcggtgttttttattattttcgtggtcgtttggttttattacgcgtacgtggtggagttttgcgtgtgtgagtatcgttttcggggattgcggcggggcgcgggtcgcggttagggcgcgagataggtttttgcgttttatattcgtcgtttttttggagttagcgtcggacgtcgggcgttcggtttcgaacgcgttcggaagcgtcgaggttgttgtattcgtcgttttgtttaattttgcggcgcggttttggggcgatttggggtttttgaagttttgcggcggtttttcgggtgtaggtttggtttagggaggtttta

SEQ ID NO: 30066 - DNA, 518 bp, Artificial Sequence
  chemically treated genomic DNA (Homo sapiens) CpG-island No: 30066
taaaacctccctaaaccaaacctacacccgaaaaaccgccgcaaaacttcaaaaaccccaaatcgccccaaaaccgcgccgcaaaattaaacaaaacgacgaatacaacaacctcgacgcttccgaacgcgttcgaaaccgaacgcccgacgtccgacgctaactccaaaaaaacgacgaatataaaacgcaaaaacctatctcgcgccctaaccgcgacccgcgccccgccgcaatccccgaaaacgatactcacacacgcaaaactccaccacgtacgcgtaataaaaccaaacgaccacgaaaataataaaaaacaccgacacccaacccacgacgcgctaacaacaacgccacaacgtccaaaacgccatattccgctaacgactaccgaaccccgcgtcccaccgttctaaaaaacgcgaaaaccccgacgacgataactcgaacgctccaaacgactactaatccaactcccccgcctccgaaacaaaacttataaaaacaaaaatccgaaa

SEQ ID NO: 30067 - DNA, 518 bp, Artificial Sequence
  chemically treated genomic DNA (Homo sapiens) CpG-island No: 30067
tggggtttttttgggttagatttgtattcgggaagtcgtcgtaaggttttaggagttttaggtcgttttaaggtcgcgtcgtaggattgaataaagcggcgggtgtagtaatttcggcgttttcgagcgcgttcggggtcggacgttcggcgttcggcgttggttttagaaaggcggcgggtgtggggcgtagaggtttatttcgcgttttagtcgcggttcgcgtttcgtcgtagttttcggggacggtatttatatacgtagagttttattacgtacgcgtagtaggattagacgattacgaaggtgatgaagagtatcggtatttagtttacgacgcgttggtagtagcgttatagcgtttagggcgttatgtttcgttggcggttgtcgagtttcgcgttttatcgttttggggagcgcgggagtttcggcgacggtgattcggacgttttaggcggttgttggtttagttttttcgttttcgaggtaggatttgtgggagtaaaagttcgagg

SEQ ID NO: 30068 - DNA, 518 bp, Artificial Sequence
  chemically treated genomic DNA (Homo sapiens) CpG-island No: 30068
cctcgaacttttactcccacaaatcctacctcgaaaacgaaaaaactaaaccaacaaccgcctaaaacgtccgaatcaccgtcgccgaaactcccgcgctccccaaaacgataaaacgcgaaactcgacaaccgccaacgaaacataacgccctaaacgctataacgctactaccaacgcgtcgtaaactaaataccgatactcttcatcaccttcgtaatcgtctaatcctactacgcgtacgtaataaaactctacgtatataaataccgtccccgaaaactacgacgaaacgcgaaccgcgactaaaacgcgaaataaacctctacgccccacacccgccgcctttctaaaaccaacgccgaacgccgaacgtccgaccccgaacgcgctcgaaaacgccgaaattactacacccgccgctttattcaatcctacgacgcgaccttaaaacgacctaaaactcctaaaaccttacgacgacttcccgaatacaaatctaacccaaaaaaacccca

SEQ ID NO: 30069 - DNA, 1099 bp, Artificial Sequence
  chemically treated genomic DNA (Homo sapiens) CpG-island No: 30069
taggttttcgaaacgcggttttttttcggttttagttgtttttttgttagcgttgggagattcggtagtcgtagcgtttttagcggcgcgtagcggtttaggaagagagtgtttatcgtcggcgtttttttagtttttttttggaacgcgggagcgggcgcgattagcgtttattttgatcgtcgcgacggtgtttttgattggttgcgttgtgtgacgtaacgggagggtttcggcggtcgtcgggagtcggggtttagcgcgtgcgtagacggagcgcgttgagcggagggggaggtggttgtcgtttttttcgcgttcgttattttgttgttgtggttattgggaataagttgggtaaaagtatttcggaggcgcgacgttttttcgagttcggtgtttcgtgtgacggcgggggtcggtgaagattcgtcgagttgcggcgtcggcgcgttttaggtcgggagttattggaggtatttttgggacgtcgagtagttcgagaatttcggggtggttttcgttgcggttcgggtttgtttgtttcgatttttcggttttgtcgtgtattttcgggcggtttttttcgtgtggcggtttcggagtaggcgggcggcgtcggaggatgttgcgggttcggagtcgagaggaaagtgttggtttagttttttgagcgtttttcgaggtgtgcgagaggttttttttcggttttaaagtcgtttgtcgggttaaggcgtgtagagtaggcgaggatagtcgtcgtttttatcgtcgtagagttttcggtttaatattatgtttttcgttaggttcgatttttcggatcgtttcgtttggtatatggggtcggtgtttcgttaggaggcgtagattcggttttagggttagcgttacggtatgtttttcgttcgcgatttttttatttgttttggggattatgtgttgtcggtgttcgagaattcgcgggttttttattatattattaattcgttgtttaatcgtcgttttaagatcggggattaggaatttgattatttgtcggttttgttggagttttataagatttattatttggatattattatttttatcgagtttg

SEQ ID NO: 30070 - DNA, 1099 bp, Artificial Sequence
  chemically treated genomic DNA (Homo sapiens) CpG-island No: 30070
caaactcgataaaaataataatatccaaataataaatcttataaaactccaacaaaaccgacaaataatcaaattcctaatccccgatcttaaaacgacgattaaacaacgaattaataatataataaaaaacccgcgaattctcgaacaccgacaacacataatccccaaaacaaataaaaaaatcgcgaacgaaaaacataccgtaacgctaaccctaaaaccgaatctacgcctcctaacgaaacaccgaccccatataccaaacgaaacgatccgaaaaatcgaacctaacgaaaaacataatattaaaccgaaaactctacgacgataaaaacgacgactatcctcgcctactctacacgccttaacccgacaaacgactttaaaaccgaaaaaaaacctctcgcacacctcgaaaaacgctcaaaaaactaaaccaacactttcctctcgactccgaacccgcaacatcctccgacgccgcccgcctactccgaaaccgccacacgaaaaaaaccgcccgaaaatacacgacaaaaccgaaaaatcgaaacaaacaaacccgaaccgcaacgaaaaccaccccgaaattctcgaactactcgacgtcccaaaaatacctccaataactcccgacctaaaacgcgccgacgccgcaactcgacgaatcttcaccgacccccgccgtcacacgaaacaccgaactcgaaaaaacgtcgcgcctccgaaatacttttacccaacttattcccaataaccacaacaacaaaataacgaacgcgaaaaaaacgacaaccacctccccctccgctcaacgcgctccgtctacgcacgcgctaaaccccgactcccgacgaccgccgaaaccctcccgttacgtcacacaacgcaaccaatcaaaaacaccgtcgcgacgatcaaaataaacgctaatcgcgcccgctcccgcgttccaaaaaaaaactaaaaaaacgccgacgataaacactctcttcctaaaccgctacgcgccgctaaaaacgctacgactaccgaatctcccaacgctaacaaaaaaacaactaaaaccgaaaaaaaaccgcgtttcgaaaaccta

SEQ ID NO: 30071 - DNA, 1099 bp, Artificial Sequence
  chemically treated genomic DNA (Homo sapiens) CpG-island No: 30071
taggttcgatgagggtggtggtgtttaggtagtggattttgtaaaattttagtagggtcggtaaatggttaaatttttggttttcgattttaaaacggcggttgggtagcgagttgatgatgtagtgggagattcgcgagttttcggatatcgatagtatatagtttttagggtaggtggaagaatcgcggacgaggaatatatcgtggcgttggttttggagtcgggtttgcgttttttggcgagatatcggttttatatattaggcggagcggttcgaggagtcgaatttggcggaggatatggtgttggatcggggattttgcggcggtaggggcggcggttgttttcgtttgttttgtacgttttagttcggtagacggttttggggtcgaggaagggtttttcgtatatttcgaggagcgtttagagggttgggttagtatttttttttcggtttcgggttcgtagtatttttcgacgtcgttcgtttgtttcggggtcgttatacggagagagtcgttcgggaatgtacggtagagtcggggggtcggggtaggtaaattcgagtcgtagcggaggttatttcggggttttcgggttgttcggcgttttaggggtgtttttagtgattttcggtttggaacgcgtcggcgtcgtagttcgacgggtttttatcgattttcgtcgttatacgaggtatcgaattcgaaggagcgtcgcgttttcggggtgtttttgtttagtttgtttttaatagttatagtaataaaatggcggacgcgggagaagcggtagttattttttttttcgtttagcgcgtttcgtttgcgtacgcgttgggtttcggttttcggcggtcgtcggggttttttcgttacgttatatagcgtagttaattaggagtatcgtcgcgacgattagggtgggcgttggtcgcgttcgttttcgcgttttaggaggaggttgaagaggcgtcggcggtaggtattttttttttgggtcgttgcgcgtcgttgggggcgttgcggttgtcgggttttttagcgttggtaggaaaatagttggagtcgagagggaatcgcgtttcgaaaatttg

SEQ ID NO: 30072 - DNA, 1099 bp, Artificial Sequence
  chemically treated genomic DNA (Homo sapiens) CpG-island No: 30072
caaattttcgaaacgcgattccctctcgactccaactattttcctaccaacgctaaaaaacccgacaaccgcaacgcccccaacgacgcgcaacgacccaaaaaaaaaatacctaccgccgacgcctcttcaacctcctcctaaaacgcgaaaacgaacgcgaccaacgcccaccctaatcgtcgcgacgatactcctaattaactacgctatataacgtaacgaaaaaaccccgacgaccgccgaaaaccgaaacccaacgcgtacgcaaacgaaacgcgctaaacgaaaaaaaaaataactaccgcttctcccgcgtccgccattttattactataactattaaaaacaaactaaacaaaaacaccccgaaaacgcgacgctccttcgaattcgatacctcgtataacgacgaaaatcgataaaaacccgtcgaactacgacgccgacgcgttccaaaccgaaaatcactaaaaacacccctaaaacgccgaacaacccgaaaaccccgaaataacctccgctacgactcgaatttacctaccccgaccccccgactctaccgtacattcccgaacgactctctccgtataacgaccccgaaacaaacgaacgacgtcgaaaaatactacgaacccgaaaccgaaaaaaaaatactaacccaaccctctaaacgctcctcgaaatatacgaaaaacccttcctcgaccccaaaaccgtctaccgaactaaaacgtacaaaacaaacgaaaacaaccgccgcccctaccgccgcaaaatccccgatccaacaccatatcctccgccaaattcgactcctcgaaccgctccgcctaatatataaaaccgatatctcgccaaaaaacgcaaacccgactccaaaaccaacgccacgatatattcctcgtccgcgattcttccacctaccctaaaaactatatactatcgatatccgaaaactcgcgaatctcccactacatcatcaactcgctacccaaccgccgttttaaaatcgaaaaccaaaaatttaaccatttaccgaccctactaaaattttacaaaatccactacctaaacaccaccaccctcatcgaaccta

SEQ ID NO: 30073 - DNA, 592 bp, Artificial Sequence
  chemically treated genomic DNA (Homo sapiens) CpG-island No: 30073
ttagattcgggttcggggcgttttcggttagagcggtttttggttgtttttttacgtttcgcgatttcggttcggacgtcgagggtttcggtttgtttttgtttttcggtcgttttttatttgtttcggttcggcggggcggtgttgggttcgcgggtttttcggtcgtagtgtaaacgtagcgttagatacgtttcgttcgcgttttttcgttttttcgcgttcgcggttttaagcggttttcgagtttaggttcgcgtcgagtttaggtgagcgttcgtttcggggattttggttttcggaatttcggttttcgttcgtcgtttcgttttttcgtttcggcgtcgggggttagcgtttgcgtttttaagtttcggatttcggttcggtacgttaggggttgggggttggtaagcggggttagaggtattggtcggggttcgaagtttatttcgtttttttttcgttttataacggttttttttcggttcgtcgcggggttttattgtgtgttagttttttttttcgggttgtaaggtttggcgggggtaacgggacggagtcggcgaggttgttggtatcggttttttag

SEQ ID NO: 30074 - DNA, 592 bp, Artificial Sequence
  chemically treated genomic DNA (Homo sapiens) CpG-island No: 30074
ctaaaaaaccgataccaacaacctcgccgactccgtcccgttacccccgccaaaccttacaacccgaaaaaaaaaactaacacacaataaaaccccgcgacgaaccgaaaaaaaaccgttataaaacgaaaaaaaaacgaaataaacttcgaaccccgaccaatacctctaaccccgcttaccaacccccaacccctaacgtaccgaaccgaaatccgaaacttaaaaacgcaaacgctaacccccgacgccgaaacgaaaaaacgaaacgacgaacgaaaaccgaaattccgaaaaccaaaatccccgaaacgaacgctcacctaaactcgacgcgaacctaaactcgaaaaccgcttaaaaccgcgaacgcgaaaaaacgaaaaaacgcgaacgaaacgtatctaacgctacgtttacactacgaccgaaaaacccgcgaacccaacaccgccccgccgaaccgaaacaaataaaaaacgaccgaaaaacaaaaacaaaccgaaaccctcgacgtccgaaccgaaatcgcgaaacgtaaaaaaacaaccaaaaaccgctctaaccgaaaacgccccgaacccgaatctaa

SEQ ID NO: 30075 - DNA, 592 bp, Artificial Sequence
  chemically treated genomic DNA (Homo sapiens) CpG-island No: 30075
ttgggaagtcgatgttagtagtttcgtcggtttcgtttcgttgttttcgttagattttgtagttcgagaagggggattggtatatagtggggtttcgcggcgagtcgggaaggggtcgttgtgggacgagagaaggacgaggtgagtttcggatttcggttagtgtttttggtttcgtttgttaatttttagtttttaacgtgtcgggtcggggttcgagatttgggagcgtaagcgttggttttcggcgtcggggcgaagaggcggggcggcgggcggggatcggggtttcggggattagggttttcggggcgggcgtttatttgggttcggcgcgggtttgggttcgggaatcgtttggggtcgcgggcgcgggggggcggggaggcgcgggcggggcgtgtttggcgttgcgtttgtattgcggtcggggagttcgcgggtttagtatcgtttcgtcgggtcggagtaggtggggggcggtcgggggataggggtaggtcgaggttttcggcgttcggatcggagtcgcggggcgtagggaggtagttaggggtcgttttggtcgggggcgtttcgggttcgagtttgg

SEQ ID NO: 30076 - DNA, 592 bp, Artificial Sequence
  chemically treated genomic DNA (Homo sapiens) CpG-island No: 30076
ccaaactcgaacccgaaacgcccccgaccaaaacgacccctaactacctccctacgccccgcgactccgatccgaacgccgaaaacctcgacctacccctatcccccgaccgccccccacctactccgacccgacgaaacgatactaaacccgcgaactccccgaccgcaatacaaacgcaacgccaaacacgccccgcccgcgcctccccgcccccccgcgcccgcgaccccaaacgattcccgaacccaaacccgcgccgaacccaaataaacgcccgccccgaaaaccctaatccccgaaaccccgatccccgcccgccgccccgcctcttcgccccgacgccgaaaaccaacgcttacgctcccaaatctcgaaccccgacccgacacgttaaaaactaaaaattaacaaacgaaaccaaaaacactaaccgaaatccgaaactcacctcgtccttctctcgtcccacaacgaccccttcccgactcgccgcgaaaccccactatataccaatcccccttctcgaactacaaaatctaacgaaaacaacgaaacgaaaccgacgaaactactaacatcgacttcccaa

SEQ ID NO: 30077 - DNA, 721 bp, Artificial Sequence
  chemically treated genomic DNA (Homo sapiens) CpG-island No: 30077
cggtagcggtagacgatttaggtcggagttacgcgtagatttagggtatgtcgggaattgcgagtcggtcgcgggttttcgggttgcgtgggtttgggaggcgtcgggaagagtagtcgcgacggggttagggacgatatattgtatttattggaagggataacgtagcgttagtatatagtttgaaacgttttttagaaggttttacgttcgtcgcgcggtcgataatcgtattttgcgttcgttcgcggtgtttcggtaagcggtaggtttgtcgggaagagttggagggcgtaagtgcggcgttggtcggacgtgtcgtatcgttagcgtagggttcgtcgggaaatgtggtttttttagtcggttcggggcggtggtcgtaagttgggtttatagcgcggtcgattcggcgtggattcgggatggttggatcgggtagtacgggggggtagatcggggttgcggttttggtaggcggcgcgcggtttaaggtagtttcgagcgtggatttcgattatagttgttcggatagtgtcgagtatttgacgtttaatttcgggtttttcgaaatagtgtatcgttggcggcgtttttcgttttgcgacgagttcgtgggtgttcggtacggtgggttttatggggttttgaggataggaagggcgatttgcgagggttttagggcgggtttaggggcgaagtcggggggtggtgttttggg

SEQ ID NO: 30078 - DNA, 721 bp, Artificial Sequence
  chemically treated genomic DNA (Homo sapiens) CpG-island No: 30078
cccaaaacaccaccccccgacttcgcccctaaacccgccctaaaaccctcgcaaatcgcccttcctatcctcaaaaccccataaaacccaccgtaccgaacacccacgaactcgtcgcaaaacgaaaaacgccgccaacgatacactatttcgaaaaacccgaaattaaacgtcaaatactcgacactatccgaacaactataatcgaaatccacgctcgaaactaccttaaaccgcgcgccgcctaccaaaaccgcaaccccgatctacccccccgtactacccgatccaaccatcccgaatccacgccgaatcgaccgcgctataaacccaacttacgaccaccgccccgaaccgactaaaaaaaccacatttcccgacgaaccctacgctaacgatacgacacgtccgaccaacgccgcacttacgccctccaactcttcccgacaaacctaccgcttaccgaaacaccgcgaacgaacgcaaaatacgattatcgaccgcgcgacgaacgtaaaaccttctaaaaaacgtttcaaactatatactaacgctacgttatcccttccaataaatacaatatatcgtccctaaccccgtcgcgactactcttcccgacgcctcccaaacccacgcaacccgaaaacccgcgaccgactcgcaattcccgacataccctaaatctacgcgtaactccgacctaaatcgtctaccgctaccg

SEQ ID NO: 30079 - DNA, 721 bp, Artificial Sequence
  chemically treated genomic DNA (Homo sapiens) CpG-island No: 30079
tttaggatattatttttcggtttcgtttttggattcgttttgggattttcgtagatcgttttttttgtttttaggattttatgaagtttatcgtatcgggtatttacgaattcgtcgtagggcgggaggcgtcgttagcgatgtattgtttcgaagggttcgaagttgagcgttaggtattcgatattgttcgagtagttatggtcgaagtttacgttcggggttattttggatcgcgcgtcgtttgttagggtcgtagtttcgatttgttttttcgtgttgttcggtttagttatttcgggtttacgtcggatcggtcgcgttgtaagtttaatttgcggttatcgtttcgggtcggttggagaaattatatttttcggcgagttttgcgttgacggtgcggtacgttcggttagcgtcgtatttgcgttttttagtttttttcgataagtttatcgtttgtcgagatatcgcgggcgagcgtaggatgcggttgtcgatcgcgcggcgagcgtgggattttttggggagcgttttaggttatgtattggcgttgcgttgttttttttagtgaatgtagtgtgtcgtttttagtttcgtcgcgattgtttttttcggcgttttttaggtttacgtagttcgaagattcgcggtcggttcgtagttttcggtatgttttgggtttgcgcgtggtttcggtttggatcgtttgtcgttgtcg

SEQ ID NO: 30080 - DNA, 721 bp, Artificial Sequence
  chemically treated genomic DNA (Homo sapiens) CpG-island No: 30080
cgacaacgacaaacgatccaaaccgaaaccacgcgcaaacccaaaacataccgaaaactacgaaccgaccgcgaatcttcgaactacgtaaacctaaaaaacgccgaaaaaaacaatcgcgacgaaactaaaaacgacacactacattcactaaaaaaaacaacgcaacgccaatacataacctaaaacgctccccaaaaaatcccacgctcgccgcgcgatcgacaaccgcatcctacgctcgcccgcgatatctcgacaaacgataaacttatcgaaaaaaactaaaaaacgcaaatacgacgctaaccgaacgtaccgcaccgtcaacgcaaaactcgccgaaaaatataatttctccaaccgacccgaaacgataaccgcaaattaaacttacaacgcgaccgatccgacgtaaacccgaaataactaaaccgaacaacacgaaaaaacaaatcgaaactacgaccctaacaaacgacgcgcgatccaaaataaccccgaacgtaaacttcgaccataactactcgaacaatatcgaatacctaacgctcaacttcgaacccttcgaaacaatacatcgctaacgacgcctcccgccctacgacgaattcgtaaatacccgatacgataaacttcataaaatcctaaaaacaaaaaaaacgatctacgaaaatcccaaaacgaatccaaaaacgaaaccgaaaaataatatcctaaa

SEQ ID NO: 30081 - DNA, 642 bp, Artificial Sequence
  chemically treated genomic DNA (Homo sapiens) CpG-island No: 30081
ggttcgcgttttttgggttttgcggatttgggttcgggggcgcgcgtttcgtttttttttttttttggcggtgtagttgttcgggcgggggtggggcgggggtcggggttcgcgtgggattaattaggatcggggcgggagtcgatcgcggtcggcggggagggttagtttcgttttggcgggcgggcgcgtggtaggggttttcggaggtttcgagttttcgggaggcgtttcggttaatttcgggtcggtggggatcgggtttgggcgcggggttttgtaggtgtggaaggaaagtttgggatttcgttatttttttatagcgttttttttttcgtaatatttagtttttttatcgcggggttcgggagtttttggagttgatttcgttattattattttttcgggcgagcgcggaggacgggttggttattttggttaggtcggaggtgttttttagttcggggttttgtgataattgggtcgaaattcgagggttttggagcgcggcgggtggcgggagtttgcggagcgcggcgtattcggcggttaggtatcggttagtttagcggtagtttttttttttttatttttatttttatttttggaaggagttgagaattagtcgattggttggtaggt

SEQ ID NO: 30082 - DNA, 642 bp, Artificial Sequence
  chemically treated genomic DNA (Homo sapiens) CpG-island No: 30082
acctaccaaccaatcgactaattctcaactccttccaaaaataaaaataaaaataaaaaaaaaaaaactaccgctaaactaaccgatacctaaccgccgaatacgccgcgctccgcaaactcccgccacccgccgcgctccaaaaccctcgaatttcgacccaattatcacaaaaccccgaactaaaaaacacctccgacctaaccaaaataaccaacccgtcctccgcgctcgcccgaaaaaataataataacgaaatcaactccaaaaactcccgaaccccgcgataaaaaaactaaatattacgaaaaaaaaaacgctataaaaaaataacgaaatcccaaactttccttccacacctacaaaaccccgcgcccaaacccgatccccaccgacccgaaattaaccgaaacgcctcccgaaaactcgaaacctccgaaaacccctaccacgcgcccgcccgccaaaacgaaactaaccctccccgccgaccgcgatcgactcccgccccgatcctaattaatcccacgcgaaccccgacccccgccccacccccgcccgaacaactacaccgccaaaaaaaaaaaaaaacgaaacgcgcgcccccgaacccaaatccgcaaaacccaaaaaacgcgaacc

SEQ ID NO: 30083 - DNA, 642 bp, Artificial Sequence
  chemically treated genomic DNA (Homo sapiens) CpG-island No: 30083
atttgttaattaatcgattaatttttagttttttttaaaaataaaaataaaaataggagaaagggggttgtcgttgggttggtcgatgtttggtcgtcgagtgcgtcgcgtttcgtaagttttcgttattcgtcgcgttttaggattttcgggtttcggtttagttattataaagtttcgggttggaaaatattttcggtttggttagaatggttagttcgtttttcgcgttcgttcggggggataatggtggcgagattaattttaagggttttcgagtttcgcgataaagaggttggatattacgggaggaaggacgttgtggaagaataacggagttttaaattttttttttatatttgtagagtttcgcgtttaggttcggtttttatcggttcgaagttggtcggagcgtttttcgggagttcggggttttcgggagtttttgttacgcgttcgttcgttagagcggggttagtttttttcgtcggtcgcggtcgattttcgtttcggttttagttaattttacgcgggtttcggttttcgttttattttcgttcggatagttgtatcgttagggagggggaggggcggggcgcgcgttttcgggtttagattcgtaggatttagggggcgcgggtt

SEQ ID NO: 30084 - DNA, 642 bp, Artificial Sequence
  chemically treated genomic DNA (Homo sapiens) CpG-island No: 30084
aacccgcgccccctaaatcctacgaatctaaacccgaaaacgcgcgccccgcccctccccctccctaacgatacaactatccgaacgaaaataaaacgaaaaccgaaacccgcgtaaaattaactaaaaccgaaacgaaaatcgaccgcgaccgacgaaaaaaactaaccccgctctaacgaacgaacgcgtaacaaaaactcccgaaaaccccgaactcccgaaaaacgctccgaccaacttcgaaccgataaaaaccgaacctaaacgcgaaactctacaaatataaaaaaaaaatttaaaactccgttattcttccacaacgtccttcctcccgtaatatccaacctctttatcgcgaaactcgaaaacccttaaaattaatctcgccaccattatccccccgaacgaacgcgaaaaacgaactaaccattctaaccaaaccgaaaatattttccaacccgaaactttataataactaaaccgaaacccgaaaatcctaaaacgcgacgaataacgaaaacttacgaaacgcgacgcactcgacgaccaaacatcgaccaacccaacgacaaccccctttctcctatttttatttttatttttaaaaaaaactaaaaattaatcgattaattaacaaat

SEQ ID NO: 30085 - DNA, 1406 bp, Artificial Sequence
  chemically treated genomic DNA (Homo sapiens) CpG-island No: 30085
tcggtgtttagatgtgggttagcggtatcgtttcgttgattgtagtttcggcgttttggtagtgttggtgtacgtcgtgtaggcgatcgtcgggtagcggagaggcggcgtcggtcgcgttttcgtcgggtggtaggtatatgttgattatgtcgcgtaggtcgtcgaggtacgcgcgttgagagtgcgatgcgatggcgggcggcggcgagttgggtttagattttattatcgagtttatggggtttaggtttatggcggttgcggtcgtagttgcggtcgcggcggtggcgggttgttgttcgtaggcggcggtcgcggttgttgtggttgagggcgttatgttttcgtagttcgaggcggcggcggtcgcggtagcgacgtttatgtagttttgagcgtcgggcggtattattgggttgtattgtaggtcggttatgtcgtagcggtgtatcggcggtagcgcgggcggcggcggcgggttgtttatgttcgggggttgcgcgtagtttagttgtttttgtattagcgagtacgcgtcgttggtttagtcgtttacgtgcgtgtacgtgtttaggcgttggtttacgtttatcggattgttggcggtagcggttgcggtcgcggtagcggcggcggcggtcgcggtatcgggaggtaggaggtcgttgggtagggagtatttattttttttgagtagcgttttggttttgcggcgcggtcggtatttgtagttcggatatttttttatgtgtacggcgcgaagtcgtttggtttcgtcgatgaatggtcgtttttcggcgtcggttagtagtttttagtcggcgtttaagcgtttgttgattttagaattgtgtattttggggttttttagggttattttgcgtcgttgttcgcgggattatattatgaaggcgtttatgggtcgttttatacggttttggtttgtattttcgttattttcgttcgtattatcgttgttgtcgtcgttcgagttcgcgtcgtcggttgcgttcgtattatttttgtttgcgtttttcggggttgcggggtcgtcggtgttcgtcgtttgtgtgggtgtttttacggggtttttgagtttagtttttagaaggttgtatattgtcggggcgggaagaaggtgcgttagcgtggcgggaggagaaggcgttttcggggttggagcggttacggtgaaaaggttttgggatttcgtcggagcggagtttgggggtttgtgggttagcgagttcggcgggaagggtaggtttattaaaatgtttcgcgttaaattagtaggaattcgcgggtttttcgtatttgatgagttttttcgaataggtcgtatttatagtttgtttgggttttagttgggttttttatatatttgttcggatttttcgggg

SEQ ID NO: 30086 - DNA, 1406 bp, Artificial Sequence
  chemically treated genomic DNA (Homo sapiens) CpG-island No: 30086
ccccgaaaaatccgaacaaatatataaaaaacccaactaaaacccaaacaaactataaatacgacctattcgaaaaaactcatcaaatacgaaaaacccgcgaattcctactaatttaacgcgaaacattttaataaacctacccttcccgccgaactcgctaacccacaaacccccaaactccgctccgacgaaatcccaaaaccttttcaccgtaaccgctccaaccccgaaaacgccttctcctcccgccacgctaacgcaccttcttcccgccccgacaatatacaaccttctaaaaactaaactcaaaaaccccgtaaaaacacccacacaaacgacgaacaccgacgaccccgcaaccccgaaaaacgcaaacaaaaataatacgaacgcaaccgacgacgcgaactcgaacgacgacaacaacgataatacgaacgaaaataacgaaaatacaaaccaaaaccgtataaaacgacccataaacgccttcataatataatcccgcgaacaacgacgcaaaataaccctaaaaaaccccaaaatacacaattctaaaatcaacaaacgcttaaacgccgactaaaaactactaaccgacgccgaaaaacgaccattcatcgacgaaaccaaacgacttcgcgccgtacacataaaaaaatatccgaactacaaataccgaccgcgccgcaaaaccaaaacgctactcaaaaaaaataaatactccctacccaacgacctcctacctcccgataccgcgaccgccgccgccgctaccgcgaccgcaaccgctaccgccaacaatccgataaacgtaaaccaacgcctaaacacgtacacgcacgtaaacgactaaaccaacgacgcgtactcgctaatacaaaaacaactaaactacgcgcaacccccgaacataaacaacccgccgccgccgcccgcgctaccgccgatacaccgctacgacataaccgacctacaatacaacccaataataccgcccgacgctcaaaactacataaacgtcgctaccgcgaccgccgccgcctcgaactacgaaaacataacgccctcaaccacaacaaccgcgaccgccgcctacgaacaacaacccgccaccgccgcgaccgcaactacgaccgcaaccgccataaacctaaaccccataaactcgataataaaatctaaacccaactcgccgccgcccgccatcgcatcgcactctcaacgcgcgtacctcgacgacctacgcgacataatcaacatatacctaccacccgacgaaaacgcgaccgacgccgcctctccgctacccgacgatcgcctacacgacgtacaccaacactaccaaaacgccgaaactacaatcaacgaaacgataccgctaacccacatctaaacaccga

SEQ ID NO: 30087 - DNA, 1406 bp, Artificial Sequence
  chemically treated genomic DNA (Homo sapiens) CpG-island No: 30087
tttcggggaattcgagtaggtatataaggggtttagttagagtttaggtagattgtgaatgcgatttgttcgagagaatttattaggtgcgagaagttcgcgggtttttgttgatttggcgcggagtattttgataagtttatttttttcgtcggattcgttggtttataggtttttaagtttcgtttcgacggagttttagggtttttttatcgtggtcgttttagtttcgggagcgtttttttttttcgttacgttggcgtatttttttttcgtttcggtaatgtatagttttttggagattgaatttaagaatttcgtagggatatttatataagcggcgggtatcggcggtttcgtagtttcgggaggcgtaggtaagagtagtgcgaacgtagtcggcggcgcgaattcgggcggcggtagtagcggtggtgcgagcggaggtggcgggggtatagattaggatcgtgtgaaacggtttatgaacgtttttatggtatggtttcgcgggtagcggcgtaaaatggttttggagaattttaagatgtataattttgagattagtaagcgtttgggcgtcgattggaaattgttgatcgacgtcgagaagcgattatttatcgacgaggttaagcgatttcgcgtcgtgtatatgaaggagtattcggattataagtatcgatcgcgtcgtaagattaagacgttgtttaagaaagataagtattttttgtttagcggttttttgtttttcggtgtcgcggtcgtcgtcgtcgttgtcgcggtcgtagtcgttgtcgttagtagttcggtgggcgtgggttagcgtttggatacgtatacgtacgtgaacggttgggttaacggcgcgtattcgttggtgtaggagtagttgggttacgcgtagttttcgagtatgagtagttcgtcgtcgtcgttcgcgttgtcgtcgatgtatcgttacgatatggtcggtttgtagtatagtttaatgatgtcgttcggcgtttagagttatatgaacgtcgttgtcgcggtcgtcgtcgtttcgggttacgggggtatggcgtttttagttatagtagtcgcggtcgtcgtttacgggtagtagttcgttatcgtcgcggtcgtagttgcggtcgtagtcgttatgagtttgggttttatgggttcggtagtgaagtttgagtttagttcgtcgtcgttcgttatcgtatcgtatttttagcgcgcgtgtttcggcgatttgcgcgatatgattagtatgtatttgttattcggcggggacgcggtcgacgtcgttttttcgttgttcggcggtcgtttgtacggcgtgtattagtattattagggcgtcgggattgtagttaacggaacggtgtcgttgatttatatttgagtatcgg

SEQ ID NO: 30088 - DNA, 1406 bp, Artificial Sequence
  chemically treated genomic DNA (Homo sapiens) CpG-island No: 30088
ccgatactcaaatataaatcaacgacaccgttccgttaactacaatcccgacgccctaataatactaatacacgccgtacaaacgaccgccgaacaacgaaaaaacgacgtcgaccgcgtccccgccgaataacaaatacatactaatcatatcgcgcaaatcgccgaaacacgcgcgctaaaaatacgatacgataacgaacgacgacgaactaaactcaaacttcactaccgaacccataaaacccaaactcataacgactacgaccgcaactacgaccgcgacgataacgaactactacccgtaaacgacgaccgcgactactataactaaaaacgccatacccccgtaacccgaaacgacgacgaccgcgacaacgacgttcatataactctaaacgccgaacgacatcattaaactatactacaaaccgaccatatcgtaacgatacatcgacgacaacgcgaacgacgacgacgaactactcatactcgaaaactacgcgtaacccaactactcctacaccaacgaatacgcgccgttaacccaaccgttcacgtacgtatacgtatccaaacgctaacccacgcccaccgaactactaacgacaacgactacgaccgcgacaacgacgacgacgaccgcgacaccgaaaaacaaaaaaccgctaaacaaaaaatacttatctttcttaaacaacgtcttaatcttacgacgcgatcgatacttataatccgaatactccttcatatacacgacgcgaaatcgcttaacctcgtcgataaataatcgcttctcgacgtcgatcaacaatttccaatcgacgcccaaacgcttactaatctcaaaattatacatcttaaaattctccaaaaccattttacgccgctacccgcgaaaccataccataaaaacgttcataaaccgtttcacacgatcctaatctatacccccgccacctccgctcgcaccaccgctactaccgccgcccgaattcgcgccgccgactacgttcgcactactcttacctacgcctcccgaaactacgaaaccgccgatacccgccgcttatataaatatccctacgaaattcttaaattcaatctccaaaaaactatacattaccgaaacgaaaaaaaaatacgccaacgtaacgaaaaaaaaaaacgctcccgaaactaaaacgaccacgataaaaaaaccctaaaactccgtcgaaacgaaacttaaaaacctataaaccaacgaatccgacgaaaaaaataaacttatcaaaatactccgcgccaaatcaacaaaaacccgcgaacttctcgcacctaataaattctctcgaacaaatcgcattcacaatctacctaaactctaactaaaccccttatatacctactcgaattccccgaaa

SEQ ID NO: 30089 - DNA, 837 bp, Artificial Sequence
  chemically treated genomic DNA (Homo sapiens) CpG-island No: 30089
cggcggcggcggcggcggtgttgttgatttttattaagcggtgtatggacggcgcggcggcgcggcgcggggcgcggggggttcgggggcggtcggggggggtttcggtcggcgttcggagttggggtttcgtatgtaggaggcgcgcggcgggggaggcgcgtttcggttcgtcgggttcgggtcgtcgttaagttttcggggcgtcgcggggtttagtgcgcgggatcgcgtttcgttgcgttttttcggttttttttcggtagtttcgggggcgtcggtagtgttcgcgggtggcgttcggaaaatgggttggtagcggggcgcgcgttgtcgtcggggttgagtttttgtcgttagttttttttagtcgagcgttttcgtcgtcgtcgtcgtcgtcgtttttttttttttatttaagtttaaggagatcgggtttcgtttcgagatcgcggtcggaggtaggtagacggtttgacgttagcgttagacggggttgtcggtttttatcgcgcgggggtcggggagggggcgcgcgttgcgttaattttcgtcgaggttttttcgtatttttttttcgagtcggggggcggggtgacgggaaacggggcgggtttttaaagggttagagttaggcggtttacgtagattcggtattcgcgtaacggaggaggggcgttgtgttttttttttaacggcggttagtttggaacgtttgttcggcgtacgttcggggtcggggagtcgaattcggtgttagtcgtattcgggcgggttgttggtgcgtttttttttcgttttcgtttttggggtttttgatttaggtttttggggtta

SEQ ID NO: 30090 - DNA, 837 bp, Artificial Sequence
  chemically treated genomic DNA (Homo sapiens) CpG-island No: 30090
taaccccaaaaacctaaatcaaaaaccccaaaaacgaaaacgaaaaaaaaacgcaccaacaacccgcccgaatacgactaacaccgaattcgactccccgaccccgaacgtacgccgaacaaacgttccaaactaaccgccgttaaaaaaaaaacacaacgcccctcctccgttacgcgaataccgaatctacgtaaaccgcctaactctaaccctttaaaaacccgccccgtttcccgtcaccccgccccccgactcgaaaaaaaaatacgaaaaaacctcgacgaaaattaacgcaacgcgcgccccctccccgacccccgcgcgataaaaaccgacaaccccgtctaacgctaacgtcaaaccgtctacctacctccgaccgcgatctcgaaacgaaacccgatctccttaaacttaaataaaaaaaaaaaaacgacgacgacgacgacgacgaaaacgctcgactaaaaaaaactaacgacaaaaactcaaccccgacgacaacgcgcgccccgctaccaacccattttccgaacgccacccgcgaacactaccgacgcccccgaaactaccgaaaaaaaaccgaaaaaacgcaacgaaacgcgatcccgcgcactaaaccccgcgacgccccgaaaacttaacgacgacccgaacccgacgaaccgaaacgcgcctcccccgccgcgcgcctcctacatacgaaaccccaactccgaacgccgaccgaaaccccccccgaccgcccccgaaccccccgcgccccgcgccgcgccgccgcgccgtccatacaccgcttaataaaaatcaacaacaccgccgccgccgccgccg

SEQ ID NO: 30091 - DNA, 837 bp, Artificial Sequence
  chemically treated genomic DNA (Homo sapiens) CpG-island No: 30091
tagttttaagagtttgggttaaggattttagggacgggggcgaggggagggcgtattagtaattcgttcgggtgcggttggtatcgagttcggtttttcggtttcgggcgtgcgtcgggtaggcgttttaagttgatcgtcgttggggagagggtatagcgtttttttttcgttgcgcgggtgtcgggtttacgtgggtcgtttagttttggttttttaagagttcgtttcgtttttcgttatttcgtttttcggttcggggagggggtgcgggggaatttcggcggggattggcgtagcgcgcgtttttttttcggttttcgcgcggtgggaatcggtagtttcgtttagcgttgacgttagatcgtttgtttgttttcgatcgcggtttcggagcgaaattcgatttttttggatttgaatgaggaggaggaggcggcggcggcggcggcggcggaggcgttcggttggggaaagttagcggtagaggtttagtttcggcggtagcgcgcgtttcgttgttagtttatttttcggacgttattcgcgggtattgtcgacgttttcggggttgtcgaggggaggtcgggggggcgtagcggagcgcggtttcgcgtattgagtttcgcggcgtttcgggaatttggcggcgattcgagttcggcgagtcggggcgcgtttttttcgtcgcgcgttttttgtatgcggggttttagtttcgggcgtcggtcggagtttttttcggtcgttttcgagtttttcgcgtttcgcgtcgcgtcgtcgcgtcgtttatgtatcgtttgatgggggttaatagtatcgtcgtcgtcgtcgtcg

SEQ ID NO: 30092 - DNA, 837 bp, Artificial Sequence
  chemically treated genomic DNA (Homo sapiens) CpG-island No: 30092
cgacgacgacgacgacgatactattaacccccatcaaacgatacataaacgacgcgacgacgcgacgcgaaacgcgaaaaactcgaaaacgaccgaaaaaaactccgaccgacgcccgaaactaaaaccccgcatacaaaaaacgcgcgacgaaaaaaacgcgccccgactcgccgaactcgaatcgccgccaaattcccgaaacgccgcgaaactcaatacgcgaaaccgcgctccgctacgcccccccgacctcccctcgacaaccccgaaaacgtcgacaatacccgcgaataacgtccgaaaaataaactaacaacgaaacgcgcgctaccgccgaaactaaacctctaccgctaactttccccaaccgaacgcctccgccgccgccgccgccgccgcctcctcctcctcattcaaatccaaaaaaatcgaatttcgctccgaaaccgcgatcgaaaacaaacaaacgatctaacgtcaacgctaaacgaaactaccgattcccaccgcgcgaaaaccgaaaaaaaaacgcgcgctacgccaatccccgccgaaattcccccgcaccccctccccgaaccgaaaaacgaaataacgaaaaacgaaacgaactcttaaaaaaccaaaactaaacgacccacgtaaacccgacacccgcgcaacgaaaaaaaaacgctataccctctccccaacgacgatcaacttaaaacgcctacccgacgcacgcccgaaaccgaaaaaccgaactcgataccaaccgcacccgaacgaattactaatacgccctcccctcgcccccgtccctaaaatccttaacccaaactcttaaaacta

SEQ ID NO: 30093 - DNA, 903 bp, Artificial Sequence
  chemically treated genomic DNA (Homo sapiens) CpG-island No: 30093
tttataggttttagatattagatattcgtcggttatatagttcgcggatatttttatttatttcgtaggtcgttcgtttaacgcgttgatagtttattttttcgcgtagaaattagtcggattaggttttgttcgttaattatcgtttcgtcgtaattattttcggagatttagttataaattattcgttaaggacgacgtttacgacggtattttttatatttttttttagggtttttcgtcgttttaggtttttaagttaattttcgtatacgataaaaggaaagggaatcgttttaattcgtatacgttagttcgtcgatataatattttaataaatttatcgtttatcgattagcgaattattttttttatcgttcgttattattaatttcgtcgaagattaggtagtcgtaggtaagcggtttaattttcgggtttttaatttcgttttatcgttttacgcgttcgtcgttatattcgtagttcgtttcggttatcgtcgtttcgtagtatatttcgaagtttagtagcgagatattttcggtttcgtatttttcgtttaggatcgttcgggcgattcgggttttttttcggttttatacgaattttagaatagtttttttttattttcgcgaaaagcgatatcggtagttcgataggaatagtatcgaatttataaatcggttcgaatagagcggttattttaattatatcgattttttttatttacgaatacgggacgtttttttgttcgttcgtatcgttttcgatttttttttagtaacgtttcggtatttttcggtcgtagagaatttttatttttttcggtaaaaacgtatattttaggaattttatttttcgattcgtttttcgattcggtcgttatcggcggatcggaaa

SEQ ID NO: 30094 - DNA, 903 bp, Artificial Sequence
  chemically treated genomic DNA (Homo sapiens) CpG-island No: 30094
tttccgatccgccgataacgaccgaatcgaaaaacgaatcgaaaaataaaattcctaaaatatacgtttttaccgaaaaaaataaaaattctctacgaccgaaaaataccgaaacgttactaaaaaaaaatcgaaaacgatacgaacgaacaaaaaaacgtcccgtattcgtaaataaaaaaaatcgatataattaaaataaccgctctattcgaaccgatttataaattcgatactattcctatcgaactaccgatatcgcttttcgcgaaaataaaaaaaaactattctaaaattcgtataaaaccgaaaaaaaacccgaatcgcccgaacgatcctaaacgaaaaatacgaaaccgaaaatatctcgctactaaacttcgaaatatactacgaaacgacgataaccgaaacgaactacgaatataacgacgaacgcgtaaaacgataaaacgaaattaaaaacccgaaaattaaaccgcttacctacgactacctaatcttcgacgaaattaataataacgaacgataaaaaaaataattcgctaatcgataaacgataaatttattaaaatattatatcgacgaactaacgtatacgaattaaaacgattccctttccttttatcgtatacgaaaattaacttaaaaacctaaaacgacgaaaaaccctaaaaaaaaatataaaaaataccgtcgtaaacgtcgtccttaacgaataatttataactaaatctccgaaaataattacgacgaaacgataattaacgaacaaaacctaatccgactaatttctacgcgaaaaaataaactatcaacgcgttaaacgaacgacctacgaaataaataaaaatatccgcgaactatataaccgacgaatatctaatatctaaaacctataaa

SEQ ID NO: 30095 - DNA, 903 bp, Artificial Sequence
  chemically treated genomic DNA (Homo sapiens) CpG-island No: 30095
ttttcggttcgtcggtagcggtcggatcggagaacgagtcggggggtggggtttttagaatgtgcgtttttatcgagaggaataggggttttttgcggtcggaaggtgtcggagcgttattagggaagggtcgagaacggtgcggacgggtaagagggcgtttcgtattcgtaagtgagggagatcggtgtaattggggtaatcgttttattcgggtcggtttgtgagttcggtattgtttttgtcgggttgtcggtatcgtttttcgcgaggatgagggggggttgttttggagttcgtgtaaggtcgggggaagattcgggtcgttcgggcggttttggacgggggatgcgggatcgagagtgtttcgttgttaggtttcgggatgtgttgcggagcggcgatggtcggggcgaattgcgaatgtagcggcgagcgcgtgagacggtaaggcgaggttgaaggttcgagggttggatcgtttgtttgcggttgtttagttttcggcggggttagtggtggcgggcggtagagagggtggttcgttgatcgatgggcgataggtttgttagggtattgtgtcggcgaattgacgtgtacgagttaaggcgattttttttttttttgtcgtgtgcgggggttgatttgggagtttggggcggcggggggttttgaggaggggtatggagggtgtcgtcgtgagcgtcgtttttaacgggtggtttgtagttggattttcggggataattacggcggggcggtggttagcggatagggtttggttcggttgatttttacgcgagggggtgggttgttaacgcgttgggcgagcggtttgcgagataaataggggtattcgcgggttgtatggtcggcgggtatttggtgtttaaggtttgtgga

SEQ ID NO: 30096 - DNA, 903 bp, Artificial Sequence
  chemically treated genomic DNA (Homo sapiens) CpG-island No: 30096
tccacaaaccttaaacaccaaatacccgccgaccatacaacccgcgaatacccctatttatctcgcaaaccgctcgcccaacgcgttaacaacccaccccctcgcgtaaaaatcaaccgaaccaaaccctatccgctaaccaccgccccgccgtaattatccccgaaaatccaactacaaaccacccgttaaaaacgacgctcacgacgacaccctccatacccctcctcaaaaccccccgccgccccaaactcccaaatcaacccccgcacacgacaaaaaaaaaaaaaatcgccttaactcgtacacgtcaattcgccgacacaataccctaacaaacctatcgcccatcgatcaacgaaccaccctctctaccgcccgccaccactaaccccgccgaaaactaaacaaccgcaaacaaacgatccaaccctcgaaccttcaacctcgccttaccgtctcacgcgctcgccgctacattcgcaattcgccccgaccatcgccgctccgcaacacatcccgaaacctaacaacgaaacactctcgatcccgcatcccccgtccaaaaccgcccgaacgacccgaatcttcccccgaccttacacgaactccaaaacaaccccccctcatcctcgcgaaaaacgataccgacaacccgacaaaaacaataccgaactcacaaaccgacccgaataaaacgattaccccaattacaccgatctccctcacttacgaatacgaaacgccctcttacccgtccgcaccgttctcgacccttccctaataacgctccgacaccttccgaccgcaaaaaacccctattcctctcgataaaaacgcacattctaaaaaccccaccccccgactcgttctccgatccgaccgctaccgacgaaccgaaaa

SEQ ID NO: 30097 - DNA, 945 bp, Artificial Sequence
  chemically treated genomic DNA (Homo sapiens) CpG-island No: 30097
gttatcgtagtttcgtaatagggttcgaagttaggtaatacgacgtttttagtttcgttttttcggtttagtatcgattcggtaacgtgggttttttttcggttttatacgaattttaaagtagttttttttaatttcgcgaagaaagttatcggtagttcgacggggacggtatcgaatttataaattatttcggttagtacggttatttttacgatatcgattttttttatttatgagtacggaacgtttttttattcgttcgtatttttttttattttatcgagtagcgtttcgtagtttttttcgaagaggttttttatatttttcgtaagttagatttttaggtattttatttttttcgaagtaatcgcgaacgggagtttatttacgattcggtttttcgttcgttatcggcgtataggaacgttcgcgattttcgtatatcgatttcgtatttcgaaatttcgtcgaagtcgtttattagtttaaagagatttcgggtcgagacgacggggttttttaaatatattattacgttgttcgtaaagagagataattcgattttttttttttttattcgaatatgttttatttttttttttcgttcgatcgtttcggttggaatttttaatattacgtcgaataggagcggcgaaagagggtattttcgtttcgcgttgatttttaaagggaacgtttttagttttcgtttatttagcgcgatatcgttcgcgggatcgttataaatagtttcgattatttcgaaatacgttttattaatatttagtttatcgagagtttttagtacgaaggttcgtcgaatttcgttgaaggtttttttcgtatttattgagataatttcgcggttttcgttatcggtttcgtttacgcggtggattatatttatcgattcgtgtacgtcgaattagtttcgtattttaa

SEQ ID NO: 30098 - DNA, 945 bp, Artificial Sequence
  chemically treated genomic DNA (Homo sapiens) CpG-island No: 30098
ttaaaatacgaaactaattcgacgtacacgaatcgataaatataatccaccgcgtaaacgaaaccgataacgaaaaccgcgaaattatctcaataaatacgaaaaaaaccttcaacgaaattcgacgaaccttcgtactaaaaactctcgataaactaaatattaataaaacgtatttcgaaataatcgaaactatttataacgatcccgcgaacgatatcgcgctaaataaacgaaaactaaaaacgttccctttaaaaatcaacgcgaaacgaaaataccctctttcgccgctcctattcgacgtaatattaaaaattccaaccgaaacgatcgaacgaaaaaaaaaaataaaacatattcgaataaaaaaaaaaaaaatcgaattatctctctttacgaacaacgtaataatatatttaaaaaaccccgtcgtctcgacccgaaatctctttaaactaataaacgacttcgacgaaatttcgaaatacgaaatcgatatacgaaaatcgcgaacgttcctatacgccgataacgaacgaaaaaccgaatcgtaaataaactcccgttcgcgattacttcgaaaaaaataaaatacctaaaaatctaacttacgaaaaatataaaaaacctcttcgaaaaaaactacgaaacgctactcgataaaataaaaaaaaatacgaacgaataaaaaaacgttccgtactcataaataaaaaaaatcgatatcgtaaaaataaccgtactaaccgaaataatttataaattcgataccgtccccgtcgaactaccgataactttcttcgcgaaattaaaaaaaactactttaaaattcgtataaaaccgaaaaaaaacccacgttaccgaatcgatactaaaccgaaaaaacgaaactaaaaacgtcgtattacctaacttcgaaccctattacgaaactacgataac

SEQ ID NO: 30099 - DNA, 945 bp, Artificial Sequence
  chemically treated genomic DNA (Homo sapiens) CpG-island No: 30099
ttaaggtacggaattaattcggcgtgtacgggtcggtgggtatggtttatcgcgtgggcgaggtcgatagcgggggtcgcggagttgttttagtgagtacgaggggaatttttaacggggttcggcgaattttcgtattgggggttttcggtgggttgaatgttagtaaggcgtgtttcggggtggtcgaaattgtttgtagcggtttcgcgaacggtgtcgcgttaggtaaacgggggttaaggacgttttttttaggggttaacgcggagcggaagtattttttttcgtcgtttttgttcggcgtgatgttaaggattttaatcgaaacggtcgaacggagagggagggtgggatatgttcgagtgaaggagagaaggatcgagttatttttttttacgagtagcgtagtgatatgtttgaggggtttcgtcgtttcggttcggggtttttttggattagtggacggtttcgacgggatttcgaagtgcggggtcggtatacgggggtcgcggacgtttttgtgcgtcggtggcgggcgagagatcgggtcgtagataggttttcgttcgcggttatttcgggagaggtggggtgtttgaaggtttggtttgcggaaagtataggaagttttttcggaagaggttgcggggcgttattcggtagggtggggagaagtgcgggcgggtaaggaggcgtttcgtatttataaatgaaggaggtcggtgtcgtaggggtaatcgtgttagtcggaatagtttgtgaattcggtatcgttttcgtcggattgtcggtagtttttttcgcgaggttaaggggggttgttttgggattcgtgtaaggtcggggggagatttacgttatcggatcggtgttggatcggggaggcgggattaagaacgtcgtattgtttagtttcgagttttgttgcggaattgcgatggt

SEQ ID NO: 30100 - DNA, 945 bp, Artificial Sequence
  chemically treated genomic DNA (Homo sapiens) CpG-island No: 30100
accatcgcaattccgcaacaaaactcgaaactaaacaatacgacgttcttaatcccgcctccccgatccaacaccgatccgataacgtaaatctccccccgaccttacacgaatcccaaaacaaccccccttaacctcgcgaaaaaaactaccgacaatccgacgaaaacgataccgaattcacaaactattccgactaacacgattacccctacgacaccgacctccttcatttataaatacgaaacgcctccttacccgcccgcacttctccccaccctaccgaataacgccccgcaacctcttccgaaaaaacttcctatactttccgcaaaccaaaccttcaaacaccccacctctcccgaaataaccgcgaacgaaaacctatctacgacccgatctctcgcccgccaccgacgcacaaaaacgtccgcgacccccgtataccgaccccgcacttcgaaatcccgtcgaaaccgtccactaatccaaaaaaaccccgaaccgaaacgacgaaacccctcaaacatatcactacgctactcgtaaaaaaaaataactcgatccttctctccttcactcgaacatatcccaccctccctctccgttcgaccgtttcgattaaaatccttaacatcacgccgaacaaaaacgacgaaaaaaaatacttccgctccgcgttaacccctaaaaaaaacgtccttaacccccgtttacctaacgcgacaccgttcgcgaaaccgctacaaacaatttcgaccaccccgaaacacgccttactaacattcaacccaccgaaaacccccaatacgaaaattcgccgaaccccgttaaaaattcccctcgtactcactaaaacaactccgcgacccccgctatcgacctcgcccacgcgataaaccatacccaccgacccgtacacgccgaattaattccgtaccttaa

SEQ ID NO: 30101 - DNA, 607 bp, Artificial Sequence
  chemically treated genomic DNA (Homo sapiens) CpG-island No: 30101
gacgagataggtttattcggcgcggatgagataggtttagatttgcgcggtttgaggacggcgcgttcgtcgagtaattcggtaggttagaattttggatagcggcgtcggttttcgtatttttatttattttcggttgttgcggagaaagaagtcgtatcgggggtttagtcggggtttttcgttgtttaggggtgggattcgttcggtcggattttaggcgttcggggatcgattttaatttttttttagtttaaatttgcgaaagttatttcggatatgcgtttagcgttggtaatagagataaaattttttttttcgtagtattacgcgtcgtttttattcggtcgttgtagtcggaaattatttcgcggttttcgaggagagttcggtcgttttattgattagataattagtcgagtttttttaatatatttatttcgcgggggttttaagtcggtttgggattttcggtttcgtttcgttcggcgtttttttttcggagtcgttaggttgggttttttttcgttggtaaaatagcgagtaaataaataattaaataattttagaaacgaaaggttgtattaaattttgatgacgttagttt

SEQ ID NO: 30102 - DNA, 607 bp, Artificial Sequence
  chemically treated genomic DNA (Homo sapiens) CpG-island No: 30102
aaactaacgtcatcaaaatttaatacaacctttcgtttctaaaattatttaattatttatttactcgctattttaccaacgaaaaaaaacccaacctaacgactccgaaaaaaaaacgccgaacgaaacgaaaccgaaaatcccaaaccgacttaaaacccccgcgaaataaatatattaaaaaaactcgactaattatctaatcaataaaacgaccgaactctcctcgaaaaccgcgaaataatttccgactacaacgaccgaataaaaacgacgcgtaatactacgaaaaaaaaaattttatctctattaccaacgctaaacgcatatccgaaataactttcgcaaatttaaactaaaaaaaaattaaaatcgatccccgaacgcctaaaatccgaccgaacgaatcccacccctaaacaacgaaaaaccccgactaaacccccgatacgacttctttctccgcaacaaccgaaaataaataaaaatacgaaaaccgacgccgctatccaaaattctaacctaccgaattactcgacgaacgcgccgtcctcaaaccgcgcaaatctaaacctatctcatccgcgccgaataaacctatctcgtc

SEQ ID NO: 30103 - DNA, 607 bp, Artificial Sequence
  chemically treated genomic DNA (Homo sapiens) CpG-island No: 30103
gggttggcgttattaaagtttggtgtagtttttcgtttttaaggttgtttggttgtttgtttattcgttgttttgttaacgggaaggagtttagtttagcggtttcgggagaggagcgtcgggcgaggcgaggtcgagggttttaagtcggtttagagttttcgcgaggtgggtgtgttgagggagttcggttggttatttagttagtgaggcggtcggatttttttcgggggtcgcgagatggttttcggttgtagcggtcgggtaggagcggcgcgtggtattgcggagaagggagttttgtttttgttgttagcgttgagcgtatgttcggagtaattttcgtaggtttggattgggagaggattggggtcggttttcggacgtttggggttcggtcgggcggattttatttttgagtagcgaggggtttcggttgggttttcggtacggttttttttttcgtagtagtcgggggtgggtgggggtgcggaaatcggcgtcgttgtttagggttttgatttgtcgggttgttcggcgagcgcgtcgtttttagatcgcgtaggtttgagtttgttttattcgcgtcggatgagtttgtttcgtt

SEQ ID NO: 30104 - DNA, 607 bp, Artificial Sequence
  chemically treated genomic DNA (Homo sapiens) CpG-island No: 30104
aacgaaacaaactcatccgacgcgaataaaacaaactcaaacctacgcgatctaaaaacgacgcgctcgccgaacaacccgacaaatcaaaaccctaaacaacgacgccgatttccgcacccccacccacccccgactactacgaaaaaaaaaaccgtaccgaaaacccaaccgaaacccctcgctactcaaaaataaaatccgcccgaccgaaccccaaacgtccgaaaaccgaccccaatcctctcccaatccaaacctacgaaaattactccgaacatacgctcaacgctaacaacaaaaacaaaactcccttctccgcaataccacgcgccgctcctacccgaccgctacaaccgaaaaccatctcgcgacccccgaaaaaaatccgaccgcctcactaactaaataaccaaccgaactccctcaacacacccacctcgcgaaaactctaaaccgacttaaaaccctcgacctcgcctcgcccgacgctcctctcccgaaaccgctaaactaaactccttcccgttaacaaaacaacgaataaacaaacaaccaaacaaccttaaaaacgaaaaactacaccaaactttaataacgccaaccc

SEQ ID NO: 30105 - DNA, 648 bp, Artificial Sequence
  chemically treated genomic DNA (Homo sapiens) CpG-island No: 30105
tcgtcgcgtttcgatttcgaggttttcgaggaggtagcgacgtttcggggtcgggggtcgggtatcgggtggtttttgcggcggcggcgtcgggtttttttagttagagcgaggagcgcgttaaggtagggttcggcgttttttttttgttcgattcgtcggcgttttagttagagtttagcgtcgttatcgtcgttaggacgttttttcgtcgttttagttttgttcggagttttagggttttatttatttcgcgggagatttttatttcgggatttaggtgtttacgtcgttagcgattcggagtttttacgtcgtcgttcgtttggcgtagattgtttcgggacgtttcgtcgcgcgttttttttgtgcgcgtttattcgcgcgcgttttattgtcgtcgcgcgttcgcgtcgttcgaattcgtattttttaggtacgtattgcgcgcgttcgcggcgtttaaagggtcgggtttcgtcgcgttgggggatttcgcggtcgtttttcgggggttttcggttaaggtgtgaagttcgagttgggggatagtatcgtgaaaatttttaattttatcgtcgagcgatttacgcggagaaaagtaatagggatgtgtgtttgaagtttgtaagagatgggatattaatt

SEQ ID NO: 30106 - DNA, 648 bp, Artificial Sequence
  chemically treated genomic DNA (Homo sapiens) CpG-island No: 30106
aattaatatcccatctcttacaaacttcaaacacacatccctattacttttctccgcgtaaatcgctcgacgataaaattaaaaattttcacgatactatcccccaactcgaacttcacaccttaaccgaaaacccccgaaaaacgaccgcgaaatcccccaacgcgacgaaacccgaccctttaaacgccgcgaacgcgcgcaatacgtacctaaaaaatacgaattcgaacgacgcgaacgcgcgacgacaataaaacgcgcgcgaataaacgcgcacaaaaaaaacgcgcgacgaaacgtcccgaaacaatctacgccaaacgaacgacgacgtaaaaactccgaatcgctaacgacgtaaacacctaaatcccgaaataaaaatctcccgcgaaataaataaaaccctaaaactccgaacaaaactaaaacgacgaaaaaacgtcctaacgacgataacgacgctaaactctaactaaaacgccgacgaatcgaacaaaaaaaaaacgccgaaccctaccttaacgcgctcctcgctctaactaaaaaaacccgacgccgccgccgcaaaaaccacccgatacccgacccccgaccccgaaacgtcgctacctcctcgaaaacctcgaaatcgaaacgcgacga

SEQ ID NO: 30107 - DNA, 648 bp, Artificial Sequence
  chemically treated genomic DNA (Homo sapiens) CpG-island No: 30107
aattaatgttttattttttgtaagttttagatatatatttttattgttttttttcgcgtgggtcgttcggcgatggggttggggatttttacggtgttgttttttaattcgaattttatattttgatcgaggattttcgggaggcggtcgcgaggttttttagcgcggcggggttcggttttttaagcgtcgcgggcgcgcgtagtgcgtgtttaaggagtgcgagttcgggcggcgcgagcgcgcggcggtagtagagcgcgcgcgggtgggcgcgtatagggagagcgcgcggcggggcgtttcggaatagtttgcgttagacgggcggcggcgtgagggtttcgggtcgttggcggcgtggatatttgagtttcggggtaggggtttttcgcgaggtgagtggggttttaggatttcgggtagggttggagcgacgggagggcgttttggcggcggtggcggcgttgggttttggttgggacgtcggcgggtcgggtagagagggggcgtcggattttgttttggcgcgtttttcgttttgattaggggagttcggcgtcgtcgtcgtagaggttattcggtgttcgattttcgatttcggggcgtcgttgttttttcggggatttcggagtcggggcgcggcgg

SEQ ID NO: 30108 - DNA, 648 bp, Artificial Sequence
  chemically treated genomic DNA (Homo sapiens) CpG-island No: 30108
ccgccgcgccccgactccgaaatccccgaaaaaacaacgacgccccgaaatcgaaaatcgaacaccgaataacctctacgacgacgacgccgaactcccctaatcaaaacgaaaaacgcgccaaaacaaaatccgacgccccctctctacccgacccgccgacgtcccaaccaaaacccaacgccgccaccgccgccaaaacgccctcccgtcgctccaaccctacccgaaatcctaaaaccccactcacctcgcgaaaaacccctaccccgaaactcaaatatccacgccgccaacgacccgaaaccctcacgccgccgcccgtctaacgcaaactattccgaaacgccccgccgcgcgctctccctatacgcgcccacccgcgcgcgctctactaccgccgcgcgctcgcgccgcccgaactcgcactccttaaacacgcactacgcgcgcccgcgacgcttaaaaaaccgaaccccgccgcgctaaaaaacctcgcgaccgcctcccgaaaatcctcgatcaaaatataaaattcgaattaaaaaacaacaccgtaaaaatccccaaccccatcgccgaacgacccacgcgaaaaaaaacaataaaaatatatatctaaaacttacaaaaaataaaacattaatt

SEQ ID NO: 30109 - DNA, 747 bp, Artificial Sequence
  chemically treated genomic DNA (Homo sapiens) CpG-island No: 30109
  unsure (527, 532)
ttcgggttcgggatacggggagttttttttttaggggcgtaaacggggtttcggtttttcgggtttttttcgggttaatggcggcgttttgatttcgattcggtattaacgcgaggagttcgcgcggttcggggttgattttatgtcgtttagttgtcgcgcgttggtgggtcgcggtttcgattttcgtcgtttcgtttcggtcgggtttcggttgtagaagcgggcggggagttgggtttaggggtcgcgtcggagatatatgggtttatttgtttcgaaggttcgtaagacggcgacggcggttatagtattcgggatggttagacgtcgtaggatcgcgttgtttggtcggtcgtaggtgttgggcgtttcgagggcgttgttgtgagtagggtcgggacggaattcgacggaattcgacggtggtcgagattcggacggaatcgtttgataggtttaggtttcgcggggacgttttaggttaggtttagttcgtattacgtttcgtttcggtacgtttcgtntcgtntcggtacgttcgttttcgtttcgtttcggtacgttttttttcgtttcggtacgtttcgtttcgtttttacgaggttcgttttcggttcgtcgtttttcgtcgcgtttcgtacggtgaaaggcgcgtattgaaaatttgtaggtcggttttaggggttgtttgataaggtttgtgggaaagtttaagcgaggggaggagtaggatgattttttttt

SEQ ID NO: 30110 - DNA, 747 bp, Artificial Sequence
  chemically treated genomic DNA (Homo sapiens) CpG-island No: 30110
  unsure (216, 221)
aaaaaaaaatcatcctactcctcccctcgcttaaactttcccacaaaccttatcaaacaacccctaaaaccgacctacaaattttcaatacgcgcctttcaccgtacgaaacgcgacgaaaaacgacgaaccgaaaacgaacctcgtaaaaacgaaacgaaacgtaccgaaacgaaaaaaaacgtaccgaaacgaaacgaaaacgaacgtaccganacganacgaaacgtaccgaaacgaaacgtaatacgaactaaacctaacctaaaacgtccccgcgaaacctaaacctatcaaacgattccgtccgaatctcgaccaccgtcgaattccgtcgaattccgtcccgaccctactcacaacaacgccctcgaaacgcccaacacctacgaccgaccaaacaacgcgatcctacgacgtctaaccatcccgaatactataaccgccgtcgccgtcttacgaaccttcgaaacaaataaacccatatatctccgacgcgacccctaaacccaactccccgcccgcttctacaaccgaaacccgaccgaaacgaaacgacgaaaatcgaaaccgcgacccaccaacgcgcgacaactaaacgacataaaatcaaccccgaaccgcgcgaactcctcgcgttaataccgaatcgaaatcaaaacgccgccattaacccgaaaaaaacccgaaaaaccgaaaccccgtttacgcccctaaaaaaaaaactccccgtatcccgaacccgaa

SEQ ID NO: 30111 - DNA, 747 bp, Artificial Sequence
  chemically treated genomic DNA (Homo sapiens) CpG-island No: 30111
  unsure (216, 221)
aaaaagaaattattttattttttttttcgtttaaatttttttataggttttgttaaataatttttggagtcggtttgtaggtttttaatgcgcgttttttatcgtgcggggcgcggcggggagcggcgagtcgggggcgggtttcgtgggggcggggcggggcgtgtcggggcggggaggggcgtgtcggggcggggcgggggcgggcgtgtcggngcggngcggggcgtgtcggggcggggcgtagtacggattgggtttggtttggggcgttttcgcgaagtttgggtttgttaggcggtttcgttcgggtttcggttatcgtcgagtttcgtcgagtttcgtttcggttttgtttatagtagcgttttcggagcgtttagtatttgcggtcggttaggtagcgcgattttgcggcgtttggttatttcgaatgttatggtcgtcgtcgtcgttttgcgggttttcggggtaagtgggtttatgtgttttcggcgcggtttttgggtttagtttttcgttcgtttttgtagtcgggattcggtcggggcggggcggcgggagtcggagtcgcggtttattagcgcgcggtagttggacggtataaggttagtttcgggtcgcgcgggtttttcgcgttggtgtcgagtcggggttagggcgtcgttattgattcggggaggattcggggaatcggagtttcgtttacgtttttggggagggaatttttcgtgtttcggattcggg

SEQ ID NO: 30112 - DNA, 747 bp, Artificial Sequence
  chemically treated genomic DNA (Homo sapiens) CpG-island No: 30112
  unsure (527, 532)
cccgaatccgaaacacgaaaaattccctccccaaaaacgtaaacgaaactccgattccccgaatcctccccgaatcaataacgacgccctaaccccgactcgacaccaacgcgaaaaacccgcgcgacccgaaactaaccttataccgtccaactaccgcgcgctaataaaccgcgactccgactcccgccgccccgccccgaccgaatcccgactacaaaaacgaacgaaaaactaaacccaaaaaccgcgccgaaaacacataaacccacttaccccgaaaacccgcaaaacgacgacgacgaccataacattcgaaataaccaaacgccgcaaaatcgcgctacctaaccgaccgcaaatactaaacgctccgaaaacgctactataaacaaaaccgaaacgaaactcgacgaaactcgacgataaccgaaacccgaacgaaaccgcctaacaaacccaaacttcgcgaaaacgccccaaaccaaacccaatccgtactacgccccgccccgacacgccccgcnccgcnccgacacgcccgcccccgccccgccccgacacgcccctccccgccccgacacgccccgccccgcccccacgaaacccgcccccgactcgccgctccccgccgcgccccgcacgataaaaaacgcgcattaaaaacctacaaaccgactccaaaaattatttaacaaaacctataaaaaaatttaaacgaaaaaaaaaataaaataatttcttttt

SEQ ID NO: 30113 - DNA, 580 bp, Artificial Sequence
  chemically treated genomic DNA (Homo sapiens) CpG-island No: 30113
gcgcgtttttttcgaggagtcgcggttcgcgaattgtacggtgatgttttggggtcggggtagggagtttgcgcggcgttagttttgggcgtcgttgggttgtcggggttcggggaagttttgacgggttcgcgtgttgggtagggtcgggttagggcggaagtagagggattttttagcgggcgcgaaggagttgggtgcgttttttagggtttcgtgcgtatttgggaagtcgttggttagcgtcgggtttcgcggagtttgattttttgttcggagatttttagcggggttcggtaggtttcggttacgcgttattcgtttcggggaggagtcgttttttggggttttttcgtcggcgtttttcgcggcggggaaggcgtcggcgtggtcgtggatggtggttaatatttgcgttttgcgtttttgtacgttgacggtcgttttggatagggttttgcggggttttcgggtcgcgtcgttggtgacgatgatgttgttggggaagcggggtgttttgggttgcgtcgggtggttgggtttcgggttagggtttttattgcggggttttcgggcggta

SEQ ID NO: 30114 - DNA, 580 bp, Artificial Sequence
  chemically treated genomic DNA (Homo sapiens) CpG-island No: 30114
taccgcccgaaaaccccgcaataaaaaccctaacccgaaacccaaccacccgacgcaacccaaaacaccccgcttccccaacaacatcatcgtcaccaacgacgcgacccgaaaaccccgcaaaaccctatccaaaacgaccgtcaacgtacaaaaacgcaaaacgcaaatattaaccaccatccacgaccacgccgacgccttccccgccgcgaaaaacgccgacgaaaaaaccccaaaaaacgactcctccccgaaacgaataacgcgtaaccgaaacctaccgaaccccgctaaaaatctccgaacaaaaaatcaaactccgcgaaacccgacgctaaccaacgacttcccaaatacgcacgaaaccctaaaaaacgcacccaactccttcgcgcccgctaaaaaatccctctacttccgccctaacccgaccctacccaacacgcgaacccgtcaaaacttccccgaaccccgacaacccaacgacgcccaaaactaacgccgcgcaaactccctaccccgaccccaaaacatcaccgtacaattcgcgaaccgcgactcctcgaaaaaaacgcgc

SEQ ID NO: 30115 - DNA, 580 bp, Artificial Sequence
  chemically treated genomic DNA (Homo sapiens) CpG-island No: 30115
tgtcgttcgggggtttcgtagtggagattttggttcggggtttagttattcggcgtagtttaaggtatttcgtttttttagtaatattatcgttattaacggcgcggttcgggagtttcgtaggattttgtttagggcggtcgttagcgtgtaggagcgtagggcgtaggtgttggttattatttacggttacgtcggcgtttttttcgtcgcgggggacgtcggcgagggggttttagggggcggttttttttcggagcgggtggcgcgtggtcggggtttgtcgggtttcgttgagagttttcgggtagggggttaggtttcgcggggttcggcgttggttaacggttttttaagtgcgtacgaggttttgaagagcgtatttagttttttcgcgttcgttgggaagtttttttgttttcgttttggttcggttttgtttagtacgcgggttcgttagagttttttcgggtttcggtagtttaacggcgtttaggattggcgtcgcgtagattttttgtttcggttttagggtattatcgtgtagttcgcgggtcgcggtttttcggaggaggcgcgt

SEQ ID NO: 30116 - DNA, 580 bp, Artificial Sequence
  chemically treated genomic DNA (Homo sapiens) CpG-island No: 30116
acgcgcctcctccgaaaaaccgcgacccgcgaactacacgataataccctaaaaccgaaacaaaaaatctacgcgacgccaatcctaaacgccgttaaactaccgaaacccgaaaaaactctaacgaacccgcgtactaaacaaaaccgaaccaaaacgaaaacaaaaaaacttcccaacgaacgcgaaaaaactaaatacgctcttcaaaacctcgtacgcacttaaaaaaccgttaaccaacgccgaaccccgcgaaacctaaccccctacccgaaaactctcaacgaaacccgacaaaccccgaccacgcgccacccgctccgaaaaaaaaccgccccctaaaaccccctcgccgacgtcccccgcgacgaaaaaaacgccgacgtaaccgtaaataataaccaacacctacgccctacgctcctacacgctaacgaccgccctaaacaaaatcctacgaaactcccgaaccgcgccgttaataacgataatattactaaaaaaacgaaataccttaaactacgccgaataactaaaccccgaaccaaaatctccactacgaaacccccgaacgaca

SEQ ID NO: 30117 - DNA, 704 bp, Artificial Sequence
  chemically treated genomic DNA (Homo sapiens) CpG-island No: 30117
gcgggagcggattcgcgggagtatttgtgacgtcgtttagtaattcggcgtcgtttcggcggtttcgacgtggtttagtgttcggttggcgtgggttttttaggtcgtatttattaaatcgcgtcggagcgggatacgtatgcgtcggtttggattcggtatttagtaacggattcgagttttttttatcggaagtgggtagtcgcgtagcgggaagagtcggtcgaagcgtggcggttatagattgtgggtatcgggttcgagggattcgcgttttttttttcgtgttatggcgttagcgaaagttacgaacgtggtgcggttgttattaggttttatagcgttgtggttttcgtagttcggtttcgggacggtcgtcgcgtttaagtcggtgattgtttatttggtcgcgaagtggttcgagatttcgttgttgttggaggtaaggtgggtgcgggtcgggttttcgttcgggcgggtgtgggcgcgttgttatttttagtcgcgtttttttcgtgttcgtagcgggtgtttggtttttattcgggttttttagacgttttcgttttggttttgagtattattatttttttttttttcgattcggggcggtttttcggttttcgtgtagtatttatttgtagttttttttttttttagttttattttatttacgatttttaaagtttttttgttttgtttta

SEQ ID NO: 30118 - DNA, 704 bp, Artificial Sequence
  chemically treated genomic DNA (Homo sapiens) CpG-island No: 30118
taaaacaaaacaaaaaaactttaaaaatcgtaaataaaataaaactaaaaaaaaaaaaaactacaaataaatactacacgaaaaccgaaaaaccgccccgaatcgaaaaaaaaaaaaataataatactcaaaaccaaaacgaaaacgtctaaaaaacccgaataaaaaccaaacacccgctacgaacacgaaaaaaacgcgactaaaaataacaacgcgcccacacccgcccgaacgaaaacccgacccgcacccaccttacctccaacaacaacgaaatctcgaaccacttcgcgaccaaataaacaatcaccgacttaaacgcgacgaccgtcccgaaaccgaactacgaaaaccacaacgctataaaacctaataacaaccgcaccacgttcgtaactttcgctaacgccataacacgaaaaaaaaaacgcgaatccctcgaacccgatacccacaatctataaccgccacgcttcgaccgactcttcccgctacgcgactacccacttccgataaaaaaaactcgaatccgttactaaataccgaatccaaaccgacgcatacgtatcccgctccgacgcgatttaataaatacgacctaaaaaacccacgccaaccgaacactaaaccacgtcgaaaccgccgaaacgacgccgaattactaaacgacgtcacaaatactcccgcgaatccgctcccgc

SEQ ID NO: 30119 - DNA, 704 bp, Artificial Sequence
  chemically treated genomic DNA (Homo sapiens) CpG-island No: 30119
taaagtagggtagggaagttttaaaaatcgtaggtaaagtaagattgagggggaaaggaattgtaagtgagtgttgtacgggaatcgagaagtcgtttcgggtcgggaaggaaggaggtggtgatgtttagggttagagcgggggcgtttggagaattcgggtgggagttagatattcgttgcgagtacgaagaaagcgcggttgagggtggtagcgcgtttatattcgttcggacgagggttcggttcgtatttattttgtttttagtagtagcggggtttcgggttatttcgcggttaagtgggtagttatcgatttggacgcggcgatcgtttcggagtcgagttgcgaaagttatagcgttgtggagtttagtagtagtcgtattacgttcgtggttttcgttggcgttatggtacggagagaaaagcgcgagtttttcggattcggtatttatagtttgtggtcgttacgtttcggtcggtttttttcgttgcgcggttgtttattttcggtgggaggagttcgagttcgttattgggtgtcgggtttagatcggcgtatgcgtgtttcgtttcggcgcggtttagtgggtgcggtttggagagtttacgttagtcggatattgggttacgtcggagtcgtcggggcggcgtcgggttgttgagcggcgttatagatgttttcgcgggttcgttttcgt

SEQ ID NO: 30120 - DNA, 704 bp, Artificial Sequence
  chemically treated genomic DNA (Homo sapiens) CpG-island No: 30120
acgaaaacgaacccgcgaaaacatctataacgccgctcaacaacccgacgccgccccgacgactccgacgtaacccaatatccgactaacgtaaactctccaaaccgcacccactaaaccgcgccgaaacgaaacacgcatacgccgatctaaacccgacacccaataacgaactcgaactcctcccaccgaaaataaacaaccgcgcaacgaaaaaaaccgaccgaaacgtaacgaccacaaactataaataccgaatccgaaaaactcgcgcttttctctccgtaccataacgccaacgaaaaccacgaacgtaatacgactactactaaactccacaacgctataactttcgcaactcgactccgaaacgatcgccgcgtccaaatcgataactacccacttaaccgcgaaataacccgaaaccccgctactactaaaaacaaaataaatacgaaccgaaccctcgtccgaacgaatataaacgcgctaccaccctcaaccgcgctttcttcgtactcgcaacgaatatctaactcccacccgaattctccaaacgcccccgctctaaccctaaacatcaccacctccttccttcccgacccgaaacgacttctcgattcccgtacaacactcacttacaattcctttccccctcaatcttactttacctacgatttttaaaacttccctaccctacttta

SEQ ID NO: 30121 - DNA, 558 bp, Artificial Sequence
  chemically treated genomic DNA (Homo sapiens) CpG-island No: 30121
cggttcgggtttcgggagttacggcgcgttggtcgatcggttcgggtagttttacgttcgtttcgggtttagaagcgtagcgatagttttttttttatataaatttgtacgttagagttgtgatttataagcgacgcgttatagttttggcgttatcgggttagtcgggttgacgatcgcgggtttttcggagttttgtttagtttatagcggggacggttttttttttcggtagttgttatcgtagtttcggaagtcgagagtacgattttaaagcggtcgttagatggagttcgataatcgtcgcggacgttagcgagatagattcggttggtagggcggttcgtggatcgcgaaagcgaaatcgtgagtcgagaagtttttttcgaggtcgaaaacgtagtttttttgttttaattttatataaacggtgtttaaaacgcgtttttgtttcgatcgcgatagagttagaagataatttacggcgcgtgggtgtttggagatgtttttcggaagtagggagggagggagggagggagggagggagggagggaggga

SEQ ID NO: 30122 - DNA, 558 bp, Artificial Sequence
  chemically treated genomic DNA (Homo sapiens) CpG-island No: 30122
tccctccctccctccctccctccctccctccctccctccctacttccgaaaaacatctccaaacacccacgcgccgtaaattatcttctaactctatcgcgatcgaaacaaaaacgcgttttaaacaccgtttatataaaattaaaacaaaaaaactacgttttcgacctcgaaaaaaacttctcgactcacgatttcgctttcgcgatccacgaaccgccctaccaaccgaatctatctcgctaacgtccgcgacgattatcgaactccatctaacgaccgctttaaaatcgtactctcgacttccgaaactacgataacaactaccgaaaaaaaaaaccgtccccgctataaactaaacaaaactccgaaaaacccgcgatcgtcaacccgactaacccgataacgccaaaactataacgcgtcgcttataaatcacaactctaacgtacaaatttatataaaaaaaaaactatcgctacgcttctaaacccgaaacgaacgtaaaactacccgaaccgatcgaccaacgcgccgtaactcccgaaacccgaaccg

SEQ ID NO: 30123 - DNA, 558 bp, Artificial Sequence
  chemically treated genomic DNA (Homo sapiens) CpG-island No: 30123
tttttttttttttttttttttttttttttttttttttttttgttttcgagaggtatttttaaatatttacgcgtcgtgggttgttttttgattttgtcgcggtcgaggtagagacgcgttttgggtatcgtttgtgtggggttggggtagaggggttgcgttttcggtttcgggaagagtttttcgatttacggtttcgttttcgcggtttacgggtcgttttgttagtcggatttgtttcgttgacgttcgcggcggttgtcgggttttatttggcggtcgttttgagatcgtgttttcggttttcggagttgcggtggtagttgtcgagggaggggatcgttttcgttgtgagttaggtagagtttcggaaagttcgcggtcgttagttcggttggttcggtggcgttagagttgtggcgcgtcgtttgtgagttatagttttggcgtgtaggtttatgtgggggagaggttgtcgttgcgtttttgggttcgaggcgggcgtggggttgttcgggtcggtcgattagcgcgtcgtagttttcgaggttcgagtcg

SEQ ID NO: 30124 - DNA, 558 bp, Artificial Sequence
  chemically treated genomic DNA (Homo sapiens) CpG-island No: 30124
cgactcgaacctcgaaaactacgacgcgctaatcgaccgacccgaacaaccccacgcccgcctcgaacccaaaaacgcaacgacaacctctcccccacataaacctacacgccaaaactataactcacaaacgacgcgccacaactctaacgccaccgaaccaaccgaactaacgaccgcgaactttccgaaactctacctaactcacaacgaaaacgatcccctccctcgacaactaccaccgcaactccgaaaaccgaaaacacgatctcaaaacgaccgccaaataaaacccgacaaccgccgcgaacgtcaacgaaacaaatccgactaacaaaacgacccgtaaaccgcgaaaacgaaaccgtaaatcgaaaaactcttcccgaaaccgaaaacgcaacccctctaccccaaccccacacaaacgatacccaaaacgcgtctctacctcgaccgcgacaaaatcaaaaaacaacccacgacgcgtaaatatttaaaaatacctctcgaaaacaaaaaaaaaaaaaaaaaaaaaaaaaaaaaaaaaaaaaaaaa

SEQ ID NO: 30125 - DNA, 1303 bp, Artificial Sequence
  chemically treated genomic DNA (Homo sapiens) CpG-island No: 30125
cggtggggttgaaaaaaatgtgggagagggagtttcgcgtggttttagttttatcgcgggtcgaggtcggtggaggtcgcgggcgcgcgaacgggaatcgacgttttcgcgtcggtgcgtcgtagcgttcggcggtcgtttgttggtcgattcgggatacgtgtaggcgtcggttaagttcggagttcgcgggcggtagttggtcgatttcggaggtgtcgatcgagacggggacgtttcggttgcggttcgtttcgacgggtatttttatacgtcgttcggtggagaaggttcgtcggtcgattcgggatacggcgagacgtcggttgagttttacgttcgcgggcggtaggcggtcgatttcggaggttcgatcgaggagaggtcgcgagcggaggtcggtcgggtgcggggacgtttcgtggggtttcgtcgttcgtcgttcgttattcgcggtttgttggtcgattcgtgcggaggagcgaggaggaaggacgcgcgagggtcgggatttcgggtggtcgttttatcggggttcgcgcggttaattttcgggacggggatcggcgggttacgggttcggttcggcgcggtcgttttcgcggtttttaaattacgtttttcggatttcgtttcggttcggagcggacgagtcgtttcggcggtgaacggggaggaggcgggaatcgaagaagcggggcgcgtcgatcggggtcgcgcgtttttttttttttatttttattattacgttcgcggtcggcgggagaggtcgggagggaggaagacgaacggaaggacggacggcgtcggacgcgtacgtttcgtcgggtttttcgtacgtacgcgcgcgcgcgcgcgcgcggataaatttttgtgtcgagggttgatttttaatagatcgtagcgagggagttgttttgttacgtacgaaatttcgatttagaagtaggtcgtttacgaatggtttagcgttaggttttttacgaacgtgcggtgcgtgacgggcgagggggcggtcgttttttcggtcgcgtttcgttttttaggacgaagggtatttcgtatcggatttcggtttcggcgcgcggcggggtacgcgttttttcgcgcgcgcggggcgcgtggagggggggggcggttcgtcggcggggataggcgggggatcggttattcgaggttaatcgaggtttcgcggcgttgtcgtatcgtttcgtttgggcgggattttgatttagaggcgtttagttataattttatagatggtagtttcgttttattggttttttagttaagtatatatatt

SEQ ID NO: 30126 - DNA, 1303 bp, Artificial Sequence
  chemically treated genomic DNA (Homo sapiens) CpG-island No: 30126
aatatatatacttaactaaaaaaccaataaaacgaaactaccatctataaaattataactaaacgcctctaaatcaaaatcccgcccaaacgaaacgatacgacaacgccgcgaaacctcgattaacctcgaataaccgatcccccgcctatccccgccgacgaaccgccccccccctccacgcgccccgcgcgcgcgaaaaaacgcgtaccccgccgcgcgccgaaaccgaaatccgatacgaaatacccttcgtcctaaaaaacgaaacgcgaccgaaaaaacgaccgccccctcgcccgtcacgcaccgcacgttcgtaaaaaacctaacgctaaaccattcgtaaacgacctacttctaaatcgaaatttcgtacgtaacaaaacaactccctcgctacgatctattaaaaatcaaccctcgacacaaaaatttatccgcgcgcgcgcgcgcgcgcgtacgtacgaaaaacccgacgaaacgtacgcgtccgacgccgtccgtccttccgttcgtcttcctccctcccgacctctcccgccgaccgcgaacgtaataataaaaataaaaaaaaaaaaacgcgcgaccccgatcgacgcgccccgcttcttcgattcccgcctcctccccgttcaccgccgaaacgactcgtccgctccgaaccgaaacgaaatccgaaaaacgtaatttaaaaaccgcgaaaacgaccgcgccgaaccgaacccgtaacccgccgatccccgtcccgaaaattaaccgcgcgaaccccgataaaacgaccacccgaaatcccgaccctcgcgcgtccttcctcctcgctcctccgcacgaatcgaccaacaaaccgcgaataacgaacgacgaacgacgaaaccccacgaaacgtccccgcacccgaccgacctccgctcgcgacctctcctcgatcgaacctccgaaatcgaccgcctaccgcccgcgaacgtaaaactcaaccgacgtctcgccgtatcccgaatcgaccgacgaaccttctccaccgaacgacgtataaaaatacccgtcgaaacgaaccgcaaccgaaacgtccccgtctcgatcgacacctccgaaatcgaccaactaccgcccgcgaactccgaacttaaccgacgcctacacgtatcccgaatcgaccaacaaacgaccgccgaacgctacgacgcaccgacgcgaaaacgtcgattcccgttcgcgcgcccgcgacctccaccgacctcgacccgcgataaaactaaaaccacgcgaaactccctctcccacatttttttcaaccccaccg

SEQ ID NO: 30127 - DNA, 1303 bp, Artificial Sequence
  chemically treated genomic DNA (Homo sapiens) CpG-island No: 30127
ggtgtatgtgtttggttgaggagttaatggggcgaagttattatttgtgggattatgattgaacgtttttaagttagaatttcgtttaggcggaacgatacggtagcgtcgcggagtttcggttggtttcggatagtcggtttttcgtttgttttcgtcggcgggtcgttttttttttttacgcgtttcgcgcgcgcgggagggcgcgtgtttcgtcgcgcgtcgggatcggggttcggtgcggagtgtttttcgttttgggaaacggggcgcggtcggaaaggcggtcgttttttcgttcgttacgtatcgtacgttcgtggggaatttggcgttaaattattcgtagacgatttgtttttgggtcggggtttcgtacgtagtagagtagttttttcgttgcgatttattgaaagttagttttcgatataagggtttgttcgcgcgcgcgcgcgcgcgcgtgcgtgcggggggttcggcggggcgtgcgcgttcggcgtcgttcgttttttcgttcgtttttttttttttcggtttttttcgtcgatcgcgggcgtggtggtgggggtgggggggggagggcgcgcgatttcggtcggcgcgtttcgttttttcggttttcgtttttttttcgtttatcgtcggggcggttcgttcgtttcgggtcgggacggggttcggggagcgtggtttgggagtcgcggaggcggtcgcgtcgagtcgggttcgtggttcgtcggttttcgtttcgggggttggtcgcgcgggtttcggtggggcggttattcggggtttcggttttcgcgcgtttttttttttcgttttttcgtacgggtcgattagtagatcgcgggtggcgggcggcgggcggcgaggttttacggggcgttttcgtattcggtcgattttcgttcgcgattttttttcggtcgggttttcggggtcgatcgtttgtcgttcgcgggcgtgagatttagtcggcgtttcgtcgtgtttcgggtcgatcggcgggttttttttatcgagcggcgtgtaggagtgttcgtcgggacgaatcgtaatcggagcgttttcgtttcggtcggtattttcggggtcgattagttgtcgttcgcgagtttcggatttagtcggcgtttgtacgtgtttcgggtcgattagtaggcggtcgtcggacgttgcggcgtatcgacgcgagggcgtcgattttcgttcgcgcgttcgcgatttttatcggtttcggttcgcggtggagttgggattacgcggaatttttttttttatattttttttagttttatcg

SEQ ID NO: 30128 - DNA, 1303 bp, Artificial Sequence
  chemically treated genomic DNA (Homo sapiens) CpG-island No: 30128
cgataaaactaaaaaaaatataaaaaaaaaaattccgcgtaatcccaactccaccgcgaaccgaaaccgataaaaatcgcgaacgcgcgaacgaaaatcgacgccctcgcgtcgatacgccgcaacgtccgacgaccgcctactaatcgacccgaaacacgtacaaacgccgactaaatccgaaactcgcgaacgacaactaatcgaccccgaaaataccgaccgaaacgaaaacgctccgattacgattcgtcccgacgaacactcctacacgccgctcgataaaaaaaacccgccgatcgacccgaaacacgacgaaacgccgactaaatctcacgcccgcgaacgacaaacgatcgaccccgaaaacccgaccgaaaaaaaatcgcgaacgaaaatcgaccgaatacgaaaacgccccgtaaaacctcgccgcccgccgcccgccacccgcgatctactaatcgacccgtacgaaaaaacgaaaaaaaaaaacgcgcgaaaaccgaaaccccgaataaccgccccaccgaaacccgcgcgaccaacccccgaaacgaaaaccgacgaaccacgaacccgactcgacgcgaccgcctccgcgactcccaaaccacgctccccgaaccccgtcccgacccgaaacgaacgaaccgccccgacgataaacgaaaaaaaaacgaaaaccgaaaaaacgaaacgcgccgaccgaaatcgcgcgccctcccccccccacccccaccaccacgcccgcgatcgacgaaaaaaaccgaaaaaaaaaaaaacgaacgaaaaaacgaacgacgccgaacgcgcacgccccgccgaaccccccgcacgcacgcgcgcgcgcgcgcgcgcgaacaaacccttatatcgaaaactaactttcaataaatcgcaacgaaaaaactactctactacgtacgaaaccccgacccaaaaacaaatcgtctacgaataatttaacgccaaattccccacgaacgtacgatacgtaacgaacgaaaaaacgaccgcctttccgaccgcgccccgtttcccaaaacgaaaaacactccgcaccgaaccccgatcccgacgcgcgacgaaacacgcgccctcccgcgcgcgcgaaacgcgtaaaaaaaaaaaacgacccgccgacgaaaacaaacgaaaaaccgactatccgaaaccaaccgaaactccgcgacgctaccgtatcgttccgcctaaacgaaattctaacttaaaaacgttcaatcataatcccacaaataataacttcgccccattaactcctcaaccaaacacatacacc

SEQ ID NO: 30129 - DNA, 2321 bp, Artificial Sequence
  chemically treated genomic DNA (Homo sapiens) CpG-island No: 30129
agcgcggcgaggtttcgacgcggtcggacggtcggtcggggggtttcgcgaggacgggttcggcgtttcgtaagcgaggaggacgacggacggacggacgggtcgcggacgggcggacgggagggagcgagcgggcgcgggggcggcggtcgggatcggtggggtcggggcggggcgcggcgaatcggacgttttaattattcgttttttacgcgatacgattatcggggtttcgcgttatagattcgcgacgttttttcgtcgcgttcgttcgcgaggaggcggacggttcgattcgcgttcggcggtcgggagggatcggcggttacgcgcgcgcgcgcgcggtcggcgttcgcgggcggcggcgaggcggggacggcgtttcgttcgtttcgcggggcggtttcgacgttcgggcggcgagcgagaggcggatcgcggtgttcggttcggggatagtcgcgtcgtgcggtcgtagcgttcgcgtatcggttcggtcgagggttcggggttcggtcgaagttcggtttcgagtttcgtcggcgggcgcgggcgtaggggtggtatacgttatacgacggttaagggagggtcgatcgaggtcggtcggcgcgttcgttttcgttcgggacgggggatcgcgatcggggtcgaggtttcggttcgggttttatttttcgattcggggaaagggcgagcgatcggtaaggcggaggtcgatttacgttatacgtcgtacgaacgtttgttcgggagggattatcgggtcgcgttcgggcgtacgcgcgcgtcgaacggggcgacgttacgcggggaggacgggtttttttcgacgtcgacgttcgggacggacgtttcggggaagggtcgcggtaggttcgggaagcgaggcgtattcgggggacgcgtcgattcggttcggaagagcgggtcgggagaagacgagagattacgggcgaggtcggggcgacggggaaggcgcgagaaaggcggtcggcggggaaggggacgttacggggatttcgcgagcgcggtcgatcgtagtcgggatatacgcgcggggttttatcgtcgtcggcggtatcgcgcggtattcggggcggtcgatcggttttcggcgattttcgcggttttttttattatcgtcgtcgtagtcgcggtcggtttttcggaatcgttttttttttcgtacgcgtcgtaggtcgattttcggaatttttcgggaagtttatcgggttttacgcggggcgttatcgattcggtttttaaggcgcgcgtcgggggacgcggacgtcgggtcgattagtggtcggcggcggcgttttacgaggcggtgtcgggttcggttttaggcggggttattaacggacgtgaagtcggtgagtcgttcggggggaagaagaggatcggcgggcggcgggcggggaagagggtatagacgggcgagggtcggggatcgcgagggtaagggtattcgggagttcgtagaggcggcggttcggggagaaattttaggtacggtcgggttattaggaaaatacggtcgcgggattttatcgttatagatacgagggcggtttcgcggcgtttcgtttgggacgtcggacggttttcggtttttatcgagaatcgtttcgcgagtttcggggtttcgttatcgggggtttcggagcgatcgtagttacgaattcgatacgttcgtattatcgtcgttcgtgattttcgtttatttttcgattcggtttcgtttcgggagatcggcgcgtttttatcgtgggacgtttttttagggttaggcgggttcgatttcgtgttacgtaaacgcggtcgtcggtatcggttacgattcggtacgggagcgggcggagagtcgattcgcggcggagggggttacgcgtcggatagagcgtcgggcgcgtatatttatcgttcgtcggtcgtcgcgttttaattcgttgggaacgtcgggttcggttcggcgggattttttttcgattcggaaggggggaggcgcgggttatagtaggcgacgagtcgtattcggttattatcgcggtggtcggcggaattttcgttttttttttttaatttcgtcgagggggaagcggaggagggttttttgcgagcgggtcgttaacggtagcgttattataacggaggtagagatagaggcggcggttcgggggattcggtatttttaaggtacgttttttagatcgttagagaaggttttttttatcgagggtgggttatattttttttattcgttagtcgttttttttcgggttcgtagaggcgtcgagggacgtttggggaaggga

SEQ ID NO: 30130 - DNA, 2321 bp, Artificial Sequence
  chemically treated genomic DNA (Homo sapiens) CpG-island No: 30130
tcccttccccaaacgtccctcgacgcctctacgaacccgaaaaaaaacgactaacgaataaaaaaaatataacccaccctcgataaaaaaaaccttctctaacgatctaaaaaacgtaccttaaaaataccgaatcccccgaaccgccgcctctatctctacctccgttataataacgctaccgttaacgacccgctcgcaaaaaaccctcctccgcttccccctcgacgaaattaaaaaaaaaaaacgaaaattccgccgaccaccgcgataataaccgaatacgactcgtcgcctactataacccgcgcctccccccttccgaatcgaaaaaaaatcccgccgaaccgaacccgacgttcccaacgaattaaaacgcgacgaccgacgaacgataaatatacgcgcccgacgctctatccgacgcgtaaccccctccgccgcgaatcgactctccgcccgctcccgtaccgaatcgtaaccgataccgacgaccgcgtttacgtaacacgaaatcgaacccgcctaaccctaaaaaaacgtcccacgataaaaacgcgccgatctcccgaaacgaaaccgaatcgaaaaataaacgaaaatcacgaacgacgataatacgaacgtatcgaattcgtaactacgatcgctccgaaacccccgataacgaaaccccgaaactcgcgaaacgattctcgataaaaaccgaaaaccgtccgacgtcccaaacgaaacgccgcgaaaccgccctcgtatctataacgataaaatcccgcgaccgtattttcctaataacccgaccgtacctaaaatttctccccgaaccgccgcctctacgaactcccgaatacccttaccctcgcgatccccgaccctcgcccgtctataccctcttccccgcccgccgcccgccgatcctcttcttccccccgaacgactcaccgacttcacgtccgttaataaccccgcctaaaaccgaacccgacaccgcctcgtaaaacgccgccgccgaccactaatcgacccgacgtccgcgtcccccgacgcgcgccttaaaaaccgaatcgataacgccccgcgtaaaacccgataaacttcccgaaaaattccgaaaatcgacctacgacgcgtacgaaaaaaaaaacgattccgaaaaaccgaccgcgactacgacgacgataataaaaaaaaccgcgaaaatcgccgaaaaccgatcgaccgccccgaataccgcgcgataccgccgacgacgataaaaccccgcgcgtatatcccgactacgatcgaccgcgctcgcgaaatccccgtaacgtccccttccccgccgaccgcctttctcgcgccttccccgtcgccccgacctcgcccgtaatctctcgtcttctcccgacccgctcttccgaaccgaatcgacgcgtcccccgaatacgcctcgcttcccgaacctaccgcgacccttccccgaaacgtccgtcccgaacgtcgacgtcgaaaaaaacccgtcctccccgcgtaacgtcgccccgttcgacgcgcgcgtacgcccgaacgcgacccgataatccctcccgaacaaacgttcgtacgacgtataacgtaaatcgacctccgccttaccgatcgctcgccctttccccgaatcgaaaaataaaacccgaaccgaaacctcgaccccgatcgcgatcccccgtcccgaacgaaaacgaacgcgccgaccgacctcgatcgaccctcccttaaccgtcgtataacgtataccacccctacgcccgcgcccgccgacgaaactcgaaaccgaacttcgaccgaaccccgaaccctcgaccgaaccgatacgcgaacgctacgaccgcacgacgcgactatccccgaaccgaacaccgcgatccgcctctcgctcgccgcccgaacgtcgaaaccgccccgcgaaacgaacgaaacgccgtccccgcctcgccgccgcccgcgaacgccgaccgcgcgcgcgcgcgcgtaaccgccgatccctcccgaccgccgaacgcgaatcgaaccgtccgcctcctcgcgaacgaacgcgacgaaaaaacgtcgcgaatctataacgcgaaaccccgataatcgtatcgcgtaaaaaacgaataattaaaacgtccgattcgccgcgccccgccccgaccccaccgatcccgaccgccgcccccgcgcccgctcgctccctcccgtccgcccgtccgcgacccgtccgtccgtccgtcgtcctcctcgcttacgaaacgccgaacccgtcctcgcgaaaccccccgaccgaccgtccgaccgcgtcgaaacctcgccgcgct

SEQ ID NO: 30131 - DNA, 2321 bp, Artificial Sequence
  chemically treated genomic DNA (Homo sapiens) CpG-island No: 30131
ttttttttttaggcgtttttcggcgtttttgcgggttcgaggaggagcggttggcgggtggggggagtgtgatttattttcggtgagaaaagttttttttagcgatttgagaggcgtgttttgggggtatcggatttttcgggtcgtcgtttttgtttttgttttcgttatggtagcgttgtcgttagcgattcgttcgtagaggattttttttcgtttttttttcgacggggttgggggggagaagcgagggtttcgtcggttatcgcggtggtggtcgagtgcggttcgtcgtttattgtggttcgcgttttttttttttcgagtcgggggaggatttcgtcgggtcgggttcggcgtttttagcgggttgggacgcggcggtcggcgggcggtgggtgtgcgcgttcggcgttttgttcggcgcgtgatttttttcgtcgcgagtcggtttttcgttcgttttcgtgtcgagtcgtgatcggtgtcgacgatcgcgtttgcgtggtacggggtcgggttcgtttggttttgggaaagcgttttacggtgggggcgcgtcggtttttcggagcgggatcgggtcggaggatggacgagaattacgagcgacggtggtgcgggcgtgtcgggttcgtggttgcggtcgtttcggggttttcggtggcggggtttcggggttcgcgaggcggttttcggtgggggtcgagggtcgttcggcgttttaggcggggcgtcgcgggatcgttttcgtgtttgtggcggtgggatttcgcggtcgtgtttttttggtggttcggtcgtgtttgaggttttttttcgagtcgtcgtttttgcgggttttcgggtgtttttgttttcgcggttttcggttttcgttcgtttgtgttttttttttcgttcgtcgttcgtcgatttttttttttttttcgagcggtttatcggttttacgttcgttggtggtttcgtttgggatcgaattcggtatcgtttcgtggggcgtcgtcgtcggttattgatcggttcggcgttcgcgtttttcggcgcgcgttttggggatcgggtcggtggcgtttcgcgtggggttcggtgggtttttcggagggtttcgggggtcggtttgcggcgcgtgcgggggaggagacggtttcgggggatcggtcgcgattgcggcggcggtggtggggggagtcgcggggatcgtcgagggtcggtcggtcgtttcgggtgtcgcgcggtgtcgtcggcggcggtgaggtttcgcgcgtgtgtttcggttgcggtcggtcgcgttcgcggggttttcgtggcgttttttttttcgtcggtcgtttttttcgcgtttttttcgtcgtttcggtttcgttcgtggtttttcgttttttttcggttcgttttttcgaatcgggtcggcgcgtttttcgggtgcgtttcgtttttcgggtttgtcgcggttttttttcgaggcgttcgtttcgggcgtcggcgtcggggagagttcgtttttttcgcgtggcgtcgtttcgttcggcgcgcgcgtgcgttcgagcgcggttcggtggtttttttcggataggcgttcgtgcgacgtgtggcgtgggtcgattttcgttttgtcggtcgttcgtttttttttcgggtcggggggtggggttcgggtcggggtttcggtttcggtcgcggtttttcgtttcgggcgggggcgggcgcgtcggtcggtttcggtcggtttttttttggtcgtcgtgtggcgtgtgttatttttgcgttcgcgttcgtcggcggggttcggagtcgggtttcggtcgggtttcgggttttcgatcggatcggtgcgcgggcgttgcggtcgtacggcgcgattgttttcgggtcgggtatcgcggttcgtttttcgttcgtcgttcggacgtcggggtcgtttcgcggggcgggcggagcgtcgttttcgtttcgtcgtcgttcgcgggcgtcggtcgcgcgcgcgcgcgcgtggtcgtcggtttttttcggtcgtcgggcgcgggtcgggtcgttcgttttttcgcgggcgggcgcgacgaagaagcgtcgcgggtttgtggcgcggggtttcggtggtcgtgtcgcgtggggggcgggtggttggggcgttcggttcgtcgcgtttcgtttcggttttatcggtttcggtcgtcgttttcgcgttcgttcgttttttttcgttcgttcgttcgcggttcgttcgttcgttcgtcgtttttttcgtttgcggggcgtcgggttcgttttcgcgaggtttttcggtcggtcgttcggtcgcgtcggggtttcgtcgcgtt

SEQ ID NO: 30132 - DNA, 2321 bp, Artificial Sequence
  chemically treated genomic DNA (Homo sapiens) CpG-island No: 30132
aacgcgacgaaaccccgacgcgaccgaacgaccgaccgaaaaacctcgcgaaaacgaacccgacgccccgcaaacgaaaaaaacgacgaacgaacgaacgaaccgcgaacgaacgaacgaaaaaaaacgaacgaacgcgaaaacgacgaccgaaaccgataaaaccgaaacgaaacgcgacgaaccgaacgccccaaccacccgccccccacgcgacacgaccaccgaaaccccgcgccacaaacccgcgacgcttcttcgtcgcgcccgcccgcgaaaaaacgaacgacccgacccgcgcccgacgaccgaaaaaaaccgacgaccacgcgcgcgcgcgcgcgaccgacgcccgcgaacgacgacgaaacgaaaacgacgctccgcccgccccgcgaaacgaccccgacgtccgaacgacgaacgaaaaacgaaccgcgatacccgacccgaaaacaatcgcgccgtacgaccgcaacgcccgcgcaccgatccgatcgaaaacccgaaacccgaccgaaacccgactccgaaccccgccgacgaacgcgaacgcaaaaataacacacgccacacgacgaccaaaaaaaaaccgaccgaaaccgaccgacgcgcccgcccccgcccgaaacgaaaaaccgcgaccgaaaccgaaaccccgacccgaaccccaccccccgacccgaaaaaaaaacgaacgaccgacaaaacgaaaatcgacccacgccacacgtcgcacgaacgcctatccgaaaaaaaccaccgaaccgcgctcgaacgcacgcgcgcgccgaacgaaacgacgccacgcgaaaaaaacgaactctccccgacgccgacgcccgaaacgaacgcctcgaaaaaaaaccgcgacaaacccgaaaaacgaaacgcacccgaaaaacgcgccgacccgattcgaaaaaacgaaccgaaaaaaaacgaaaaaccacgaacgaaaccgaaacgacgaaaaaaacgcgaaaaaaacgaccgacgaaaaaaaaaacgccacgaaaaccccgcgaacgcgaccgaccgcaaccgaaacacacgcgcgaaacctcaccgccgccgacgacaccgcgcgacacccgaaacgaccgaccgaccctcgacgatccccgcgactccccccaccaccgccgccgcaatcgcgaccgatcccccgaaaccgtctcctcccccgcacgcgccgcaaaccgacccccgaaaccctccgaaaaacccaccgaaccccacgcgaaacgccaccgacccgatccccaaaacgcgcgccgaaaaacgcgaacgccgaaccgatcaataaccgacgacgacgccccacgaaacgataccgaattcgatcccaaacgaaaccaccaacgaacgtaaaaccgataaaccgctcgaaaaaaaaaaaaaaatcgacgaacgacgaacgaaaaaaaaaacacaaacgaacgaaaaccgaaaaccgcgaaaacaaaaacacccgaaaacccgcaaaaacgacgactcgaaaaaaaacctcaaacacgaccgaaccaccaaaaaaacacgaccgcgaaatcccaccgccacaaacacgaaaacgatcccgcgacgccccgcctaaaacgccgaacgaccctcgacccccaccgaaaaccgcctcgcgaaccccgaaaccccgccaccgaaaaccccgaaacgaccgcaaccacgaacccgacacgcccgcaccaccgtcgctcgtaattctcgtccatcctccgacccgatcccgctccgaaaaaccgacgcgcccccaccgtaaaacgctttcccaaaaccaaacgaacccgaccccgtaccacgcaaacgcgatcgtcgacaccgatcacgactcgacacgaaaacgaacgaaaaaccgactcgcgacgaaaaaaatcacgcgccgaacaaaacgccgaacgcgcacacccaccgcccgccgaccgccgcgtcccaacccgctaaaaacgccgaacccgacccgacgaaatcctcccccgactcgaaaaaaaaaaaacgcgaaccacaataaacgacgaaccgcactcgaccaccaccgcgataaccgacgaaaccctcgcttctcccccccaaccccgtcgaaaaaaaaacgaaaaaaaatcctctacgaacgaatcgctaacgacaacgctaccataacgaaaacaaaaacaaaaacgacgacccgaaaaatccgatacccccaaaacacgcctctcaaatcgctaaaaaaaacttttctcaccgaaaataaatcacactccccccacccgccaaccgctcctcctcgaacccgcaaaaacgccgaaaaacgcctaaaaaaaaaa

SEQ ID NO: 30133 - DNA, 953 bp, Artificial Sequence
  chemically treated genomic DNA (Homo sapiens) CpG-island No: 30133
gtgttttaagacgggtcgggtgggtagtcgacgtcgtcgtcgatttcgtgcgttcgtttcgtcgttttttttttcgggggacgcgcgcgtggtttcgagagaatttttttcgggttcgacggcgcgattcgttcggggcgtattggggatagttcgtttcgtttttcgattcgcgcgcggtatttttttcgtcgtcggggcgggggcgcggggaggaggggtgggagagcggtcgcgtcgtgggaggggtggttcggtttttttacgaggagacgtcggcgcgttttcgcgggggagatttttttcgcgggggatttttcgcgggggtgggcgtcgggaggggggagagcgcggcgacgggtttcgttttttcggtttcgggattcggcgagtgttgttgtcgggggggttgtaatattcggggggggtttcggtttcgtcgtcgtcgtcgttatcgtcgtcgtcgtcgtttcgattcgcgcgttttttcgagggaggacgcggggtcggggggcggagacgggggaggaggaggacggacggacggacggggtttttcgagttatttttttcgtcgggtttttttagtcgtttcggagtcggtcgcggcgtatcgtcgcggtggaaatgcgttcggcggcggtcggtcgtcggtcgggggacggtttttcgtcgattttattttcggtttcgttcgtttattttcgtattcgtcggagttcgtttttttcggggaggaggaggaggggcggcgggggaagggagggcgggtggaggggtcgggaggaacggggggcgggaaagattcgtcgggtcgtcgatacggtcggattcgtcgtcgggttgaatttttcgggcggattgcgcggattttattcgtttattttttaacggttttacgtttttttgaattttttttttaaagttttttttaatttttttttacggtattt

SEQ ID NO: 30134 - DNA, 953 bp, Artificial Sequence
  chemically treated genomic DNA (Homo sapiens) CpG-island No: 30134
aaataccgtaaaaaaaaattaaaaaaaactttaaaaaaaaaattcaaaaaaacgtaaaaccgttaaaaaataaacgaataaaatccgcgcaatccgcccgaaaaattcaacccgacgacgaatccgaccgtatcgacgacccgacgaatctttcccgccccccgttcctcccgacccctccacccgccctcccttcccccgccgcccctcctcctcctccccgaaaaaaacgaactccgacgaatacgaaaataaacgaacgaaaccgaaaataaaatcgacgaaaaaccgtcccccgaccgacgaccgaccgccgccgaacgcatttccaccgcgacgatacgccgcgaccgactccgaaacgactaaaaaaacccgacgaaaaaaataactcgaaaaaccccgtccgtccgtccgtcctcctcctcccccgtctccgccccccgaccccgcgtcctccctcgaaaaaacgcgcgaatcgaaacgacgacgacgacgataacgacgacgacgacgaaaccgaaaccccccccgaatattacaacccccccgacaacaacactcgccgaatcccgaaaccgaaaaaacgaaacccgtcgccgcgctctcccccctcccgacgcccacccccgcgaaaaatcccccgcgaaaaaaatctcccccgcgaaaacgcgccgacgtctcctcgtaaaaaaaccgaaccacccctcccacgacgcgaccgctctcccacccctcctccccgcgcccccgccccgacgacgaaaaaaataccgcgcgcgaatcgaaaaacgaaacgaactatccccaatacgccccgaacgaatcgcgccgtcgaacccgaaaaaaattctctcgaaaccacgcgcgcgtcccccgaaaaaaaaaacgacgaaacgaacgcacgaaatcgacgacgacgtcgactacccacccgacccgtcttaaaacac

SEQ ID NO: 30135 - DNA, 953 bp, Artificial Sequence
  chemically treated genomic DNA (Homo sapiens) CpG-island No: 30135
aagtatcgtaagggaaagttgaaaagaattttgaagagagagtttaagagggcgtgaaatcgttaagaggtaaacgggtggggttcgcgtagttcgttcggaggatttaattcggcggcgggttcggtcgtgtcggcggttcggcggatttttttcgtttttcgtttttttcgatttttttattcgtttttttttttttcgtcgtttttttttttttttttcggagggggcgggtttcggcgggtgcgggggtgggcgggcggggtcgggggtggggtcggcgggggatcgtttttcgatcggcgatcggtcgtcgtcgggcgtatttttatcgcggcggtgcgtcgcgatcggtttcgggacggttgggaaggttcggcggggaaggtggttcggggggtttcgttcgttcgttcgttttttttttttttcgttttcgtttttcggtttcgcgttttttttcgggagggcgcgcgggtcggggcggcggcggcggcggtggcggcggcggcggcgggatcgaaatttttttcgagtgttatagttttttcggtagtagtattcgtcgaatttcggggtcgagggagcgagattcgtcgtcgcgtttttttttttttcggcgtttattttcgcggggaatttttcgcgaggggggtttttttcgcgggggcgcgtcggcgttttttcgtgggggggtcgggttattttttttacggcgcgatcgtttttttatttttttttttcgcgttttcgtttcggcgacggggggggtgtcgcgcgcgggtcggggggcggggcggattgtttttagtgcgtttcgggcgggtcgcgtcgtcgggttcgggggaggttttttcggggttacgcgcgcgtttttcgaagagggggacggcggagcgagcgtacggggtcggcggcgacgtcggttatttattcgattcgttttgaaatat

SEQ ID NO: 30136 - DNA, 953 bp, Artificial Sequence
  chemically treated genomic DNA (Homo sapiens) CpG-island No: 30136
atatttcaaaacgaatcgaataaataaccgacgtcgccgccgaccccgtacgctcgctccgccgtccccctcttcgaaaaacgcgcgcgtaaccccgaaaaaacctcccccgaacccgacgacgcgacccgcccgaaacgcactaaaaacaatccgccccgccccccgacccgcgcgcgacaccccccccgtcgccgaaacgaaaacgcgaaaaaaaaaaataaaaaaacgatcgcgccgtaaaaaaaataacccgacccccccacgaaaaaacgccgacgcgcccccgcgaaaaaaacccccctcgcgaaaaattccccgcgaaaataaacgccgaaaaaaaaaaaaacgcgacgacgaatctcgctccctcgaccccgaaattcgacgaatactactaccgaaaaaactataacactcgaaaaaaatttcgatcccgccgccgccgccgccaccgccgccgccgccgccccgacccgcgcgccctcccgaaaaaaaacgcgaaaccgaaaaacgaaaacgaaaaaaaaaaaaaacgaacgaacgaacgaaaccccccgaaccaccttccccgccgaaccttcccaaccgtcccgaaaccgatcgcgacgcaccgccgcgataaaaatacgcccgacgacgaccgatcgccgatcgaaaaacgatcccccgccgaccccacccccgaccccgcccgcccacccccgcacccgccgaaacccgccccctccgaaaaaaaaaaaaaaaaacgacgaaaaaaaaaaaaacgaataaaaaaatcgaaaaaaacgaaaaacgaaaaaaatccgccgaaccgccgacacgaccgaacccgccgccgaattaaatcctccgaacgaactacgcgaaccccacccgtttacctcttaacgatttcacgccctcttaaactctctcttcaaaattcttttcaactttcccttacgatactt

SEQ ID NO: 30137 - DNA, 792 bp, Artificial Sequence
  chemically treated genomic DNA (Homo sapiens) CpG-island No: 30137
attcgatttcgggaagattcgggttcggcgcgtcgggggtcgttatcggttttatatcgtttacgggttgggtttcgattagaaggatttgggttttttacgagcggcgtcggggagcgggtttttcgtacgttatatgtttcgcgtttcgtcgcggggcggggattcggcgttgggtttttttttgtttattcgtcgttattgagggaattttggttagttttttttttttcgttgattaatatgtttaaatttagcgggtcgttacgtttgatttgaggtcgcgtttcggagggggacgggtcgttcggcggacggacggacggaatcgcgtcggttcgatcgttcgttcgacgtttcgtcgggagacgggttcggcgagggggagaggcgacgggagagagagcgcgcggtcgacggtattttcgcgtcgtttcgtcggagcgggacgatcggagggaggggtacgggtcgggggcgggacgggcgtcgtacgtttcgattcgtttttttcgcggaggtcggggggacgggttcgaggacgcggcggcggagtcgtttcgtttcgacgcggaagttcgggacggggtttcggcgcggcgcggcgcggtcgcgagtcggaggcgggcgcgcgacggcggacgatatcgcggcgtttcgcgggtcgtcgtcggggatacgcgaatttcggcgtcgcggttacgggcgcggtcgggcgggtcgcggggcgggttttcggtttcggtcgacgcgtcgcgaggcgagtcgggcgggcgggcgcgcgcgcgtacg

SEQ ID NO: 30138 - DNA, 792 bp, Artificial Sequence
  chemically treated genomic DNA (Homo sapiens) CpG-island No: 30138
cgtacgcgcgcgcgcccgcccgcccgactcgcctcgcgacgcgtcgaccgaaaccgaaaacccgccccgcgacccgcccgaccgcgcccgtaaccgcgacgccgaaattcgcgtatccccgacgacgacccgcgaaacgccgcgatatcgtccgccgtcgcgcgcccgcctccgactcgcgaccgcgccgcgccgcgccgaaaccccgtcccgaacttccgcgtcgaaacgaaacgactccgccgccgcgtcctcgaacccgtccccccgacctccgcgaaaaaaacgaatcgaaacgtacgacgcccgtcccgcccccgacccgtacccctccctccgatcgtcccgctccgacgaaacgacgcgaaaataccgtcgaccgcgcgctctctctcccgtcgcctctccccctcgccgaacccgtctcccgacgaaacgtcgaacgaacgatcgaaccgacgcgattccgtccgtccgtccgccgaacgacccgtccccctccgaaacgcgacctcaaatcaaacgtaacgacccgctaaatttaaacatattaatcaacgaaaaaaaaaaaactaaccaaaattccctcaataacgacgaataaacaaaaaaaaacccaacgccgaatccccgccccgcgacgaaacgcgaaacatataacgtacgaaaaacccgctccccgacgccgctcgtaaaaaacccaaatccttctaatcgaaacccaacccgtaaacgatataaaaccgataacgacccccgacgcgccgaacccgaatcttcccgaaatcgaat

SEQ ID NO: 30139 - DNA, 792 bp, Artificial Sequence
  chemically treated genomic DNA (Homo sapiens) CpG-island No: 30139
cgtacgcgcgcgcgttcgttcgttcggttcgtttcgcggcgcgtcggtcggggtcgggagttcgtttcgcggttcgttcggtcgcgttcgtggtcgcggcgtcggggttcgcgtgttttcggcggcgattcgcgggacgtcgcggtgtcgttcgtcgtcgcgcgttcgttttcggttcgcggtcgcgtcgcgtcgcgtcggggtttcgtttcgagttttcgcgtcggggcggggcggtttcgtcgtcgcgttttcggattcgttttttcgattttcgcgggggagacgggtcggggcgtgcggcgttcgtttcgttttcggttcgtgttttttttttcggtcgtttcgtttcggcggggcggcgcgggggtgtcgtcggtcgcgcgttttttttttcgtcgtttttttttttcgtcgggttcgtttttcgacggagcgtcgggcgggcggtcgggtcggcgcgatttcgttcgttcgttcgtcgagcggttcgttttttttcgagacgcgattttagattagacgtggcgattcgttgaatttaagtatattagttagcggaggagaagaaattaattaggatttttttagtaacggcgagtgaatagggaagagtttagcgtcgaattttcgtttcgcggcggggcgcgggatatgtggcgtacggaagattcgtttttcggcgtcgttcgtggggggtttaagtttttttgatcgaggtttagttcgtggacggtgtgaggtcggtagcggttttcggcgcgtcgggttcgggttttttcggagtcgggt

SEQ ID NO: 30140 - DNA, 792 bp, Artificial Sequence
  chemically treated genomic DNA (Homo sapiens) CpG-island No: 30140
acccgactccgaaaaaacccgaacccgacgcgccgaaaaccgctaccgacctcacaccgtccacgaactaaacctcgatcaaaaaaacttaaaccccccacgaacgacgccgaaaaacgaatcttccgtacgccacatatcccgcgccccgccgcgaaacgaaaattcgacgctaaactcttccctattcactcgccgttactaaaaaaatcctaattaatttcttctcctccgctaactaatatacttaaattcaacgaatcgccacgtctaatctaaaatcgcgtctcgaaaaaaaacgaaccgctcgacgaacgaacgaacgaaatcgcgccgacccgaccgcccgcccgacgctccgtcgaaaaacgaacccgacgaaaaaaaaaaacgacgaaaaaaaaaacgcgcgaccgacgacacccccgcgccgccccgccgaaacgaaacgaccgaaaaaaaaaacacgaaccgaaaacgaaacgaacgccgcacgccccgacccgtctcccccgcgaaaatcgaaaaaacgaatccgaaaacgcgacgacgaaaccgccccgccccgacgcgaaaactcgaaacgaaaccccgacgcgacgcgacgcgaccgcgaaccgaaaacgaacgcgcgacgacgaacgacaccgcgacgtcccgcgaatcgccgccgaaaacacgcgaaccccgacgccgcgaccacgaacgcgaccgaacgaaccgcgaaacgaactcccgaccccgaccgacgcgccgcgaaacgaaccgaacgaacgaacgcgcgcgcgtacg

SEQ ID NO: 30141 - DNA, 954 bp, Artificial Sequence
  chemically treated genomic DNA (Homo sapiens) CpG-island No: 30141
gtttattatttttcgggttttaatacgtgcgttcgtgttttattttttcggcgcggcgggcgagacgggtcggtggtgcgttttcggcggattggagaggtttcgggattttatttcggtcggcgagcgcgtcggtttttatttttattgcgttacggcggttttcgtgcgagttttcgattcgcgtacgtgttagattttttggttcgtgttttaagacgggtcgggtgggtagtcgacgtcgtcgtcgatttcgtgcgttcgtttcgtcgttttttttttcgggggacgcgcgcgtggtttcgagagaatttttttcgggttcgacggcgcgattcgttcggggcgtattggggatagttcgtttcgtttttcgattcgcgcgcggtatttttttcgtcgtcggggcgggggcgcggggaggaggggtgggagagcggtcgcgtcgtgggaggggtggttcggtttttttacgaggagacgtcggcgcgttttcgcgggggagatttttttcgcgggggatttttcgcgggggtgggcgtcgggaggggggagagcgcggcgacgggtttcgttttttcggtttcgggattcggcgagtgttgttgtcgggggggttgtaatattcggggggggtttcggtttcgtcgtcgtcgtcgtcgtcgttatcgtcgtcgtcgtcgtttcgattcgcgcgttttttcgagggaggacgcggggtcggggggcggagacgggggaggaggaggacggacggacggacggacggggtttttcgagttatttttttcgtcgggtttttttagtcgtttcggagtcggtcgcggcgtatcgtcgcggtggaaatgcgttcggcggcggtcggtcgtcggtcgggggacggtttttcgtcgattttattattggtttttttttttttttttttttttcgtttttttttttcgtttttttttt

SEQ ID NO: 30142 - DNA, 954 bp, Artificial Sequence
  chemically treated genomic DNA (Homo sapiens) CpG-island No: 30142
aaaaaaaaaacgaaaaaaaaaaacgaaaaaaaaaaaaaaaaaaaaaaaccaataataaaatcgacgaaaaaccgtcccccgaccgacgaccgaccgccgccgaacgcatttccaccgcgacgatacgccgcgaccgactccgaaacgactaaaaaaacccgacgaaaaaaataactcgaaaaaccccgtccgtccgtccgtccgtcctcctcctcccccgtctccgccccccgaccccgcgtcctccctcgaaaaaacgcgcgaatcgaaacgacgacgacgacgataacgacgacgacgacgacgacgaaaccgaaaccccccccgaatattacaacccccccgacaacaacactcgccgaatcccgaaaccgaaaaaacgaaacccgtcgccgcgctctcccccctcccgacgcccacccccgcgaaaaatcccccgcgaaaaaaatctcccccgcgaaaacgcgccgacgtctcctcgtaaaaaaaccgaaccacccctcccacgacgcgaccgctctcccacccctcctccccgcgcccccgccccgacgacgaaaaaaataccgcgcgcgaatcgaaaaacgaaacgaactatccccaatacgccccgaacgaatcgcgccgtcgaacccgaaaaaaattctctcgaaaccacgcgcgcgtcccccgaaaaaaaaaacgacgaaacgaacgcacgaaatcgacgacgacgtcgactacccacccgacccgtcttaaaacacgaaccaaaaaatctaacacgtacgcgaatcgaaaactcgcacgaaaaccgccgtaacgcaataaaaataaaaaccgacgcgctcgccgaccgaaataaaatcccgaaacctctccaatccgccgaaaacgcaccaccgacccgtctcgcccgccgcgccgaaaaaataaaacacgaacgcacgtattaaaacccgaaaaataataaac

SEQ ID NO: 30143 - DNA, 954 bp, Artificial Sequence
  chemically treated genomic DNA (Homo sapiens) CpG-island No: 30143
aagaaaagagcgaagaaagaaaacgaaaaaaaaaagaaaaaaaaaaaattaatggtggggtcggcgggggatcgtttttcgatcggcgatcggtcgtcgtcgggcgtatttttatcgcggcggtgcgtcgcgatcggtttcgggacggttgggaaggttcggcggggaaggtggttcggggggtttcgttcgttcgttcgttcgttttttttttttttcgttttcgtttttcggtttcgcgttttttttcgggagggcgcgcgggtcggggcggcggcggcggcggtggcggcggcggcggcggcggcgggatcgaaatttttttcgagtgttatagttttttcggtagtagtattcgtcgaatttcggggtcgagggagcgagattcgtcgtcgcgtttttttttttttcggcgtttattttcgcggggaatttttcgcgaggggggtttttttcgcgggggcgcgtcggcgttttttcgtgggggggtcgggttattttttttacggcgcgatcgtttttttatttttttttttcgcgttttcgtttcggcgacggggggggtgtcgcgcgcgggtcggggggcggggcggattgtttttagtgcgtttcgggcgggtcgcgtcgtcgggttcgggggaggttttttcggggttacgcgcgcgtttttcgaagagggggacggcggagcgagcgtacggggtcggcggcgacgtcggttatttattcgattcgttttgaaatacggattaaggagtttaatacgtgcgcgagtcgggggttcgtacgaaagtcgtcgtggcgtaatgaaggtgaaggtcggcgcgttcgtcggtcgaggtgggatttcgaggtttttttagttcgtcgagggcgtattatcggttcgtttcgttcgtcgcgtcggggaggtggagtacgagcgtacgtgttaggattcgaaagatggtgaat

SEQ ID NO: 30144 - DNA, 954 bp, Artificial Sequence
  chemically treated genomic DNA (Homo sapiens) CpG-island No: 30144
attcaccatctttcgaatcctaacacgtacgctcgtactccacctccccgacgcgacgaacgaaacgaaccgataatacgccctcgacgaactaaaaaaacctcgaaatcccacctcgaccgacgaacgcgccgaccttcaccttcattacgccacgacgactttcgtacgaacccccgactcgcgcacgtattaaactccttaatccgtatttcaaaacgaatcgaataaataaccgacgtcgccgccgaccccgtacgctcgctccgccgtccccctcttcgaaaaacgcgcgcgtaaccccgaaaaaacctcccccgaacccgacgacgcgacccgcccgaaacgcactaaaaacaatccgccccgccccccgacccgcgcgcgacaccccccccgtcgccgaaacgaaaacgcgaaaaaaaaaaataaaaaaacgatcgcgccgtaaaaaaaataacccgacccccccacgaaaaaacgccgacgcgcccccgcgaaaaaaacccccctcgcgaaaaattccccgcgaaaataaacgccgaaaaaaaaaaaaacgcgacgacgaatctcgctccctcgaccccgaaattcgacgaatactactaccgaaaaaactataacactcgaaaaaaatttcgatcccgccgccgccgccgccgccgccaccgccgccgccgccgccccgacccgcgcgccctcccgaaaaaaaacgcgaaaccgaaaaacgaaaacgaaaaaaaaaaaaaacgaacgaacgaacgaacgaaaccccccgaaccaccttccccgccgaaccttcccaaccgtcccgaaaccgatcgcgacgcaccgccgcgataaaaatacgcccgacgacgaccgatcgccgatcgaaaaacgatcccccgccgaccccaccattaattttttttttttcttttttttttcgttttctttcttcgctcttttctt

SEQ ID NO: 30145 - DNA, 617 bp, Artificial Sequence
  chemically treated genomic DNA (Homo sapiens) CpG-island No: 30145
gagcgtcgtttcgaagggacgggcgatggttttcgttgttttcggtcgatcgaaagggagtcgggtttagattttcgaattcggagtggcggagatgggcgtcgcgaggcgtttagtgcggtaacgcgatcgatttcggagaagtcggcgggagtttcggggagagtttttttttttttgtgaagggtagggcgttttggaatgggttcgtttcgagagaggggttcgtgttttggaaagcgtcgcggtttcggcggcgttcggtgagttttcgttggtttttgaaaattcgggggagagggtgtaaatttcgcgtcgggtcgtatttatattcgtagtaggtttttaaggtgaatagtttttggtatgttggaataatgtaggtaagggaagtcggtaagtcggattcgtaatttcgggataaggattggttttaagggttgggtcggtcgggttggggcgcgaagcggggttgggcgcgcgtcgcggttggacgaggcgtcgtcgttttttttatcgtcggtgtattttttttgcggtattcgggttggagatttattttaattgttttttttggtatttatttttagtattcgtattttgtttatttttgaatt

SEQ ID NO: 30146 - DNA, 617 bp, Artificial Sequence
  chemically treated genomic DNA (Homo sapiens) CpG-island No: 30146
aattcaaaaataaacaaaatacgaatactaaaaataaataccaaaaaaaacaattaaaataaatctccaacccgaataccgcaaaaaaaatacaccgacgataaaaaaaacgacgacgcctcgtccaaccgcgacgcgcgcccaaccccgcttcgcgccccaacccgaccgacccaacccttaaaaccaatccttatcccgaaattacgaatccgacttaccgacttcccttacctacattattccaacataccaaaaactattcaccttaaaaacctactacgaatataaatacgacccgacgcgaaatttacaccctctcccccgaattttcaaaaaccaacgaaaactcaccgaacgccgccgaaaccgcgacgctttccaaaacacgaacccctctctcgaaacgaacccattccaaaacgccctacccttcacaaaaaaaaaaaaactctccccgaaactcccgccgacttctccgaaatcgatcgcgttaccgcactaaacgcctcgcgacgcccatctccgccactccgaattcgaaaatctaaacccgactccctttcgatcgaccgaaaacaacgaaaaccatcgcccgtcccttcgaaacgacgctc

SEQ ID NO: 30147 - DNA, 617 bp, Artificial Sequence
  chemically treated genomic DNA (Homo sapiens) CpG-island No: 30147
ggtttagagatgagtaaaatgcgggtattaaagataggtattaaaggggatagttgaaatgaatttttagttcgagtgtcgtaaagagggtgtatcgacgatggggggggcggcggcgtttcgtttagtcgcggcgcgcgtttagtttcgtttcgcgttttagttcgatcgatttagtttttagagttaatttttatttcgaagttacggattcggtttgtcgattttttttatttatattgttttaatatgttagaggttgtttattttggagatttgttgcggatatgggtacggttcggcgcgagatttatattttttttttcggatttttaagggttagcgagagtttatcggacgtcgtcggaatcgcgacgttttttaaggtacgggtttttttttcggggcgaatttattttagggcgttttgttttttataaagaaaagagaatttttttcggggttttcgtcggttttttcgggatcggtcgcgttatcgtattggacgtttcgcggcgtttattttcgttatttcggattcggggatttgaattcgattttttttcgatcggtcgagggtaacggaggttatcgttcgttttttcggaacggcgttt

SEQ ID NO: 30148 - DNA, 617 bp, Artificial Sequence
  chemically treated genomic DNA (Homo sapiens) CpG-island No: 30148
aaacgccgttccgaaaaaacgaacgataacctccgttaccctcgaccgatcgaaaaaaaatcgaattcaaatccccgaatccgaaataacgaaaataaacgccgcgaaacgtccaatacgataacgcgaccgatcccgaaaaaaccgacgaaaaccccgaaaaaaattctcttttctttataaaaaacaaaacgccctaaaataaattcgccccgaaaaaaaaacccgtaccttaaaaaacgtcgcgattccgacgacgtccgataaactctcgctaacccttaaaaatccgaaaaaaaaaatataaatctcgcgccgaaccgtacccatatccgcaacaaatctccaaaataaacaacctctaacatattaaaacaatataaataaaaaaaatcgacaaaccgaatccgtaacttcgaaataaaaattaactctaaaaactaaatcgatcgaactaaaacgcgaaacgaaactaaacgcgcgccgcgactaaacgaaacgccgccgccccccccatcgtcgatacaccctctttacgacactcgaactaaaaattcatttcaactatcccctttaatacctatctttaatacccgcattttactcatctctaaacc

SEQ ID NO: 30149 - DNA, 585 bp, Artificial Sequence
  chemically treated genomic DNA (Homo sapiens) CpG-island No: 30149
tcgttagttcgtttgttatttggcgtatttggttttataggttacgtttttaagttttttaagaggttagcggtaagcgcggtttattttttttttttattaggcgtcggttttacgtcgcgtttacgtttcgaggatagttttagttttttcgttttttggtttcgttttttcgttttttggtttcgttttttttagttttttagcgtcgtcggcgtcgagttcgagtttgcgtttgcgcgtgcgttttggggtttaagttggggcgcgtcgtggttagaatacggagagcggcgggtagtgtagttaatgggaggcggcgttgtttagcggttggtaggcggtgtttgcgcgggtgttaggttagcgcgaggcgtgatttagttgataggttttgaggtgttgttgtggcggcgttcgcggggttgaggcgggtgggagtcggagtcgagcgcgggttgagggaggagggcggcgattggagagcggcgagcggcgagtagcgtaggacgtagagttttttttattttttttttgttgagtgtttttttttattttttttattttatatatattttgtttgtt

SEQ ID NO: 30150 - DNA, 585 bp, Artificial Sequence
  chemically treated genomic DNA (Homo sapiens) CpG-island No: 30150
aacaaacaaaatatatataaaataaaaaaaataaaaaaaaacactcaacaaaaaaaaaataaaaaaaactctacgtcctacgctactcgccgctcgccgctctccaatcgccgccctcctccctcaacccgcgctcgactccgactcccacccgcctcaaccccgcgaacgccgccacaacaacacctcaaaacctatcaactaaatcacgcctcgcgctaacctaacacccgcgcaaacaccgcctaccaaccgctaaacaacgccgcctcccattaactacactacccgccgctctccgtattctaaccacgacgcgccccaacttaaaccccaaaacgcacgcgcaaacgcaaactcgaactcgacgccgacgacgctaaaaaactaaaaaaaacgaaaccaaaaaacgaaaaaacgaaaccaaaaaacgaaaaaactaaaactatcctcgaaacgtaaacgcgacgtaaaaccgacgcctaataaaaaaaaaaaataaaccgcgcttaccgctaacctcttaaaaaacttaaaaacgtaacctataaaaccaaatacgccaaataacaaacgaactaacga

SEQ ID NO: 30151 - DNA, 585 bp, Artificial Sequence
  chemically treated genomic DNA (Homo sapiens) CpG-island No: 30151
ggtaaatagggtgtgtgtggagtgggaggggtgggagggggtatttagtagggaaaaagtgaaagaggttttgcgttttgcgttgttcgtcgttcgtcgttttttagtcgtcgttttttttttttagttcgcgttcggtttcggtttttattcgttttagtttcgcggacgtcgttatagtagtattttagagtttgttaattaggttacgtttcgcgttaatttaatattcgcgtaggtatcgtttattagtcgttaggtagcgtcgttttttattggttgtattgttcgtcgtttttcgtgttttagttacggcgcgttttaatttgggttttagggcgtacgcgtaggcgtaggttcgggttcgacgtcgacgacgttagggagttggagggggcggagttagggagcgagggggcggagttagggagcgagggggttggagttgttttcgagacgtgggcgcggcgtgaagtcgacgtttagtgggagagggaggtggatcgcgtttatcgttggttttttggaagatttgagggcgtggtttgtagagttaggtgcgttaagtgataggcgagttagcgg

SEQ ID NO: 30152 - DNA, 585 bp, Artificial Sequence
  chemically treated genomic DNA (Homo sapiens) CpG-island No: 30152
ccgctaactcgcctatcacttaacgcacctaactctacaaaccacgccctcaaatcttccaaaaaaccaacgataaacgcgatccacctccctctcccactaaacgtcgacttcacgccgcgcccacgtctcgaaaacaactccaaccccctcgctccctaactccgccccctcgctccctaactccgccccctccaactccctaacgtcgtcgacgtcgaacccgaacctacgcctacgcgtacgccctaaaacccaaattaaaacgcgccgtaactaaaacacgaaaaacgacgaacaatacaaccaataaaaaacgacgctacctaacgactaataaacgatacctacgcgaatattaaattaacgcgaaacgtaacctaattaacaaactctaaaatactactataacgacgtccgcgaaactaaaacgaataaaaaccgaaaccgaacgcgaactaaaaaaaaaaaacgacgactaaaaaacgacgaacgacgaacaacgcaaaacgcaaaacctctttcactttttccctactaaataccccctcccacccctcccactccacacacaccctatttacc

SEQ ID NO: 30153 - DNA, 596 bp, Artificial Sequence
  chemically treated genomic DNA (Homo sapiens) CpG-island No: 30153
aggcgtacggtcgtttggttcgcgggggagcgaacgggaggtcggggaatgcgaatcggcgtaaattttcgaggcgtaaattttcgaggcgtaaatttggttttggcgttggcgttgtagttacgggcgtcgtaggagggtcgggtttaaggcgtttcgtttttcgtttttttttttttcgcgtttattggttcggtcgttcgggacggtttcgagaggagggaaggagggaggaaaagtggggatttcgagttcggtttttaagcgtcgttcggttcgtttagtttggtttgtatcgaggtcgatcgggagagggaaagcgacgttagcgggcgtcgtcgtttggttttgtagttggaggcgggacgcgtttttttttttttcgggttgatcgttttagtttttcgttagataaaacgattttatttagcgggcgttttttattagagagtattatttatttcgttttattttgttttggtttcgtcgtcgtagtcgaagcggttgagtggttgcgttttttttttaagtcgtagagggtttttttgtcggtggttggaagttggagcgtcgtagttattagattttttattttt

SEQ ID NO: 30154 - DNA, 596 bp, Artificial Sequence
  chemically treated genomic DNA (Homo sapiens) CpG-island No: 30154
aaaaataaaaaatctaataactacgacgctccaacttccaaccaccgacaaaaaaaccctctacgacttaaaaaaaaaacgcaaccactcaaccgcttcgactacgacgacgaaaccaaaacaaaataaaacgaaataaataatactctctaataaaaaacgcccgctaaataaaatcgttttatctaacgaaaaactaaaacgatcaacccgaaaaaaaaaaaaacgcgtcccgcctccaactacaaaaccaaacgacgacgcccgctaacgtcgctttccctctcccgatcgacctcgatacaaaccaaactaaacgaaccgaacgacgcttaaaaaccgaactcgaaatccccacttttcctccctccttccctcctctcgaaaccgtcccgaacgaccgaaccaataaacgcgaaaaaaaaaaaaacgaaaaacgaaacgccttaaacccgaccctcctacgacgcccgtaactacaacgccaacgccaaaaccaaatttacgcctcgaaaatttacgcctcgaaaatttacgccgattcgcattccccgacctcccgttcgctcccccgcgaaccaaacgaccgtacgcct

SEQ ID NO: 30155 - DNA, 596 bp, Artificial Sequence
  chemically treated genomic DNA (Homo sapiens) CpG-island No: 30155
ggaagtagggagtttggtggttgcggcgttttagtttttagttatcggtagaggaattttttacggtttgaaagggaaacgtagttatttagtcgtttcgattgcggcggcgaaattaaaatagggtggggcggggtgggtggtgttttttagtggaaggcgttcgttgggtgaggtcgttttgtttggcggggggttaggacggttagttcgggaggaggaaaggcgcgtttcgtttttagttgtagggttaggcggcggcgttcgttggcgtcgttttttttttttcggtcggtttcggtgtaggttaggttgggcgggtcgggcggcgtttgggggtcgggttcggagtttttatttttttttttttttttttttttttcggggtcgtttcgagcggtcgggttaatgggcgcggagaggaagggagcgggaagcggggcgttttgggttcggtttttttacggcgttcgtggttgtagcgttagcgttaaagttaagtttgcgtttcgagagtttgcgtttcgagagtttgcgtcggttcgtatttttcggtttttcgttcgttttttcgcgaattaggcggtcgtgcgttt

SEQ ID NO: 30156 - DNA, 596 bp, Artificial Sequence
  chemically treated genomic DNA (Homo sapiens) CpG-island No: 30156
aaacgcacgaccgcctaattcgcgaaaaaacgaacgaaaaaccgaaaaatacgaaccgacgcaaactctcgaaacgcaaactctcgaaacgcaaacttaactttaacgctaacgctacaaccacgaacgccgtaaaaaaaccgaacccaaaacgccccgcttcccgctcccttcctctccgcgcccattaacccgaccgctcgaaacgaccccgaaaaaaaaaaaaaaaaaaaaaaaaataaaaactccgaacccgacccccaaacgccgcccgacccgcccaacctaacctacaccgaaaccgaccgaaaaaaaaaaaacgacgccaacgaacgccgccgcctaaccctacaactaaaaacgaaacgcgcctttcctcctcccgaactaaccgtcctaaccccccgccaaacaaaacgacctcacccaacgaacgccttccactaaaaaacaccacccaccccgccccaccctattttaatttcgccgccgcaatcgaaacgactaaataactacgtttccctttcaaaccgtaaaaaattcctctaccgataactaaaaactaaaacgccgcaaccaccaaactccctacttcc

SEQ ID NO: 30157 - DNA, 570 bp, Artificial Sequence
  chemically treated genomic DNA (Homo sapiens) CpG-island No: 30157
tttcgttttagaagggttattgtagtagtggcggttgacgtagagatggcgggttcgcgagtgttgttcgtgttttgcgttcgttttaatttcgattttaagttttcgaatcggttatttagttgttgtcgatgttggtgcggttgcggtacggcggtagaggagacgacggggacgaaaggtaaggagtaagagggatggttgtagcggtaaaggcgtaggcggcggtaagtttttggggagttcgcgcggtttgggtttcgaagcgttagttggtttggttttattttggcgatcgggtttttgcggcgtagggaattcgttttttttgagttcgttttagttttggtttcgtttttagttatttcgtttttcgttttgcgggcggtaagtcgggttggttagcgcgcgtgttcgtgtttagtttgtattgatatacgcgtttttttttttattttttttttcgttttttcgatcgtttttttttaaacgttagttagataggtcgattttttttttttttttttttggcggtttgttgttcgttagttttttatatagtggttttat

SEQ ID NO: 30158 - DNA, 570 bp, Artificial Sequence
  chemically treated genomic DNA (Homo sapiens) CpG-island No: 30158
ataaaaccactatataaaaaactaacgaacaacaaaccgccaaaaaaaaaaaaaaaaaaaatcgacctatctaactaacgtttaaaaaaaaacgatcgaaaaaacgaaaaaaaaaataaaaaaaaaaacgcgtatatcaatacaaactaaacacgaacacgcgcgctaaccaacccgacttaccgcccgcaaaacgaaaaacgaaataactaaaaacgaaaccaaaactaaaacgaactcaaaaaaaacgaattccctacgccgcaaaaacccgatcgccaaaataaaaccaaaccaactaacgcttcgaaacccaaaccgcgcgaactccccaaaaacttaccgccgcctacgcctttaccgctacaaccatccctcttactccttacctttcgtccccgtcgtctcctctaccgccgtaccgcaaccgcaccaacatcgacaacaactaaataaccgattcgaaaacttaaaatcgaaattaaaacgaacgcaaaacacgaacaacactcgcgaacccgccatctctacgtcaaccgccactactacaataacccttctaaaacgaaa

SEQ ID NO: 30159 - DNA, 570 bp, Artificial Sequence
  chemically treated genomic DNA (Homo sapiens) CpG-island No: 30159
atggagttattgtgtaggaggttggcgggtagtagatcgttagaaaggaggaggaggggagtcggtttgtttggttggcgtttgagggaaaacggtcgagggggcggaggaggaaatgaaagagagggcgcgtgtgttaatataaattgaatacgggtacgcgcgttgattagttcggtttgtcgttcgtagagcggaaggcgggatggttgggggcggggttaaggttaaggcgggtttagagggggcgggttttttgcgtcgtaaagattcggtcgttagagtgaagttaagttagttagcgtttcgaagtttaggtcgcgcggattttttagagatttgtcgtcgtttgcgtttttgtcgttgtagttattttttttattttttgtttttcgttttcgtcgttttttttgtcgtcgtgtcgtagtcgtattagtatcgataatagttaagtggtcgattcggggatttggggtcggggttggggcggacgtaaggtacgaatagtattcgcgagttcgttatttttacgttagtcgttattgttgtagtaatttttttagggcgaga

SEQ ID NO: 30160 - DNA, 570 bp, Artificial Sequence
  chemically treated genomic DNA (Homo sapiens) CpG-island No: 30160
tctcgccctaaaaaaattactacaacaataacgactaacgtaaaaataacgaactcgcgaatactattcgtaccttacgtccgccccaaccccgaccccaaatccccgaatcgaccacttaactattatcgatactaatacgactacgacacgacgacaaaaaaaacgacgaaaacgaaaaacaaaaaataaaaaaaataactacaacgacaaaaacgcaaacgacgacaaatctctaaaaaatccgcgcgacctaaacttcgaaacgctaactaacttaacttcactctaacgaccgaatctttacgacgcaaaaaacccgccccctctaaacccgccttaaccttaaccccgcccccaaccatcccgccttccgctctacgaacgacaaaccgaactaatcaacgcgcgtacccgtattcaatttatattaacacacgcgccctctctttcatttcctcctccgccccctcgaccgttttccctcaaacgccaaccaaacaaaccgactcccctcctcctcctttctaacgatctactacccgccaacctcctacacaataactccat

SEQ ID NO: 30161 - DNA, 504 bp, Artificial Sequence
  chemically treated genomic DNA (Homo sapiens) CpG-island No: 30161
ttcggtaggtcggtcggggattattattttcgttgtaacgtagaggaagttatggtcgggacgcggttagggttacgaaataaaaatatgtggatttacggcgcgagttgagttttgtcggtttatttcgttttcgaattttgtagagttaggcgaggtcgaggttttaggtttaaggtcggggcgtattcgggtttacgtttgcgggagaaagaggtgggtggtgcggttggcgaagttagtgagggatcggagatagtcgggtttggagagagtcgggatcggagagtcggggcgcgggcgtcgcggaggttcggagtcgtaaggaggtttaggtttttcgggacgcggttattgtatttttatagttaaagcggcgggcgtttaaggttagagcgttatcgacgagaaagtcggggtcgcgtcgttcgggaattagagtttttcgcggggatttttaagtttttatttattaggttttgaatttatttttaaaaagtaatt

SEQ ID NO: 30162 - DNA, 504 bp, Artificial Sequence
  chemically treated genomic DNA (Homo sapiens) CpG-island No: 30162
aattactttttaaaaataaattcaaaacctaataaataaaaacttaaaaatccccgcgaaaaactctaattcccgaacgacgcgaccccgactttctcgtcgataacgctctaaccttaaacgcccgccgctttaactataaaaatacaataaccgcgtcccgaaaaacctaaacctccttacgactccgaacctccgcgacgcccgcgccccgactctccgatcccgactctctccaaacccgactatctccgatccctcactaacttcgccaaccgcaccacccacctctttctcccgcaaacgtaaacccgaatacgccccgaccttaaacctaaaacctcgacctcgcctaactctacaaaattcgaaaacgaaataaaccgacaaaactcaactcgcgccgtaaatccacatatttttatttcgtaaccctaaccgcgtcccgaccataacttcctctacgttacaacgaaaataataatccccgaccgacctaccgaa

SEQ ID NO: 30163 - DNA, 504 bp, Artificial Sequence
  chemically treated genomic DNA (Homo sapiens) CpG-island No: 30163
aattgttttttaaaaataggtttagagtttagtgagtgaaaatttaaaagttttcgcgaggagttttagttttcgggcggcgcggtttcgattttttcgtcggtagcgttttggttttgggcgttcgtcgttttggttatggaggtatagtggtcgcgtttcggggagtttgggtttttttgcggtttcgagttttcgcggcgttcgcgtttcgatttttcggtttcggttttttttaggttcggttgttttcggttttttattgatttcgttagtcgtattatttatttttttttttcgtagacgtaaattcgaatacgtttcggttttgggtttagggtttcggtttcgtttggttttataggattcgggggcggggtaggtcggtagagtttagttcgcgtcgtgggtttatatgtttttatttcgtgattttgatcgcgtttcggttataattttttttgcgttataacggggataataattttcggtcggtttgtcgga

SEQ ID NO: 30164 - DNA, 504 bp, Artificial Sequence
  chemically treated genomic DNA (Homo sapiens) CpG-island No: 30164
tccgacaaaccgaccgaaaattattatccccgttataacgcaaaaaaaattataaccgaaacgcgatcaaaatcacgaaataaaaacatataaacccacgacgcgaactaaactctaccgacctaccccgcccccgaatcctataaaaccaaacgaaaccgaaaccctaaacccaaaaccgaaacgtattcgaatttacgtctacgaaaaaaaaaaataaataatacgactaacgaaatcaataaaaaaccgaaaacaaccgaacctaaaaaaaaccgaaaccgaaaaatcgaaacgcgaacgccgcgaaaactcgaaaccgcaaaaaaacccaaactccccgaaacgcgaccactatacctccataaccaaaacgacgaacgcccaaaaccaaaacgctaccgacgaaaaaatcgaaaccgcgccgcccgaaaactaaaactcctcgcgaaaacttttaaattttcactcactaaactctaaacctatttttaaaaaacaatt

SEQ ID NO: 30165 - DNA, 523 bp, Artificial Sequence
  chemically treated genomic DNA (Homo sapiens) CpG-island No: 30165
tcggtcggcgttcggaggcgtaggcgcggcgcggacgttcgtattaagttataatttttgacgggttttgaaacgtaggtagttgagaggcgttttcgagatagtcgtttcgggagatgatgtatttatttttcgtatttattgtgtatttagtatcgagagggtcgtattttgtatttattaatagaaattcgcgtttcgcgttttttgatttttcgtggtcgtcgagtgacgtgttgtcgtcgttggcgcggtttttgggtttgggttttttaataggtggagagagttggaagcgatcggtcggattagtttcgtttagtttgatatttacgtttcgggggttcgggggcgcggtcggttaggtttttttagggaagggggcgcgggttgggttggagtcgggatttcggagcgggggtttatattggaaagtgaatgcgtaggcggttttagaattttaagaagtcgcgttgtagagtttttttaggcgttttttttgattttttttaaaaagggtatt

SEQ ID NO: 30166 - DNA, 523 bp, Artificial Sequence
  chemically treated genomic DNA (Homo sapiens) CpG-island No: 30166
aataccctttttaaaaaaaatcaaaaaaaacgcctaaaaaaactctacaacgcgacttcttaaaattctaaaaccgcctacgcattcactttccaatataaacccccgctccgaaatcccgactccaacccaacccgcgcccccttccctaaaaaaacctaaccgaccgcgcccccgaacccccgaaacgtaaatatcaaactaaacgaaactaatccgaccgatcgcttccaactctctccacctattaaaaaacccaaacccaaaaaccgcgccaacgacgacaacacgtcactcgacgaccacgaaaaatcaaaaaacgcgaaacgcgaatttctattaataaatacaaaatacgaccctctcgatactaaatacacaataaatacgaaaaataaatacatcatctcccgaaacgactatctcgaaaacgcctctcaactacctacgtttcaaaacccgtcaaaaattataacttaatacgaacgtccgcgccgcgcctacgcctccgaacgccgaccga

SEQ ID NO: 30167 - DNA, 523 bp, Artificial Sequence
  chemically treated genomic DNA (Homo sapiens) CpG-island No: 30167
gatattttttttaagagagattaaagaaggcgtttagggaagttttataacgcggttttttggagttttgaggtcgtttgcgtatttattttttagtgtaagttttcgtttcggaatttcggttttagtttagttcgcgtttttttttttggaaagatttggtcggtcgcgttttcgaattttcgaggcgtgggtgttaggttaagcggggttggttcgatcggtcgtttttagttttttttatttgttggaaagtttaggtttaagaatcgcgttagcggcggtagtacgttattcggcggttacggggagttagggagcgcggaacgcgggtttttgttgataagtgtaaagtacggttttttcggtgttaagtgtatagtaagtgcgaagaataaatatattatttttcggggcggttgtttcgaaaacgttttttagttgtttgcgttttagagttcgttaagggttatagtttagtgcgggcgttcgcgtcgcgtttgcgttttcgagcgtcggtcga

SEQ ID NO: 30168 - DNA, 523 bp, Artificial Sequence
  chemically treated genomic DNA (Homo sapiens) CpG-island No: 30168
tcgaccgacgctcgaaaacgcaaacgcgacgcgaacgcccgcactaaactataacccttaacgaactctaaaacgcaaacaactaaaaaacgttttcgaaacaaccgccccgaaaaataatatatttattcttcgcacttactatacacttaacaccgaaaaaaccgtactttacacttatcaacaaaaacccgcgttccgcgctccctaactccccgtaaccgccgaataacgtactaccgccgctaacgcgattcttaaacctaaactttccaacaaataaaaaaaactaaaaacgaccgatcgaaccaaccccgcttaacctaacacccacgcctcgaaaattcgaaaacgcgaccgaccaaatctttccaaaaaaaaaaacgcgaactaaactaaaaccgaaattccgaaacgaaaacttacactaaaaaataaatacgcaaacgacctcaaaactccaaaaaaccgcgttataaaacttccctaaacgccttctttaatctctcttaaaaaaaatatc

SEQ ID NO: 30169 - DNA, 821 bp, Artificial Sequence
  chemically treated genomic DNA (Homo sapiens) CpG-island No: 30169
ttggttttttcgttttttttcgggcgtcgttttgttcgggttcgcgttcgcgtttagtttttatttcgttttttgggtagtggaggtttttgggggttcggttaggtcgttttaaaatcggcgtttttcggcgtcgcggggtcgggcgggggtagggaagttcggcggggagtttttcgtttttttgagtttttttttgtcgatttttaacggtcggcgcgggttttatttgcgttttacgtttcggtatcgcgtcggttcggtttaggggcggggaagcgttcgtgcgtttagagttttcgaggtttagtcgggggtttcgtcggtcgttcgtgttcgttttagttcgtatttatcgtcggggttcggcgttttcgcggcgtcgcgggttatgtcgagtagtagtaatagcggtagtaggcggcgagacgggttcgtattttagggttttcggtttatgtcgtcgtcggtttttttcggcgcgttcgcgttttttttcggggtttttagggtgtagagataaggttataggcgtcgcggggaggggattagtcggcggttttcggcgtcgtcgagggaagcggggggcgttgcggggttttcgggaggtcgtagagcgcgggtttttttttttgtcggggtttgggtttaggatacgttcgtttcgcgttcgtttttggtttcgtatttgttgttttttcgtcgtttatattcgtaaagggggatagatatttatcggataatgatatagttggacgtagagtttcggagagtgttggggaggaaatgttgcggaggatttaagttattcgagggtttag

SEQ ID NO: 30170 - DNA, 821 bp, Artificial Sequence
  chemically treated genomic DNA (Homo sapiens) CpG-island No: 30170
ctaaaccctcgaataacttaaatcctccgcaacatttcctccccaacactctccgaaactctacgtccaactatatcattatccgataaatatctatccccctttacgaatataaacgacgaaaaaacaacaaatacgaaaccaaaaacgaacgcgaaacgaacgtatcctaaacccaaaccccgacaaaaaaaaaaacccgcgctctacgacctcccgaaaaccccgcaacgccccccgcttccctcgacgacgccgaaaaccgccgactaatcccctccccgcgacgcctataaccttatctctacaccctaaaaaccccgaaaaaaaacgcgaacgcgccgaaaaaaaccgacgacgacataaaccgaaaaccctaaaatacgaacccgtctcgccgcctactaccgctattactactactcgacataacccgcgacgccgcgaaaacgccgaaccccgacgataaatacgaactaaaacgaacacgaacgaccgacgaaacccccgactaaacctcgaaaactctaaacgcacgaacgcttccccgcccctaaaccgaaccgacgcgataccgaaacgtaaaacgcaaataaaacccgcgccgaccgttaaaaatcgacaaaaaaaaactcaaaaaaacgaaaaactccccgccgaacttccctacccccgcccgaccccgcgacgccgaaaaacgccgattttaaaacgacctaaccgaacccccaaaaacctccactacccaaaaaacgaaataaaaactaaacgcgaacgcgaacccgaacaaaacgacgcccgaaaaaaaacgaaaaaaccaa

SEQ ID NO: 30171 - DNA, 821 bp, Artificial Sequence
  chemically treated genomic DNA (Homo sapiens) CpG-island No: 30171
ttgagttttcgagtggtttgaatttttcgtaatattttttttttagtatttttcggggttttgcgtttagttgtgttattattcgatgagtgtttgtttttttttgcgaatgtgagcggcgagagggtagtaagtgcggagttagagacggacgcggaacgggcgtgttttaagtttaggtttcgataagaggaaggattcgcgttttgcggtttttcggggatttcgtagcgtttttcgtttttttcggcggcgtcggaagtcgtcggttggtttttttttcgcggcgtttgtagttttatttttgtattttgagggtttcgggaggaggcgcgggcgcgtcgggagggatcggcggcggtatgggtcgggggttttgggatgcgggttcgtttcgtcgtttgttgtcgttgttgttgttgttcggtatggttcgcggcgtcgcgggagcgtcgggtttcgacggtgagtgcgggttgggacgggtacgggcggtcggcggggttttcggttgggtttcgaggattttgggcgtacggacgttttttcgtttttgggtcgggtcggcgcggtgtcgaggcgtggggcgtaggtggggttcgcgtcggtcgttggagatcggtaaggaggagtttagagaagcggggggtttttcgtcgggtttttttgttttcgttcgatttcgcgacgtcgggggacgtcggttttaaggcggtttggtcgggtttttagggatttttattgtttaggaggcggggtgggggttgggcgcgagcgcggattcgggtagggcggcgttcggggaagggcggggaggttag

SEQ ID NO: 30172 - DNA, 821 bp, Artificial Sequence
  chemically treated genomic DNA (Homo sapiens) CpG-island No: 30172
ctaacctccccgcccttccccgaacgccgccctacccgaatccgcgctcgcgcccaacccccaccccgcctcctaaacaataaaaatccctaaaaacccgaccaaaccgccttaaaaccgacgtcccccgacgtcgcgaaatcgaacgaaaacaaaaaaacccgacgaaaaaccccccgcttctctaaactcctccttaccgatctccaacgaccgacgcgaaccccacctacgccccacgcctcgacaccgcgccgacccgacccaaaaacgaaaaaacgtccgtacgcccaaaatcctcgaaacccaaccgaaaaccccgccgaccgcccgtacccgtcccaacccgcactcaccgtcgaaacccgacgctcccgcgacgccgcgaaccataccgaacaacaacaacaacgacaacaaacgacgaaacgaacccgcatcccaaaacccccgacccataccgccgccgatccctcccgacgcgcccgcgcctcctcccgaaaccctcaaaatacaaaaataaaactacaaacgccgcgaaaaaaaaaccaaccgacgacttccgacgccgccgaaaaaaacgaaaaacgctacgaaatccccgaaaaaccgcaaaacgcgaatccttcctcttatcgaaacctaaacttaaaacacgcccgttccgcgtccgtctctaactccgcacttactaccctctcgccgctcacattcgcaaaaaaaaacaaacactcatcgaataataacacaactaaacgcaaaaccccgaaaaatactaaaaaaaaaatattacgaaaaattcaaaccactcgaaaactcaa

SEQ ID NO: 30173 - DNA, 803 bp, Artificial Sequence
  chemically treated genomic DNA (Homo sapiens) CpG-island No: 30173
gttagcgcgttgttttcgaagttcggtagtaaatgagcgtagatcgtacgggtttttcgcgtattaaggtatacgtatgcgtattggttttgggagttttgaagatttggcggagtttagcgcggatggaggtttgagggtggcgggggcggagcgcgtcgcgagttgggggtatgttcgcggcgggcgtcgtttagaggaaggttaagtagtcgttattacgttgtcggtcgcggagagacgtaagcgagttaggtcgagggtcgcggcggcgatgtagcgacggcgtcgtttttcgtcgtttatttttcggttgttcgagggttgcgggggaggaggcggtggtagcgaggaggtggaagtgtagtttttcgtcgggcgttggggttcggtcgcggcggtttcggcggtagcggcggcggttacgcgtagtatcgaggaggaggaggagaggtttgagcgtgagtatttttggaagattattaatgtttttcgttattacgggtaaggagttcgtggcggatttcggtttagatcgtcggggcgtttattggtggcggcggattcgtcggaacgggggcgttcgtcgtttcgtcgttacgttttcgaggcgtcgggattcggttgttgtagttgattttcgggtttcgagttatttcgtattattttagtttttttcggttttgtatattcgcgtgttcgtcgcgtcgtttgttgtatagtttcgtgttttttgattttaggattagattagtttttttgttttcgttttcgtaaaggtttggttttgaggtcgatggggg

SEQ ID NO: 30174 - DNA, 803 bp, Artificial Sequence
  chemically treated genomic DNA (Homo sapiens) CpG-island No: 30174
cccccatcgacctcaaaaccaaacctttacgaaaacgaaaacaaaaaaactaatctaatcctaaaatcaaaaaacacgaaactatacaacaaacgacgcgacgaacacgcgaatatacaaaaccgaaaaaaactaaaataatacgaaataactcgaaacccgaaaatcaactacaacaaccgaatcccgacgcctcgaaaacgtaacgacgaaacgacgaacgcccccgttccgacgaatccgccgccaccaataaacgccccgacgatctaaaccgaaatccgccacgaactccttacccgtaataacgaaaaacattaataatcttccaaaaatactcacgctcaaacctctcctcctcctcctcgatactacgcgtaaccgccgccgctaccgccgaaaccgccgcgaccgaaccccaacgcccgacgaaaaactacacttccacctcctcgctaccaccgcctcctcccccgcaaccctcgaacaaccgaaaaataaacgacgaaaaacgacgccgtcgctacatcgccgccgcgaccctcgacctaactcgcttacgtctctccgcgaccgacaacgtaataacgactacttaaccttcctctaaacgacgcccgccgcgaacatacccccaactcgcgacgcgctccgcccccgccaccctcaaacctccatccgcgctaaactccgccaaatcttcaaaactcccaaaaccaatacgcatacgtataccttaatacgcgaaaaacccgtacgatctacgctcatttactaccgaacttcgaaaacaacgcgctaac

SEQ ID NO: 30175 - DNA, 803 bp, Artificial Sequence
  chemically treated genomic DNA (Homo sapiens) CpG-island No: 30175
tttttatcggttttaaagttaaatttttacgaggacggaggtaggagagttaatttgattttgaggttagaagatacgaggttgtgtagtagacggcgcggcggatacgcgggtgtgtagggtcgggaggggttggggtggtgcgaggtgattcggggttcggaggttagttgtagtagtcgggtttcgacgtttcggaggcgtggcggcgggacggcgagcgttttcgtttcggcgggttcgtcgttattagtgggcgtttcgacggtttgggtcggggttcgttacgggttttttattcgtagtagcggaaggtattaatgattttttagaagtgtttacgtttaagtttttttttttttttttcggtgttgcgcgtggtcgtcgtcgttgtcgtcgaaatcgtcgcggtcgagttttaacgttcggcggaaaattgtatttttattttttcgttgttatcgttttttttttcgtagttttcgggtagtcgggaggtgggcggcggagggcgacgtcgtcgttgtatcgtcgtcgcggttttcggtttggttcgtttgcgttttttcgcgatcgatagcgtggtggcggttgtttggtttttttttagacggcgttcgtcgcggatatgtttttagttcgcggcgcgtttcgttttcgttatttttaggtttttattcgcgttgggtttcgttaggtttttagggtttttagaattaatgcgtatgcgtgtgttttggtacgcggagggttcgtgcggtttgcgtttatttgttgtcgggtttcggagatagcgcgttgat

SEQ ID NO: 30176 - DNA, 803 bp, Artificial Sequence
  chemically treated genomic DNA (Homo sapiens) CpG-island No: 30176
atcaacgcgctatctccgaaacccgacaacaaataaacgcaaaccgcacgaaccctccgcgtaccaaaacacacgcatacgcattaattctaaaaaccctaaaaacctaacgaaacccaacgcgaataaaaacctaaaaataacgaaaacgaaacgcgccgcgaactaaaaacatatccgcgacgaacgccgtctaaaaaaaaaccaaacaaccgccaccacgctatcgatcgcgaaaaaacgcaaacgaaccaaaccgaaaaccgcgacgacgatacaacgacgacgtcgccctccgccgcccacctcccgactacccgaaaactacgaaaaaaaaaacgataacaacgaaaaaataaaaatacaattttccgccgaacgttaaaactcgaccgcgacgatttcgacgacaacgacgacgaccacgcgcaacaccgaaaaaaaaaaaaaaaaacttaaacgtaaacacttctaaaaaatcattaataccttccgctactacgaataaaaaacccgtaacgaaccccgacccaaaccgtcgaaacgcccactaataacgacgaacccgccgaaacgaaaacgctcgccgtcccgccgccacgcctccgaaacgtcgaaacccgactactacaactaacctccgaaccccgaatcacctcgcaccaccccaacccctcccgaccctacacacccgcgtatccgccgcgccgtctactacacaacctcgtatcttctaacctcaaaatcaaattaactctcctacctccgtcctcgtaaaaatttaactttaaaaccgataaaaa

SEQ ID NO: 30177 - DNA, 920 bp, Artificial Sequence
  chemically treated genomic DNA (Homo sapiens) CpG-island No: 30177
tgcgggtcgtttgatcgggtttttaattaatttcgtcgcggttttttcgtttattttcgagcgcgtattttcggtcgcgagggcgttcgggagcgcgtttcgcgagtttttattaattagcggtttcgtttggttagatagagtgcgcgcgcgtacgttgtgcgtaggttcgaattttcgtcgtttcgcggttgttttttaacgttcgggtcgtatttcggcggcggcgagggttgagcgcgggagttgttttcgagtcggagttttagttttaggttttgcgcgagttgtttcgttttattttttttagcgttttgtcgttttttcgttcgatttcggtttgttttttttttacgcgtttagttttcgtttttcgtttttcgtagttatcggtattcggtttttcgcgtttggcgggtttcgttcgagtttttgggtttatggttaagcggcgtgcggtcgagtcggtgacgttttacgtgttttggaagcggtttttgttttgcgatttcgttgagtagtcgtcgttatcgtttttttggattcggtcgttcggggtcgcgtatgttgggtagtttttcggcgttttagagtagtatcgaaagcgtaaaatcgacgtagggattatggtagagttttcggtttcgtttagtaagcgtcgtgatagcggggataatagcgtttcgagcggttaggagcgtgaggattacggtttggagataggcgattcgtcgttgtcgtcgtcgttcgtattgtcggggtcgggggaggagttttcgggcgttcggttttcggggggcggtggcgacgacggggcggggcgcgtaggattttcgcggggagattggggggtcgtatcgcgttaggtaggggttgggggcgggtgggttgaggggcgaaggggtttgttttttttttat

SEQ ID NO: 30178 - DNA, 920 bp, Artificial Sequence
  chemically treated genomic DNA (Homo sapiens) CpG-island No: 30178
ataaaaaaaaaacaaaccccttcgcccctcaacccacccgcccccaacccctacctaacgcgatacgaccccccaatctccccgcgaaaatcctacgcgccccgccccgtcgtcgccaccgccccccgaaaaccgaacgcccgaaaactcctcccccgaccccgacaatacgaacgacgacgacaacgacgaatcgcctatctccaaaccgtaatcctcacgctcctaaccgctcgaaacgctattatccccgctatcacgacgcttactaaacgaaaccgaaaactctaccataatccctacgtcgattttacgctttcgatactactctaaaacgccgaaaaactacccaacatacgcgaccccgaacgaccgaatccaaaaaaacgataacgacgactactcaacgaaatcgcaaaacaaaaaccgcttccaaaacacgtaaaacgtcaccgactcgaccgcacgccgcttaaccataaacccaaaaactcgaacgaaacccgccaaacgcgaaaaaccgaataccgataactacgaaaaacgaaaaacgaaaactaaacgcgtaaaaaaaaaacaaaccgaaatcgaacgaaaaaacgacaaaacgctaaaaaaaataaaacgaaacaactcgcgcaaaacctaaaactaaaactccgactcgaaaacaactcccgcgctcaaccctcgccgccgccgaaatacgacccgaacgttaaaaaacaaccgcgaaacgacgaaaattcgaacctacgcacaacgtacgcgcgcgcactctatctaaccaaacgaaaccgctaattaataaaaactcgcgaaacgcgctcccgaacgccctcgcgaccgaaaatacgcgctcgaaaataaacgaaaaaaccgcgacgaaattaattaaaaacccgatcaaacgacccgca

SEQ ID NO: 30179 - DNA, 920 bp, Artificial Sequence
  chemically treated genomic DNA (Homo sapiens) CpG-island No: 30179
gtggggaaaaggtaagttttttcgttttttagtttattcgtttttagtttttatttggcgcgatgcgattttttagttttttcgcgggggttttgcgcgtttcgtttcgtcgtcgttatcgtttttcgggagtcgggcgttcgggagtttttttttcggtttcggtagtacgggcggcggcggtagcggcggatcgtttgtttttagatcgtggtttttacgtttttggtcgttcggggcgttgttgttttcgttgttacggcgtttgttgggcgaagtcgagggttttgttatggtttttgcgtcgattttgcgttttcggtgttgttttgggacgtcgaggagttgtttagtatgcgcgatttcgggcggtcggatttagagaggcggtggcggcggttgtttagcgaagtcgtaaagtaggagtcgtttttaaggtacgtggaacgttatcggttcggtcgtacgtcgtttggttatgggtttagaggttcgggcggagttcgttaggcgcgggagatcgagtgtcgatagttgcggggggcgaagagcgaggattgagcgcgtgagagagggataggtcgaagtcgggcgaggaggcgataggacgttggagggggtagggcggggtagttcgcgtagggtttagggttggggtttcggttcggaggtagttttcgcgtttagttttcgtcgtcgtcgagatgcggttcggacgttgagaagtaatcgcgaagcggcggagattcgaatttgcgtataacgtgcgcgcgcgtattttgtttggttaggcggagtcgttggttggtggaggttcgcggggcgcgttttcgagcgttttcgcgatcggaagtgcgcgttcgggggtaggcgggaaggtcgcggcgggattaattaaagattcgattaagcggttcgta

SEQ ID NO: 30180 - DNA, 920 bp, Artificial Sequence
  chemically treated genomic DNA (Homo sapiens) CpG-island No: 30180
tacgaaccgcttaatcgaatctttaattaatcccgccgcgaccttcccgcctacccccgaacgcgcacttccgatcgcgaaaacgctcgaaaacgcgccccgcgaacctccaccaaccaacgactccgcctaaccaaacaaaatacgcgcgcgcacgttatacgcaaattcgaatctccgccgcttcgcgattacttctcaacgtccgaaccgcatctcgacgacgacgaaaactaaacgcgaaaactacctccgaaccgaaaccccaaccctaaaccctacgcgaactaccccgccctaccccctccaacgtcctatcgcctcctcgcccgacttcgacctatccctctctcacgcgctcaatcctcgctcttcgccccccgcaactatcgacactcgatctcccgcgcctaacgaactccgcccgaacctctaaacccataaccaaacgacgtacgaccgaaccgataacgttccacgtaccttaaaaacgactcctactttacgacttcgctaaacaaccgccgccaccgcctctctaaatccgaccgcccgaaatcgcgcatactaaacaactcctcgacgtcccaaaacaacaccgaaaacgcaaaatcgacgcaaaaaccataacaaaaccctcgacttcgcccaacaaacgccgtaacaacgaaaacaacaacgccccgaacgaccaaaaacgtaaaaaccacgatctaaaaacaaacgatccgccgctaccgccgccgcccgtactaccgaaaccgaaaaaaaaactcccgaacgcccgactcccgaaaaacgataacgacgacgaaacgaaacgcgcaaaacccccgcgaaaaaactaaaaaatcgcatcgcgccaaataaaaactaaaaacgaataaactaaaaaacgaaaaaacttaccttttccccac

SEQ ID NO: 30181 - DNA, 695 bp, Artificial Sequence
  chemically treated genomic DNA (Homo sapiens) CpG-island No: 30181
atcgcgtacgggcgagcgtttatttttggttttatttcgcgtgggttagtgggattcgcgggatttttttcgttcgaacggcgttttcgaggtatttaggcgtttttttcgcgcgttggttttagatttttaggttttcgtttttttaaaagggacgcgtttcgtcgggtcgggagggatcgtagggtttgcgcgcggcgggcggggtttttagcgtgagaggcgtggcgtcgagcgcggcgggcgtggtttcgagcggatgggtcgggaggttggggatggcgcgtggtttttttaagacgtatcggggcgggttcgggcggcgcgcggtttttttaaggtttggtttacgtggtagtcgttggagtcgtagtcgacgcggagcgaggtcggtcgtcgggtattttttgtggaggtcgtagcgggtgcgggcgtcgacgggcgagagttagcgagcgagcgagcgagtcgagtcgagtttttcgtcgtcgttatgggttagaacgatttgatgggtacggtcgaggatttcgtcgattaggtgcggtttgcgggtttttttttcggtttcggtttcgatttaggtcgttcgggtcgtttcggagtcggttttttagcgtagggcgttaggttcgggtcgttttttgattttttgtttttatagagggattttttcgttcgggttttttgtttcg

SEQ ID NO: 30182 - DNA, 695 bp, Artificial Sequence
  chemically treated genomic DNA (Homo sapiens) CpG-island No: 30182
cgaaacaaaaaacccgaacgaaaaaatccctctataaaaacaaaaaatcaaaaaacgacccgaacctaacgccctacgctaaaaaaccgactccgaaacgacccgaacgacctaaatcgaaaccgaaaccgaaaaaaaaacccgcaaaccgcacctaatcgacgaaatcctcgaccgtacccatcaaatcgttctaacccataacgacgacgaaaaactcgactcgactcgctcgctcgctcgctaactctcgcccgtcgacgcccgcacccgctacgacctccacaaaaaatacccgacgaccgacctcgctccgcgtcgactacgactccaacgactaccacgtaaaccaaaccttaaaaaaaccgcgcgccgcccgaacccgccccgatacgtcttaaaaaaaccacgcgccatccccaacctcccgacccatccgctcgaaaccacgcccgccgcgctcgacgccacgcctctcacgctaaaaaccccgcccgccgcgcgcaaaccctacgatccctcccgacccgacgaaacgcgtcccttttaaaaaaacgaaaacctaaaaatctaaaaccaacgcgcgaaaaaaacgcctaaatacctcgaaaacgccgttcgaacgaaaaaaatcccgcgaatcccactaacccacgcgaaataaaaccaaaaataaacgctcgcccgtacgcgat

SEQ ID NO: 30183 - DNA, 695 bp, Artificial Sequence
  chemically treated genomic DNA (Homo sapiens) CpG-island No: 30183
cgggatagagggttcgggcgggggggtttttttgtgggaataaggagttagggggcggttcgggtttggcgttttgcgttgggaggtcgatttcggagcggttcgggcggtttgggtcgggatcggggtcgggggaggagttcgtaggtcgtatttggtcggcgaagttttcggtcgtgtttattaggtcgttttggtttatggcgacggcgggaggttcggttcggttcgttcgttcgttcgttggttttcgttcgtcggcgttcgtattcgttgcggtttttataggaagtgttcggcggtcggtttcgtttcgcgtcggttgcggttttagcggttgttacgtaggttaagttttaaaggggtcgcgcgtcgttcgggttcgtttcggtgcgttttaaaggggttacgcgttatttttagtttttcgatttattcgttcgaagttacgttcgtcgcgttcgacgttacgttttttacgttggaggtttcgttcgtcgcgcgtaggttttgcggtttttttcggttcggcggaacgcgttttttttaagggggcggggatttgggggtttggggttagcgcgcgggagggacgtttgagtgtttcgagggcgtcgttcgggcggggaggatttcgcgggttttattgatttacgcggggtggggttaggggtggacgttcgttcgtacgcggt

SEQ ID NO: 30184 - DNA, 695 bp, Artificial Sequence
  chemically treated genomic DNA (Homo sapiens) CpG-island No: 30184
accgcgtacgaacgaacgtccacccctaaccccaccccgcgtaaatcaataaaacccgcgaaatcctccccgcccgaacgacgccctcgaaacactcaaacgtccctcccgcgcgctaaccccaaacccccaaatccccgcccccttaaaaaaaacgcgttccgccgaaccgaaaaaaaccgcaaaacctacgcgcgacgaacgaaacctccaacgtaaaaaacgtaacgtcgaacgcgacgaacgtaacttcgaacgaataaatcgaaaaactaaaaataacgcgtaacccctttaaaacgcaccgaaacgaacccgaacgacgcgcgacccctttaaaacttaacctacgtaacaaccgctaaaaccgcaaccgacgcgaaacgaaaccgaccgccgaacacttcctataaaaaccgcaacgaatacgaacgccgacgaacgaaaaccaacgaacgaacgaacgaaccgaaccgaacctcccgccgtcgccataaaccaaaacgacctaataaacacgaccgaaaacttcgccgaccaaatacgacctacgaactcctcccccgaccccgatcccgacccaaaccgcccgaaccgctccgaaatcgacctcccaacgcaaaacgccaaacccgaaccgccccctaactccttattcccacaaaaaaacccccccgcccgaaccctctatcccg

SEQ ID NO: 30185 - DNA, 640 bp, Artificial Sequence
  chemically treated genomic DNA (Homo sapiens) CpG-island No: 30185
ggcgcgcgggttttttggggatgcgcgcgaggaggcgtcgtttttttttagtaggggtttttggggattcgcggtcgtttttcgcgtttttttgttttttttcgtgttcggtttcgggaagtcggggcggcgggcggcgcgggtcgggagggggcgtttcgggtttatttcgttttagggtcgtcgggcggaaggcggaggtcgagattagacgcggagttatggtcgaggtgttgcggacgttggtcggtgagtgtaggtttcggtttcgggtgttcgcgagggagtcgttatcgtagggaatgcggggtgtattcgatagtcgggtcggggtgggggcgtttagggttgcgaggtttcgggtcggtcgtcgttttagttttcgagattttgcgttttggggagtcggcgggtaggtgggtttggtcgcgttgtgggtgtttgggattcgtagggaggatgggcgcggtggcgcggtttggcggggggttcgttttcggggttttcgggttttggtgagagcggggtttttcgacgtcgtggcggtttttagttttttttcgtttttttacgtttttcgttttttatgagttgttatttttagtatttatcgttcgattttggattaggataaggtttt

SEQ ID NO: 30186 - DNA, 640 bp, Artificial Sequence
  chemically treated genomic DNA (Homo sapiens) CpG-island No: 30186
aaaaccttatcctaatccaaaatcgaacgataaatactaaaaataacaactcataaaaaacgaaaaacgtaaaaaaacgaaaaaaaactaaaaaccgccacgacgtcgaaaaaccccgctctcaccaaaacccgaaaaccccgaaaacgaaccccccgccaaaccgcgccaccgcgcccatcctccctacgaatcccaaacacccacaacgcgaccaaacccacctacccgccgactccccaaaacgcaaaatctcgaaaactaaaacgacgaccgacccgaaacctcgcaaccctaaacgcccccaccccgacccgactatcgaatacaccccgcattccctacgataacgactccctcgcgaacacccgaaaccgaaacctacactcaccgaccaacgtccgcaacacctcgaccataactccgcgtctaatctcgacctccgccttccgcccgacgaccctaaaacgaaataaacccgaaacgccccctcccgacccgcgccgcccgccgccccgacttcccgaaaccgaacacgaaaaaaaacaaaaaaacgcgaaaaacgaccgcgaatccccaaaaacccctactaaaaaaaaacgacgcctcctcgcgcgcatccccaaaaaacccgcgcgcc

SEQ ID NO: 30187 - DNA, 640 bp, Artificial Sequence
  chemically treated genomic DNA (Homo sapiens) CpG-island No: 30187
agagttttgttttagtttagggtcgggcggtaggtgttgaaaatagtagtttatggaaggcggggagcgtggaggggcgaggagaggttggagatcgttacggcgtcgagggatttcgtttttattaggattcggggatttcggagacgagtttttcgttaggtcgcgttatcgcgtttattttttttgcgggttttaggtatttatagcgcggttaagtttatttgttcgtcggttttttaggacgtagggtttcggaggttggggcggcggtcggttcgaagtttcgtagttttgagcgtttttatttcggttcggttgtcgggtgtatttcgtattttttgcggtagcggttttttcgcgggtattcggggtcgaggtttgtatttatcggttagcgttcgtaatatttcggttatggtttcgcgtttggtttcggttttcgtttttcgttcggcggttttggggcggggtgagttcgaggcgttttttttcggttcgcgtcgttcgtcgtttcgatttttcgaggtcgaatacgggaggggatagaggggcgcgggaggcggtcgcgggtttttagggatttttgttaggaagggacggcgttttttcgcgcgtatttttaagggattcgcgcgtt

SEQ ID NO: 30188 - DNA, 640 bp, Artificial Sequence
  chemically treated genomic DNA (Homo sapiens) CpG-island No: 30188
aacgcgcgaatcccttaaaaatacgcgcgaaaaaacgccgtcccttcctaacaaaaatccctaaaaacccgcgaccgcctcccgcgcccctctatcccctcccgtattcgacctcgaaaaatcgaaacgacgaacgacgcgaaccgaaaaaaaacgcctcgaactcaccccgccccaaaaccgccgaacgaaaaacgaaaaccgaaaccaaacgcgaaaccataaccgaaatattacgaacgctaaccgataaatacaaacctcgaccccgaatacccgcgaaaaaaccgctaccgcaaaaaatacgaaatacacccgacaaccgaaccgaaataaaaacgctcaaaactacgaaacttcgaaccgaccgccgccccaacctccgaaaccctacgtcctaaaaaaccgacgaacaaataaacttaaccgcgctataaatacctaaaacccgcaaaaaaaataaacgcgataacgcgacctaacgaaaaactcgtctccgaaatccccgaatcctaataaaaacgaaatccctcgacgccgtaacgatctccaacctctcctcgcccctccacgctccccgccttccataaactactattttcaacacctaccgcccgaccctaaactaaaacaaaactct

SEQ ID NO: 30189 - DNA, 796 bp, Artificial Sequence
  chemically treated genomic DNA (Homo sapiens) CpG-island No: 30189
gcgggtcgcggcgcgtagttttttagggtcgggaagtttaatttggcgcgattttcggtttttcggcgggggtttttttcgggttcgtttttttttcgggtttttcggaaatcgcgtcggggcgtttcgttcgcgcgttttttattcgtatttcgggttttcgtattttttaggatttggtttgcggcggacgagggagacggcgaggttcgggagcgcggggtttcgaattatttcgtagcgggcgagttcgcgggtttatttgatttgtttatggtcggtttcgcgcgtttttcgtttttcgcggttgcgttgtattgcgttcgttcggtttagcgtcgttttagagtttaggatcgggttgatgtcgcggtttttttttcggcgtcgttcggttttcgttttataaggagcgatagttgagggcggaggcgttcggggttatttcgtgggtttttcggagagtttatttttgggaagtagtttcgcgattgtcgagggtttttcggatgcggtcgcggggtttaagtttttcggattttatatcgagttgttttttttcggggcgcgtggggaagttcgcgtttgttgggtttcgggtggttgttttgcgtcgacgcgcggcgaggatagaggggcgcgcggtcgcggtacgaggggcgtttcggtcggcgttattaggggacggtttttttttgtcgcggtttgatacgatatacgtagtttcggggtgtgtttttattttcggtgattttgggtttcggagggcggttggttcggggagggggatgttttt

SEQ ID NO: 30190 - DNA, 796 bp, Artificial Sequence
  chemically treated genomic DNA (Homo sapiens) CpG-island No: 30190
aaaaacatccccctccccgaaccaaccgccctccgaaacccaaaatcaccgaaaataaaaacacaccccgaaactacgtatatcgtatcaaaccgcgacaaaaaaaaaccgtcccctaataacgccgaccgaaacgcccctcgtaccgcgaccgcgcgcccctctatcctcgccgcgcgtcgacgcaaaacaaccacccgaaacccaacaaacgcgaacttccccacgcgccccgaaaaaaaacaactcgatataaaatccgaaaaacttaaaccccgcgaccgcatccgaaaaaccctcgacaatcgcgaaactacttcccaaaaataaactctccgaaaaacccacgaaataaccccgaacgcctccgccctcaactatcgctccttataaaacgaaaaccgaacgacgccgaaaaaaaaaccgcgacatcaacccgatcctaaactctaaaacgacgctaaaccgaacgaacgcaatacaacgcaaccgcgaaaaacgaaaaacgcgcgaaaccgaccataaacaaatcaaataaacccgcgaactcgcccgctacgaaataattcgaaaccccgcgctcccgaacctcgccgtctccctcgtccgccgcaaaccaaatcctaaaaaatacgaaaacccgaaatacgaataaaaaacgcgcgaacgaaacgccccgacgcgatttccgaaaaacccgaaaaaaaaacgaacccgaaaaaaacccccgccgaaaaaccgaaaatcgcgccaaattaaacttcccgaccctaaaaaactacgcgccgcgacccgc

SEQ ID NO: 30191 - DNA, 796 bp, Artificial Sequence
  chemically treated genomic DNA (Homo sapiens) CpG-island No: 30191
aggagtattttttttttcggattagtcgtttttcggagtttagagttatcggagatgggggtatatttcggggttgcgtgtgtcgtgttaggtcgcggtagggagaggtcgttttttggtggcgtcggtcggaacgtttttcgtgtcgcgatcgcgcgtttttttgttttcgtcgcgcgtcggcgtagagtagttattcggggtttagtaggcgcgggtttttttacgcgtttcgggaagggatagttcggtgtggggttcgggaggtttgagtttcgcggtcgtattcggggagttttcggtagtcgcggagttgttttttaggggtgagtttttcgggaggtttacggggtggtttcgggcgttttcgtttttagttgtcgttttttataaggcgggggtcgggcggcgtcggaggaggggtcgcggtattagttcggttttgggttttggggcggcgttgggtcgggcgagcgtagtgtagcgtagtcgcggggagcgaggagcgcgcggagtcggttatgggtaagttaggtgagttcgcgggttcgttcgttgcggaatggttcggaatttcgcgttttcggatttcgtcgtttttttcgttcgtcgtaagttaggttttggggagtgcgggagttcggggtgcgggtggagggcgcgcgggcggagcgtttcggcgcggttttcggggaattcggggggaaggcgagttcgagggaggttttcgtcggagagtcggggatcgcgttaagttgggtttttcgattttgaggggttgcgcgtcgcggttcgt

SEQ ID NO: 30192 - DNA, 796 bp, Artificial Sequence
  chemically treated genomic DNA (Homo sapiens) CpG-island No: 30192
acgaaccgcgacgcgcaacccctcaaaatcgaaaaacccaacttaacgcgatccccgactctccgacgaaaacctccctcgaactcgccttccccccgaattccccgaaaaccgcgccgaaacgctccgcccgcgcgccctccacccgcaccccgaactcccgcactccccaaaacctaacttacgacgaacgaaaaaaacgacgaaatccgaaaacgcgaaattccgaaccattccgcaacgaacgaacccgcgaactcacctaacttacccataaccgactccgcgcgctcctcgctccccgcgactacgctacactacgctcgcccgacccaacgccgccccaaaacccaaaaccgaactaataccgcgacccctcctccgacgccgcccgacccccgccttataaaaaacgacaactaaaaacgaaaacgcccgaaaccaccccgtaaacctcccgaaaaactcacccctaaaaaacaactccgcgactaccgaaaactccccgaatacgaccgcgaaactcaaacctcccgaaccccacaccgaactatcccttcccgaaacgcgtaaaaaaacccgcgcctactaaaccccgaataactactctacgccgacgcgcgacgaaaacaaaaaaacgcgcgatcgcgacacgaaaaacgttccgaccgacgccaccaaaaaacgacctctccctaccgcgacctaacacgacacacgcaaccccgaaatatacccccatctccgataactctaaactccgaaaaacgactaatccgaaaaaaaaaatactcct

SEQ ID NO: 30193 - DNA, 570 bp, Artificial Sequence
  chemically treated genomic DNA (Homo sapiens) CpG-island No: 30193
ttatttatacgttgtgattacggtttatttatacgttgtgattacggtttatttatacgttgtaattacggtttatttatacgttgtaattacggtttatttatacgttgtaattacggtttatttatacgttgtaattacggtttatttatatattgtaattacggtttatttatatattgtaattacggtttatttatatattgtaattacggtttatttacgtattgtaattacggtttatttacgtattgtaattacggtttatttatatattgtaattacggtttatttatatattgtaattacggtttatttatatattgtagttacggtttatttatatattgtagttacggtttatttatatattgtagttacggtttatttatatattgtaattacggtttatttatatattgtagttacggtttatttatatattgtaattacggtttatttacgtattgtaattacggtttatttatatattgtaattacgggttatttatatattgtaattacggtttatttatatattgtagttacggtttatttaggtattgtaat

SEQ ID NO: 30194 - DNA, 570 bp, Artificial Sequence
  chemically treated genomic DNA (Homo sapiens) CpG-island No: 30194
attacaatacctaaataaaccgtaactacaatatataaataaaccgtaattacaatatataaataacccgtaattacaatatataaataaaccgtaattacaatacgtaaataaaccgtaattacaatatataaataaaccgtaactacaatatataaataaaccgtaattacaatatataaataaaccgtaactacaatatataaataaaccgtaactacaatatataaataaaccgtaactacaatatataaataaaccgtaattacaatatataaataaaccgtaattacaatatataaataaaccgtaattacaatacgtaaataaaccgtaattacaatacgtaaataaaccgtaattacaatatataaataaaccgtaattacaatatataaataaaccgtaattacaatatataaataaaccgtaattacaacgtataaataaaccgtaattacaacgtataaataaaccgtaattacaacgtataaataaaccgtaattacaacgtataaataaaccgtaatcacaacgtataaataaaccgtaatcacaacgtataaataa

SEQ ID NO: 30195 - DNA, 570 bp, Artificial Sequence
  chemically treated genomic DNA (Homo sapiens) CpG-island No: 30195
gttatagtgtttggatagatcgtggttgtagtgtgtggataggtcgtggttatagtgtgtggatagttcgtggttatagtgtgtggatagatcgtggttatagtgcgtggataggtcgtggttgtagtgtgtggatagatcgtggttgtagtgtgtggataggtcgtggttatagtgtgtggataggtcgtggttatagtgtgtggataggtcgtggttatagtgtgtggatagatcgtggttgtagtgtgtggataggtcgtggttatagtgtgtggatagatcgtggttatagtgtgtggataggtcgtggttgtagtgcgtggataggtcgtggttgtagtgcgtggataggtcgtggttgtagtgtgtggataggtcgtggttatagtgtgtggataggtcgtggttatagtgtgtggataggtcgtggttgtagcgtgtggatgggtcgtggttatagcgtgtggataggtcgtggttatagcgtgtggatgggtcgtggttatagcgtgtggatgggtcgtggttatagcgtgtggatgggtcgtggttatagcgtgtggatgg

SEQ ID NO: 30196 - DNA, 570 bp, Artificial Sequence
  chemically treated genomic DNA (Homo sapiens) CpG-island No: 30196
ccatccacacgctataaccacgacccatccacacgctataaccacgacccatccacacgctataaccacgacccatccacacgctataaccacgacctatccacacgctataaccacgacccatccacacgctacaaccacgacctatccacacactataaccacgacctatccacacactataaccacgacctatccacacactacaaccacgacctatccacgcactacaaccacgacctatccacgcactacaaccacgacctatccacacactataaccacgatctatccacacactataaccacgacctatccacacactacaaccacgatctatccacacactataaccacgacctatccacacactataaccacgacctatccacacactataaccacgacctatccacacactacaaccacgatctatccacacactacaaccacgacctatccacgcactataaccacgatctatccacacactataaccacgaactatccacacactataaccacgacctatccacacactacaaccacgatctatccaaacactataac

SEQ ID NO: 30197 - DNA, 928 bp, Artificial Sequence
  chemically treated genomic DNA (Homo sapiens) CpG-island No: 30197
gcgtcgaggtggcgggaggttgcggggagtttgcgcggttaagtattatttgtagttaggagttttcgggtagtttgtagggcgtagtttttgaaagcgagtgttgcgtgcggatcgcgggtttgtagggtgcgcgggtcgggttgggggttgtttttggagagtagagtggttttggggttcgtacgtttatttgttggcgggggatggcgaagatacgggcggttttttcgagggcggtttttacgggtggtttaggttagttcggattcgggagtgtgggagtggcgtagagttgcgggaaaaggcgcggggcgtttgcgtggcgaaggaacgtagtcgtttgatacgttcgtaaggttcgcggagttgtttttgtttcggtttttttgagttaattacggggcggggcgtgaacgtcgggcggggacgtgtcgttttggggggcgtgtttatcggcgggggcgtgtcgttttgggggcgtggttttttgtttcggtgtaggttcgtagggcgttttgggttgggagtaacgcgattgatcgtggtcgtgggcggacggcggttgtagcgcggaggagttggggtcgttgtgggtcgcgaagtagagttcgggacgtgcgcgtttggtgtacgattttgaaggggagtttcgaggggttcgggtttttagggttgttgcggttattttcggagttcggcgcggggttcgcgagatattggtttaggtcgttttagggtttcgggcgtattcggtggtcgttgttgtagcggagggagcgcggcggcgcgggggttcggagatagcgtttttttcggaagtttttttcgggtagtaggtgggaagtgggagtcggagcggtagttggtagcgtttttttcgtaggtcggtattatgcgttttgtagttttgcgcggggttttgttg

SEQ ID NO: 30198 - DNA, 928 bp, Artificial Sequence
  chemically treated genomic DNA (Homo sapiens) CpG-island No: 30198
caacaaaaccccgcgcaaaactacaaaacgcataataccgacctacgaaaaaaacgctaccaactaccgctccgactcccacttcccacctactacccgaaaaaaacttccgaaaaaaacgctatctccgaacccccgcgccgccgcgctccctccgctacaacaacgaccaccgaatacgcccgaaaccctaaaacgacctaaaccaatatctcgcgaaccccgcgccgaactccgaaaataaccgcaacaaccctaaaaacccgaacccctcgaaactccccttcaaaatcgtacaccaaacgcgcacgtcccgaactctacttcgcgacccacaacgaccccaactcctccgcgctacaaccgccgtccgcccacgaccacgatcaatcgcgttactcccaacccaaaacgccctacgaacctacaccgaaacaaaaaaccacgcccccaaaacgacacgcccccgccgataaacacgccccccaaaacgacacgtccccgcccgacgttcacgccccgccccgtaattaactcaaaaaaaccgaaacaaaaacaactccgcgaaccttacgaacgtatcaaacgactacgttccttcgccacgcaaacgccccgcgccttttcccgcaactctacgccactcccacactcccgaatccgaactaacctaaaccacccgtaaaaaccgccctcgaaaaaaccgcccgtatcttcgccatcccccgccaacaaataaacgtacgaaccccaaaaccactctactctccaaaaacaacccccaacccgacccgcgcaccctacaaacccgcgatccgcacgcaacactcgctttcaaaaactacgccctacaaactacccgaaaactcctaactacaaataatacttaaccgcgcaaactccccgcaacctcccgccacctcgacgc

SEQ ID NO: 30199 - DNA, 928 bp, Artificial Sequence
  chemically treated genomic DNA (Homo sapiens) CpG-island No: 30199
tagtagggtttcgcgtagggttgtagggcgtatggtgtcgatttgcggagagaacgttgttagttgtcgtttcggtttttattttttatttgttgttcgaggaagattttcgggagaaacgttgttttcgagttttcgcgtcgtcgcgtttttttcgttgtagtagcggttatcgggtgcgttcggagttttgggacggtttaaattagtatttcgcgggtttcgcgtcgggtttcgggaatggtcgtagtagttttggagattcgggtttttcggagtttttttttaggatcgtgtattaagcgcgtacgtttcgggttttgtttcgcgatttatagcgattttagttttttcgcgttgtagtcgtcgttcgtttacgattacggttagtcgcgttgtttttagtttagggcgttttgcgggtttgtatcggagtagagagttacgtttttaggacggtacgttttcgtcggtggatacgttttttagaacggtacgttttcgttcggcgtttacgtttcgtttcgtggttggtttagagaggtcgaggtaggagtagtttcgcgggttttgcgggcgtgttaggcggttgcgttttttcgttacgtaggcgtttcgcgttttttttcgtagttttgcgttatttttatattttcgggttcgagttaatttagattattcgtgaggatcgttttcggggggatcgttcgtgttttcgttatttttcgttagtaagtgggcgtgcgggttttagggttattttattttttagggatagtttttagttcgattcgcgtattttgtaggttcgcggttcgtacgtagtattcgtttttaaaaattgcgttttgtaagttgttcgggagtttttgattgtagatggtgtttggtcgcgtaggtttttcgtagtttttcgttatttcggcgt

SEQ ID NO: 30200 - DNA, 928 bp, Artificial Sequence
  chemically treated genomic DNA (Homo sapiens) CpG-island No: 30200
acgccgaaataacgaaaaactacgaaaaacctacgcgaccaaacaccatctacaatcaaaaactcccgaacaacttacaaaacgcaatttttaaaaacgaatactacgtacgaaccgcgaacctacaaaatacgcgaatcgaactaaaaactatccctaaaaaataaaataaccctaaaacccgcacgcccacttactaacgaaaaataacgaaaacacgaacgatccccccgaaaacgatcctcacgaataatctaaattaactcgaacccgaaaatataaaaataacgcaaaactacgaaaaaaaacgcgaaacgcctacgtaacgaaaaaacgcaaccgcctaacacgcccgcaaaacccgcgaaactactcctacctcgacctctctaaaccaaccacgaaacgaaacgtaaacgccgaacgaaaacgtaccgttctaaaaaacgtatccaccgacgaaaacgtaccgtcctaaaaacgtaactctctactccgatacaaacccgcaaaacgccctaaactaaaaacaacgcgactaaccgtaatcgtaaacgaacgacgactacaacgcgaaaaaactaaaatcgctataaatcgcgaaacaaaacccgaaacgtacgcgcttaatacacgatcctaaaaaaaaactccgaaaaacccgaatctccaaaactactacgaccattcccgaaacccgacgcgaaacccgcgaaatactaatttaaaccgtcccaaaactccgaacgcacccgataaccgctactacaacgaaaaaaacgcgacgacgcgaaaactcgaaaacaacgtttctcccgaaaatcttcctcgaacaacaaataaaaaataaaaaccgaaacgacaactaacaacgttctctccgcaaatcgacaccatacgccctacaaccctacgcgaaaccctacta

SEQ ID NO: 30201 - DNA, 2543 bp, Artificial Sequence
  chemically treated genomic DNA (Homo sapiens) CpG-island No: 30201
aacgttgcgtgaacgtatatacgtgggggagaaagttaggggaacgtatagagtaaatagaacgtaatgggaacgtataggaaagagaacgttacgggaatatatcgggggagaacgttaggagaatatattgaggagagaatttcgcgtgaatataatgcgggagaattttaggttaacgtacggagaggagaacgtttgttgaatgtacggggttggagaacgtcggtgaacgtcggtgaacgtacggggaagagaacgttacgtgaatatacgggggagacgtcgtacgaatatatagaagggagaatgtcgggtgaatatatacgggggagaacgtttacgcgaacgtatagggtagagaatttcgggtgaaggtataggagggaaacggcgcgcgaacgtttagcggggagaacgtttggtgaatgtacgggagggagaaggttaggtgaacgtatagggggaaaatgtcgcgttaaagtatacgggaaataacgtcgagtaaatatataggtgggagaacgtcgtacgaacgtatagcgtggagaacgcgacgtgaacgtatacggggaagaatattgcgcgaacgtatagtagggagaacgttatttgaaagtaaagtgaggggagaatgtcgcgttgaacgtatagtggggagaataattcgcgaatttataaaggggagaacgtagcgtgaaagtatatagcggggagaacgtttggggaacgtaaagagtaaagagaatgttttgggaacgtataggagagagaacgtaatttgaatatacggtgggggttggaggaagaacgtcgggagattatatagggaggagaacgttaggtgaacgtataagagaaaacgtttggtgaacgcgtaaagaaaggagaaagttaggtgaacgtatagggagaacgtcgtataatcgtataggtaggagaaagttatgtgaacgtataaagaaaggagaacgttgagtgaacgtatatagggtcgagaacgttaggggaacgtatatagtaaagagaatatcgagaacgtcgtgggaacgtataggagagagaacgttacgtgaatatacgagggagaacgtcgcgggaatatatagaagggcgaatgttcggcgaacgtatagaggggagaacgttaggggaatacgtacgggggagaacgttgcgcgattatatagcggggagaatatcgggtaaatatatattggggaaaatatcgcgtgaacgtatagaggggagaatttcgggtgaatatatagaggggagagtttcgtgtgaatataaagggaggagaacgtttggtgagtatatacggggagagaatatcgcgcggatttataagggggagaatgtttggtgaacgtatagcgggaggggagaacgttggtgaacgtatagcggggaaaacgttatgtgaacgtataaaggaaggagaacgttaggtgaatttatatagggggtaggaacgttagaggaaagtatatagtaaagagaaggtcgtgggaacgcgtaggggagagaacgtcgggagaatatagagggaggaaaatgttaggtgaacgtataagggggaaaacgtttggtgaacgtataaaggagaaagttaggtgaacgtataagtagtagaacgttaagtgaacgtacgaggggagaatgttgcgttaatatatacgggaaatataatcgcgcgagtacgtagtggggagaacggtacgcgaacgtttagtaagaagaacgtaagttgaacggatagcggggagaacgtcgttttaatatacgcgggaaataacgacgcgtgaatatatagtagggagaacgtcgcgtgaaagtataggggggagaacgtcgcgtgaatgtatatacgggaaataacgtcgtgtgaatatatagcggggagaacgtcgcgtgaacgtatataggggaaataacgtcgcgcgaatatatagggggaagaacgttatagggacgtatagtggggaaacgttatgtgaacgtataaagagagaacgttacgtgaattcgtatacgcggggagaacgtcggggaaacgtatatagtaaagagaacgtagtttgaacgtataggggagagaacgttacgtgaatatatagaagggagaatgtagtgcgaatatatataaggagaatatttggtgaagtatagagggagaacgtcgagcgaacgtatagggtggagaatgttatgtgaacgtataaagaaaggagaatttttggtgaacgtatataggtagaaagaatgtcgaggaacgtatagagtaaagagatcgtcgtgggaatatataggggagagaacgttacgtgaatatatggggagaacgtcgcgggaatatatagaagggcgatcgtttggtggatgtatagaggggagaacgttaggggaatatatataggggagaacgttgggcgattatatagggtggagaacgtcgggtaaatatatattggggaaaacgttgtgtaatcgtatagagggaagaacgtcgggtgaatatatagggtgcgtttttttat

SEQ ID NO: 30202 - DNA, 2543 bp, Artificial Sequence
  chemically treated genomic DNA (Homo sapiens) CpG-island No: 30202
ataaaaaaacgcaccctatatattcacccgacgttcttccctctatacgattacacaacgttttccccaatatatatttacccgacgttctccaccctatataatcgcccaacgttctcccctatatatattcccctaacgttctcccctctatacatccaccaaacgatcgcccttctatatattcccgcgacgttctccccatatattcacgtaacgttctctcccctatatattcccacgacgatctctttactctatacgttcctcgacattctttctacctatatacgttcaccaaaaattctcctttctttatacgttcacataacattctccaccctatacgttcgctcgacgttctccctctatacttcaccaaatattctccttatatatattcgcactacattctcccttctatatattcacgtaacgttctctcccctatacgttcaaactacgttctctttactatatacgtttccccgacgttctccccgcgtatacgaattcacgtaacgttctctctttatacgttcacataacgtttccccactatacgtccctataacgttcttccccctatatattcgcgcgacgttatttcccctatatacgttcacgcgacgttctccccgctatatattcacacgacgttatttcccgtatatacattcacgcgacgttctcccccctatactttcacgcgacgttctccctactatatattcacgcgtcgttatttcccgcgtatattaaaacgacgttctccccgctatccgttcaacttacgttcttcttactaaacgttcgcgtaccgttctccccactacgtactcgcgcgattatatttcccgtatatattaacgcaacattctcccctcgtacgttcacttaacgttctactacttatacgttcacctaactttctcctttatacgttcaccaaacgttttcccccttatacgttcacctaacattttcctccctctatattctcccgacgttctctcccctacgcgttcccacgaccttctctttactatatactttcctctaacgttcctaccccctatataaattcacctaacgttctccttcctttatacgttcacataacgttttccccgctatacgttcaccaacgttctcccctcccgctatacgttcaccaaacattctcccccttataaatccgcgcgatattctctccccgtatatactcaccaaacgttctcctccctttatattcacacgaaactctcccctctatatattcacccgaaattctcccctctatacgttcacgcgatattttccccaatatatatttacccgatattctccccgctatataatcgcgcaacgttctcccccgtacgtattcccctaacgttctcccctctatacgttcgccgaacattcgcccttctatatattcccgcgacgttctccctcgtatattcacgtaacgttctctctcctatacgttcccacgacgttctcgatattctctttactatatacgttcccctaacgttctcgaccctatatacgttcactcaacgttctcctttctttatacgttcacataactttctcctacctatacgattatacgacgttctccctatacgttcacctaactttctcctttctttacgcgttcaccaaacgttttctcttatacgttcacctaacgttctcctccctatataatctcccgacgttcttcctccaacccccaccgtatattcaaattacgttctctctcctatacgttcccaaaacattctctttactctttacgttccccaaacgttctccccgctatatactttcacgctacgttctcccctttataaattcgcgaattattctccccactatacgttcaacgcgacattctcccctcactttactttcaaataacgttctccctactatacgttcgcgcaatattcttccccgtatacgttcacgtcgcgttctccacgctatacgttcgtacgacgttctcccacctatatatttactcgacgttatttcccgtatactttaacgcgacattttccccctatacgttcacctaaccttctccctcccgtacattcaccaaacgttctccccgctaaacgttcgcgcgccgtttccctcctataccttcacccgaaattctctaccctatacgttcgcgtaaacgttctcccccgtatatattcacccgacattctcccttctatatattcgtacgacgtctcccccgtatattcacgtaacgttctcttccccgtacgttcaccgacgttcaccgacgttctccaaccccgtacattcaacaaacgttctcctctccgtacgttaacctaaaattctcccgcattatattcacgcgaaattctctcctcaatatattctcctaacgttctcccccgatatattcccgtaacgttctctttcctatacgttcccattacgttctatttactctatacgttcccctaactttctcccccacgtatatacgttcacgcaacgtt

SEQ ID NO: 30203 - DNA, 2543 bp, Artificial Sequence
  chemically treated genomic DNA (Homo sapiens) CpG-island No: 30203
atggaagaacgtattttgtgtgtttattcggcgtttttttttttatgcgattgtatagcgttttttttagtgtgtatttattcggcgttttttattttgtgtgatcgtttagcgtttttttttgtgtgtgtttttttggcgtttttttttttgtgtatttattaggcggtcgtttttttgtgtgttttcgcggcgttttttttatgtgtttacgtggcgtttttttttttgtgtgtttttacggcggtttttttattttgtgcgtttttcggtattttttttgtttgtgtgcgtttattaggggtttttttttttttgtgcgtttatatggtattttttattttgtgcgttcgttcggcgttttttttttgtgttttattaggtgttttttttgtgtgtgttcgtattgtatttttttttttgtgtgtttacgtggcgtttttttttttgtgcgtttaaattgcgttttttttattgtgtgcgttttttcggcgtttttttcgcgtgtgcgagtttacgtggcgttttttttttgtgcgtttatatggcgtttttttattgtgcgtttttgtgacgtttttttttttgtgtgttcgcgcggcgttattttttttgtgtgcgtttacgcggcgtttttttcgttgtgtgtttatacggcgttatttttcgtgtgtgtatttacgcggcgtttttttttttgtgtttttacgcggcgttttttttgttgtgtgtttacgcgtcgttatttttcgcgtgtgttagggcggcgtttttttcgttgttcgtttaatttacgttttttttgttgagcgttcgcgtgtcgttttttttattgcgtgttcgcgcggttgtgtttttcgtgtgtgttggcgtagtatttttttttcgtgcgtttatttggcgttttgttgtttgtgcgtttatttggtttttttttttgtgcgtttattaggcgtttttttttttgtgcgtttatttggtatttttttttttttgtgttttttcggcgtttttttttttgcgcgtttttacggttttttttttattgtgtgtttttttttggcgtttttattttttgtatgagtttatttggcgtttttttttttttgtgcgtttatatggcgtttttttcgttgtgcgtttattagcgtttttttttttcgttgtacgtttattaggtatttttttttttgtgggttcgcgcggtgtttttttttcgtgtgtgtttattaggcgtttttttttttttgtgtttatacggagtttttttttttgtgtgtttattcggggtttttttttttatgcgtttacgcggtgttttttttagtgtgtgtttattcggtgtttttttcgttgtgtgatcgcgtagcgttttttttcgtgcgtgtttttttggcgtttttttttttgtgcgttcgtcgggtattcgtttttttgtgtgttttcgcggcgttttttttcgtgtgtttacgtggcgtttttttttttgtgcgtttttacggcgttttcggtgttttttttattgtgtgcgtttttttggcgttttcggttttgtgtgcgtttatttagcgtttttttttttttgtgcgtttatatggtttttttttatttgtgcggttgtgcggcgttttttttgtgcgtttatttggtttttttttttttttgcgcgtttattaggcgtttttttttgtgcgtttatttggcgtttttttttttgtgtgatttttcgacgttttttttttagtttttatcgtgtgtttaggttgcgtttttttttttgtgcgtttttaaggtattttttttattttttgcgttttttaggcgtttttttcgttgtgtgtttttacgttgcgtttttttttttatgagttcgcgggttgttttttttattgtgcgtttaacgcggtattttttttttattttgtttttaagtggcgttttttttgttgtgcgttcgcgtagtgttttttttcgtgtgcgtttacgtcgcgttttttacgttgtgcgttcgtgcgacgtttttttatttgtgtgtttgttcggcgttatttttcgtgtgttttagcgcggtattttttttttgtgcgtttatttggttttttttttttcgtgtatttattaggcgtttttttcgttgagcgttcgcgcgtcgttttttttttgtgtttttattcggaattttttattttgtgcgttcgcgtgggcgttttttttcgtgtgtgtttattcggtatttttttttttgtgtgttcgtgcggcgtttttttcgtgtgtttacgtggcgttttttttttcgtgcgtttatcggcgtttatcggcgttttttaatttcgtgtatttagtaggcgttttttttttcgtgcgttgatttggagttttttcgtattgtgtttacgcggagttttttttttagtgtgtttttttggcgttttttttcggtgtgttttcgtggcgtttttttttttgtgcgtttttattgcgttttatttattttgtgcgtttttttggtttttttttttacgtgtgtgcgtttacgtagcgtt

SEQ ID NO: 30204 - DNA, 2543 bp, Artificial Sequence
  chemically treated genomic DNA (Homo sapiens) CpG-island No: 30204
aacgctacgtaaacgcacacacgtaaaaaaaaaaaccaaaaaaacgcacaaaataaataaaacgcaataaaaacgcacaaaaaaaaaaacgccacgaaaacacaccgaaaaaaaacgccaaaaaaacacactaaaaaaaaaactccgcgtaaacacaatacgaaaaaactccaaatcaacgcacgaaaaaaaaaacgcctactaaatacacgaaattaaaaaacgccgataaacgccgataaacgcacgaaaaaaaaaacgccacgtaaacacacgaaaaaaacgccgcacgaacacacaaaaaaaaaaataccgaataaacacacacgaaaaaaaacgcccacgcgaacgcacaaaataaaaaattccgaataaaaacacaaaaaaaaaacgacgcgcgaacgctcaacgaaaaaaacgcctaataaatacacgaaaaaaaaaaaaccaaataaacgcacaaaaaaaaaataccgcgctaaaacacacgaaaaataacgccgaacaaacacacaaataaaaaaacgtcgcacgaacgcacaacgtaaaaaacgcgacgtaaacgcacacgaaaaaaaacactacgcgaacgcacaacaaaaaaaacgccacttaaaaacaaaataaaaaaaaaataccgcgttaaacgcacaataaaaaaaacaacccgcgaactcataaaaaaaaaaacgcaacgtaaaaacacacaacgaaaaaaacgcctaaaaaacgcaaaaaataaaaaaaataccttaaaaacgcacaaaaaaaaaaacgcaacctaaacacacgataaaaactaaaaaaaaaacgtcgaaaaatcacacaaaaaaaaaaacgccaaataaacgcacaaaaaaaaacgcctaataaacgcgcaaaaaaaaaaaaaaaccaaataaacgcacaaaaaaaacgccgcacaaccgcacaaataaaaaaaaaccatataaacgcacaaaaaaaaaaaaacgctaaataaacgcacacaaaaccgaaaacgccaaaaaaacgcacacaataaaaaaaacaccgaaaacgccgtaaaaacgcacaaaaaaaaaaacgccacgtaaacacacgaaaaaaaacgccgcgaaaacacacaaaaaaacgaatacccgacgaacgcacaaaaaaaaaaacgccaaaaaaacacgcacgaaaaaaaacgctacgcgatcacacaacgaaaaaaacaccgaataaacacacactaaaaaaaacaccgcgtaaacgcataaaaaaaaaaaccccgaataaacacacaaaaaaaaaaactccgtataaacacaaaaaaaaaaaaacgcctaataaacacacacgaaaaaaaaacaccgcgcgaacccacaaaaaaaaaaatacctaataaacgtacaacgaaaaaaaaaaacgctaataaacgcacaacgaaaaaaacgccatataaacgcacaaaaaaaaaaaaacgccaaataaactcatacaaaaaataaaaacgccaaaaaaaaacacacaataaaaaaaaaaccgtaaaaacgcgcaaaaaaaaaaacgccgaaaaaacacaaaaaaaaaaaaataccaaataaacgcacaaaaaaaaaaacgcctaataaacgcacaaaaaaaaaaaccaaataaacgcacaaacaacaaaacgccaaataaacgcacgaaaaaaaaatactacgccaacacacacgaaaaacacaaccgcgcgaacacgcaataaaaaaaacgacacgcgaacgctcaacaaaaaaaacgtaaattaaacgaacaacgaaaaaaacgccgccctaacacacgcgaaaaataacgacgcgtaaacacacaacaaaaaaaacgccgcgtaaaaacacaaaaaaaaaaacgccgcgtaaatacacacacgaaaaataacgccgtataaacacacaacgaaaaaaacgccgcgtaaacgcacacaaaaaaaataacgccgcgcgaacacacaaaaaaaaaaacgtcacaaaaacgcacaataaaaaaacgccatataaacgcacaaaaaaaaaacgccacgtaaactcgcacacgcgaaaaaaacgccgaaaaaacgcacacaataaaaaaaacgcaatttaaacgcacaaaaaaaaaaacgccacgtaaacacacaaaaaaaaaaatacaatacgaacacacacaaaaaaaacacctaataaaacacaaaaaaaaaacgccgaacgaacgcacaaaataaaaaataccatataaacgcacaaaaaaaaaaaaacccctaataaacgcacacaaacaaaaaaaataccgaaaaacgcacaaaataaaaaaaccgccgtaaaaacacacaaaaaaaaaaacgccacgtaaacacataaaaaaaacgccgcgaaaacacacaaaaaaacgaccgcctaataaatacacaaaaaaaaaaacgccaaaaaaacacacacaaaaaaaaacgctaaacgatcacacaaaataaaaaacgccgaataaatacacactaaaaaaaacgctatacaatcgcataaaaaaaaaaacgccgaataaacacacaaaatacgttcttccat

SEQ ID NO: 30205 - DNA, 615 bp, Artificial Sequence
  chemically treated genomic DNA (Homo sapiens) CpG-island No: 30205
tattttgttattttgtggtttaatcggtattttttttttttatgagcgtttatttggcgtttttttcgttgtgtgcgtttaattcgcgtttttttcgttgtgtgcgtttattcggcgttcgtttatttgtgtgtatgtatcgttttgtgtacgtttattaggcgtttttttttttgtgtgcgattatttggagtttttttcgttgagtacgtttattcggtgtttttttttttgtgcgtttattgggcgttttttttattgtgcgcgtttattcggtattttgttttttgtgtgcgtttatcgggcgtttttttttttgtgtgcgtttattcggcgtttttttcgttgtgtgcgtttatttcgcgtttttttagttttgtgagtttatttaattttttttttattttgtgtatttattcggtattttttcgattgtgtgcgtttattcggcgtttttttttttgtgtgcgtttttttggcgtttttttatttgtgtgcgtttattcggcgtttttttttttatgtgcgtttatttggcgtttttttttttgtgtgtttatatggcgtttttttcgttgtgtgtgttttcgtggtattgtttttgtgtgtgtttat

SEQ ID NO: 30206 - DNA, 615 bp, Artificial Sequence
  chemically treated genomic DNA (Homo sapiens) CpG-island No: 30206
ataaacacacacaaaaacaataccacgaaaacacacacaacgaaaaaaacgccatataaacacacaaaaaaaaaaacgccaaataaacgcacataaaaaaaaaaacgccgaataaacgcacacaaataaaaaaacgccaaaaaaacgcacacaaaaaaaaaaacgccgaataaacgcacacaatcgaaaaaataccgaataaatacacaaaataaaaaaaaaattaaataaactcacaaaactaaaaaaacgcgaaataaacgcacacaacgaaaaaaacgccgaataaacgcacacaaaaaaaaaaacgcccgataaacgcacacaaaaaacaaaataccgaataaacgcgcacaataaaaaaaacgcccaataaacgcacaaaaaaaaaaacaccgaataaacgtactcaacgaaaaaaactccaaataatcgcacacaaaaaaaaaaacgcctaataaacgtacacaaaacgatacatacacacaaataaacgaacgccgaataaacgcacacaacgaaaaaaacgcgaattaaacgcacacaacgaaaaaaacgccaaataaacgctcataaaaaaaaaaaataccgattaaaccacaaaataacaaaata

SEQ ID NO: 30207 - DNA, 615 bp, Artificial Sequence
  chemically treated genomic DNA (Homo sapiens) CpG-island No: 30207
gtgaatatatataggaataatgttacgggaatatatataacggggagaacgttatgtgaatatatagaggggagaacgttaggtgaacgtatatggaggggagaacgtcgggtgaacgtatataggtgggagaacgttaggagaacgtatatagagaggagaacgtcgggtgaacgtatatagtcgggagaatgtcgggtgaatgtataaagtaaggagaaagttgggtgaatttatagagttgggagaacgcggggtgaacgtatatagcggggagaacgtcgggtgaacgtatataggggggagaacgttcggtgaacgtatatagagggtaggatgtcgggtgaacgcgtatagtggggagaacgtttagtgaacgtatagaggggagaatatcggatgaacgtatttagcggggagaattttaggtgatcgtatatagaggggagaacgtttggtgaacgtatatagggcgatgtatgtatataggtgggcgaacgtcgggtgaacgtatatagcggggagaacgcgggttgaacgtatataacggggagaacgttaggtgaacgtttatagagggggagaatgtcggttgaattatagagtaatagagta

SEQ ID NO: 30208 - DNA, 615 bp, Artificial Sequence
  chemically treated genomic DNA (Homo sapiens) CpG-island No: 30208
tactctattactctataattcaaccgacattctccccctctataaacgttcacctaacgttctccccgttatatacgttcaacccgcgttctccccgctatatacgttcacccgacgttcgcccacctatatacatacatcgccctatatacgttcaccaaacgttctcccctctatatacgatcacctaaaattctccccgctaaatacgttcatccgatattctcccctctatacgttcactaaacgttctccccactatacgcgttcacccgacatcctaccctctatatacgttcaccgaacgttctcccccctatatacgttcacccgacgttctccccgctatatacgttcaccccgcgttctcccaactctataaattcacccaactttctccttactttatacattcacccgacattctcccgactatatacgttcacccgacgttctcctctctatatacgttctcctaacgttctcccacctatatacgttcacccgacgttctcccctccatatacgttcacctaacgttctcccctctatatattcacataacgttctccccgttatatatattcccgtaacattattcctatatatattcac

SEQ ID NO: 30209 - DNA, 797 bp, Artificial Sequence
  chemically treated genomic DNA (Homo sapiens) CpG-island No: 30209
cgcggggtcgaggcgagtacgggagtgggacgcgggttttttcgtagttaacggcggggggcgcgagggttaaaagagcggtttaagtagtagtagtaagatggaggcgagtggggtttaggcgtttcggggcgttaagcggtcgtcgtcgtcgttgtttttgcgtttaggtttatagggtaggttttcgcggtcgttcgatgtagtagcgtcgttgttcgggcgcggtgggtgcgggacgtcgtcgtcgtcgtttagcggttgtttattattcgcgttttcggtgcgttgttcgttatcgtagtttttatcgtagtagtcgtttaggttttcgttcgagtcgttgttgtcggggtcgttgtttagttcggcgtcgaagtataggcgggttatgttttttttgatcgattcgtagatgggtcgttcgaggtcgtcgtatacgtagtcgttgagtagcgtcgttttgggtatagttagtatgtttttaatgacggtgcggtattcgttcgtgtagcgtagttcgttgaagattttgtcgtagtaggttaggtagcggtttatcgttaggttgtagcggttgtcgcggtcgtagcgtcgtcgggtttcggtgtagtttatgatttcgttcgcgtcggggtcgttcgcgtcgtcgtcgttcgtgcggggtaggtacggtttaatggcgcgtttggtggatttgtagttttcgttttgcgcgtagttatagttttttagggcgggttcgcggcgcgtgtggttgagttgaatgagggtcgagatgtagtgattcgggtagt

SEQ ID NO: 30210 - DNA, 797 bp, Artificial Sequence
  chemically treated genomic DNA (Homo sapiens) CpG-island No: 30210
actacccgaatcactacatctcgaccctcattcaactcaaccacacgcgccgcgaacccgccctaaaaaactataactacgcgcaaaacgaaaactacaaatccaccaaacgcgccattaaaccgtacctaccccgcacgaacgacgacgacgcgaacgaccccgacgcgaacgaaatcataaactacaccgaaacccgacgacgctacgaccgcgacaaccgctacaacctaacgataaaccgctacctaacctactacgacaaaatcttcaacgaactacgctacacgaacgaataccgcaccgtcattaaaaacatactaactatacccaaaacgacgctactcaacgactacgtatacgacgacctcgaacgacccatctacgaatcgatcaaaaaaaacataacccgcctatacttcgacgccgaactaaacaacgaccccgacaacaacgactcgaacgaaaacctaaacgactactacgataaaaactacgataacgaacaacgcaccgaaaacgcgaataataaacaaccgctaaacgacgacgacgacgtcccgcacccaccgcgcccgaacaacgacgctactacatcgaacgaccgcgaaaacctaccctataaacctaaacgcaaaaacaacgacgacgacgaccgcttaacgccccgaaacgcctaaaccccactcgcctccatcttactactactacttaaaccgctcttttaaccctcgcgccccccgccgttaactacgaaaaaacccgcgtcccactcccgtactcgcctcgaccccgcg

SEQ ID NO: 30211 - DNA, 797 bp, Artificial Sequence
  chemically treated genomic DNA (Homo sapiens) CpG-island No: 30211
gttgttcgagttattgtatttcggtttttatttagtttaattatacgcgtcgcgggttcgttttggaggattgtgattgcgcgtaggacgagaattgtaagtttattaagcgcgttattgagtcgtgtttgtttcgtacgagcggcggcggcgcgggcggtttcggcgcgggcggggttatgggttgtatcgaggttcggcggcgttgcgatcgcgatagtcgttgtaatttggcgatgagtcgttatttgatttattgcggtaaagtttttaacgggttgcgttgtacggacgaatgtcgtatcgttattgaggatatgttggttatgtttaaggcggcgttgtttaacgattgcgtgtgcgacggtttcgagcggtttatttgcgagtcggttaaggagaatatggttcgtttgtgtttcggcgtcgagttgggtaacggtttcggtagtagcggttcggacgggggtttggacgattattacgatgaggattacgatgacgagtagcgtatcgggggcgcgggtggtgagtagtcgttggacgacgacgacggcgtttcgtatttatcgcgttcgggtagcggcgttgttgtatcgggcggtcgcggggatttgttttatgggtttgggcgtaggagtagcggcggcggcggtcgtttggcgtttcggggcgtttggattttattcgtttttattttgttgttgttgtttgggtcgtttttttagttttcgcgtttttcgtcgttggttgcgggagagttcgcgttttattttcgtgttcgtttcgatttcgcg

SEQ ID NO: 30212 - DNA, 797 bp, Artificial Sequence
  chemically treated genomic DNA (Homo sapiens) CpG-island No: 30212
cgcgaaatcgaaacgaacacgaaaataaaacgcgaactctcccgcaaccaacgacgaaaaacgcgaaaactaaaaaaacgacccaaacaacaacaacaaaataaaaacgaataaaatccaaacgccccgaaacgccaaacgaccgccgccgccgctactcctacgcccaaacccataaaacaaatccccgcgaccgcccgatacaacaacgccgctacccgaacgcgataaatacgaaacgccgtcgtcgtcgtccaacgactactcaccacccgcgcccccgatacgctactcgtcatcgtaatcctcatcgtaataatcgtccaaacccccgtccgaaccgctactaccgaaaccgttacccaactcgacgccgaaacacaaacgaaccatattctccttaaccgactcgcaaataaaccgctcgaaaccgtcgcacacgcaatcgttaaacaacgccgccttaaacataaccaacatatcctcaataacgatacgacattcgtccgtacaacgcaacccgttaaaaactttaccgcaataaatcaaataacgactcatcgccaaattacaacgactatcgcgatcgcaacgccgccgaacctcgatacaacccataaccccgcccgcgccgaaaccgcccgcgccgccgccgctcgtacgaaacaaacacgactcaataacgcgcttaataaacttacaattctcgtcctacgcgcaatcacaatcctccaaaacgaacccgcgacgcgtataattaaactaaataaaaaccgaaatacaataactcgaacaac

SEQ ID NO: 30213 - DNA, 1112 bp, Artificial Sequence
  chemically treated genomic DNA (Homo sapiens) CpG-island No: 30213
atattcggttcgatttcgagcggcgtcgttttgtcgggtcgagggtcgtttttttttgtttttacggttttggtggtgacgttgttagtgttgttgatcgtcgttatttttttgtggaatttgttggtttcggttattatttcgcgggttcgtgttttttatcgcgtgtcgtataatttggtggtttcgacggtcgtttcggacgaattagtggtagcgttggcgatgttatcgagtttggcgagtgagttgtcgatcgggcgacgtcggttgttgggtcggagtttgtgttacgtgtagatttttttcgacgtcggagtttgtgttacgtgtggatttttttttacggttgtgttgtttcgtcggtttcgggaacgtggcggttatcgttttgggtcgcgacggggttattatacggtatttgtagtatacgttgcgtattcgtagtcgcgtttcgttgtttatgatcgcgtttattcgggtgtcgtcggcgtttatcgttttcgcgtcgttgttttttggtcggggcgaggtgtgcgacgttcggttttagcgttgttaggtgagtcgggaatttttttatgtcgttttttttattcgcggcgttttttatttgtcgtttggcgtggtgtcgtttgtttatcggaagatttacgaggcggttaagtttcgtttcggtcgtcgtcggagagttgtgttgtcgttgtcggttattatgtaggtgaggggtgggttgaggaacgttgttttggggaagcggttgttagagaaggaggcggtttcgcgaatgggagagtgggcggaagtttgtattaatggagcgcgcgtttagagattatttggggcgtacgaggataagtttgttattagtttttttgaagcgggtatcgaggggtttgttatcggtttatttggtacgtaagtgaggggttcgttagttgcgtatttggtgcgcgtagaggaaagggttttataatttgtacgttagggaggtagatttgatatcgatttacgacgtacgatatggtcggaggggtttgtaggtttagttcgttttagtagcgatgagggtatattttgttatttgtattatttgttgtttttttttttaa

SEQ ID NO: 30214 - DNA, 1112 bp, Artificial Sequence
  chemically treated genomic DNA (Homo sapiens) CpG-island No: 30214
ttaaaaaaaaaaacaacaaataatacaaataacaaaatataccctcatcgctactaaaacgaactaaacctacaaacccctccgaccatatcgtacgtcgtaaatcgatatcaaatctacctccctaacgtacaaattataaaaccctttcctctacgcgcaccaaatacgcaactaacgaacccctcacttacgtaccaaataaaccgataacaaacccctcgatacccgcttcaaaaaaactaataacaaacttatcctcgtacgccccaaataatctctaaacgcgcgctccattaatacaaacttccgcccactctcccattcgcgaaaccgcctccttctctaacaaccgcttccccaaaacaacgttcctcaacccacccctcacctacataataaccgacaacgacaacacaactctccgacgacgaccgaaacgaaacttaaccgcctcgtaaatcttccgataaacaaacgacaccacgccaaacgacaaataaaaaacgccgcgaataaaaaaaacgacataaaaaaattcccgactcacctaacaacgctaaaaccgaacgtcgcacacctcgccccgaccaaaaaacaacgacgcgaaaacgataaacgccgacgacacccgaataaacgcgatcataaacaacgaaacgcgactacgaatacgcaacgtatactacaaataccgtataataaccccgtcgcgacccaaaacgataaccgccacgttcccgaaaccgacgaaacaacacaaccgtaaaaaaaaatccacacgtaacacaaactccgacgtcgaaaaaaatctacacgtaacacaaactccgacccaacaaccgacgtcgcccgatcgacaactcactcgccaaactcgataacatcgccaacgctaccactaattcgtccgaaacgaccgtcgaaaccaccaaattatacgacacgcgataaaaaacacgaacccgcgaaataataaccgaaaccaacaaattccacaaaaaaataacgacgatcaacaacactaacaacgtcaccaccaaaaccgtaaaaacaaaaaaaaacgaccctcgacccgacaaaacgacgccgctcgaaatcgaaccgaatat

SEQ ID NO: 30215 - DNA, 1112 bp, Artificial Sequence
  chemically treated genomic DNA (Homo sapiens) CpG-island No: 30215
ttgagggggaaaataatagatagtgtaggtaataagatgtgtttttatcgttattgagacgggttgaatttataagttttttcggttatatcgtgcgtcgtgggtcggtgttagatttgtttttttaacgtgtagattgtgaaatttttttttttgcgcgtattaagtacgtagttggcgaattttttatttgcgtgttaggtgagtcggtgataagtttttcggtgttcgttttagaagaattgatggtaaatttgttttcgtgcgttttaggtgatttttgggcgcgcgttttattagtataagttttcgtttatttttttattcgcgaagtcgtttttttttttagtaatcgtttttttaaagtaacgttttttagtttattttttatttgtatggtggtcggtaacggtagtatagtttttcggcggcggtcgaaacgaaatttggtcgtttcgtagatttttcggtagataaacggtattacgttaagcggtaggtggaaggcgtcgcgggtggagaaggcggtataggagggttttcggtttatttggtagcgttggagtcgagcgtcgtatatttcgtttcggttaaagagtagcggcgcgagggcgatgagcgtcgacggtattcgggtgagcgcgattatgagtaacgaggcgcggttgcgggtgcgtagcgtgtgttgtaggtgtcgtgtgatggtttcgtcgcggtttagggcgatggtcgttacgttttcgaggtcggcggggtagtatagtcgtggaaggagatttatacgtggtataggtttcggcgtcgagggagatttatacgtggtataggtttcggtttagtagtcgacgtcgttcggtcgatagtttattcgttaggttcggtggtatcgttagcgttgttattagttcgttcgagacggtcgtcgaggttattaagttatgcggtacgcggtggaaggtacggattcgcgggatggtgatcggaattagtaggttttataggaaagtggcggcgattagtagtattagtagcgttattattaggatcgtgaagatagagaagggcggttttcggttcggtaggacggcgtcgttcggggtcgaatcgagtat

SEQ ID NO: 30216 - DNA, 1112 bp, Artificial Sequence
  chemically treated genomic DNA (Homo sapiens) CpG-island No: 30216
atactcgattcgaccccgaacgacgccgtcctaccgaaccgaaaaccgcccttctctatcttcacgatcctaataataacgctactaatactactaatcgccgccactttcctataaaacctactaattccgatcaccatcccgcgaatccgtaccttccaccgcgtaccgcataacttaataacctcgacgaccgtctcgaacgaactaataacaacgctaacgataccaccgaacctaacgaataaactatcgaccgaacgacgtcgactactaaaccgaaacctataccacgtataaatctccctcgacgccgaaacctataccacgtataaatctccttccacgactatactaccccgccgacctcgaaaacgtaacgaccatcgccctaaaccgcgacgaaaccatcacacgacacctacaacacacgctacgcacccgcaaccgcgcctcgttactcataatcgcgctcacccgaataccgtcgacgctcatcgccctcgcgccgctactctttaaccgaaacgaaatatacgacgctcgactccaacgctaccaaataaaccgaaaaccctcctataccgccttctccacccgcgacgccttccacctaccgcttaacgtaataccgtttatctaccgaaaaatctacgaaacgaccaaatttcgtttcgaccgccgccgaaaaactatactaccgttaccgaccaccatacaaataaaaaataaactaaaaaacgttactttaaaaaaacgattactaaaaaaaaaaacgacttcgcgaataaaaaaataaacgaaaacttatactaataaaacgcgcgcccaaaaatcacctaaaacgcacgaaaacaaatttaccatcaattcttctaaaacgaacaccgaaaaacttatcaccgactcacctaacacgcaaataaaaaattcgccaactacgtacttaatacgcgcaaaaaaaaaaatttcacaatctacacgttaaaaaaacaaatctaacaccgacccacgacgcacgatataaccgaaaaaacttataaattcaacccgtctcaataacgataaaaacacatcttattacctacactatctattattttccccctcaa

SEQ ID NO: 30217 - DNA, 890 bp, Artificial Sequence
  chemically treated genomic DNA (Homo sapiens) CpG-island No: 30217
cgcggggcggggagggggcgtggttcggggggtagggcggtgtgacgcgcgcgtcgcggatttcggaagcggtgttagatgttggggagtcgggcgggcgggtgcggtggcggcgggcggcgcgggggtatttgttgtttttcgcgaagtcggagttcgagcgttaggcggcggcggcggtcgaggggagcgcgatagtgagcgtcggcgcgaggatagcgcgtgttcgcgaggagtcgtcgcgcgttcgcgtttttcgcgcgacgttaggtgaggggcggtggggtagcggggttcgggtcgcggcggggacggggatcggggcgcggggtcggggttatttggtcgttgagttacggtcgtttgggggcgcgggtcgagggtggcggggttgggtgcgcggggttcgagatttttatgcggttcgcggcgcggttcgggtatttgtttaggtgggtttcgtttcgtaggttcgggggttttttcgggacgcgaggtttttttttttgtacgtgtcgttcgggttatgtttgtcgcgtcgggggttttagggcgcggattttagatttgggaggacgaggatttacgcgggtcggcggcgcgtatcgggttcgcgtttttatatttgcggggggcggggcggggcgggcgttacgtgcgggcggtgcggggagggcgcgggcgcgtggatttttcgcggttttcgttttagcgtggttttcgcgtgcggtttcggattgtttttcgcgttttttttcggtgacgggcggcgttttggtttagtggttggggttacgcgtgttcgggaacggggtgggggtaatcgggtttttttataggcgggattttgggattggtgtcgtttttagtcgtttatttgttagggttgt

SEQ ID NO: 30218 - DNA, 890 bp, Artificial Sequence
  chemically treated genomic DNA (Homo sapiens) CpG-island No: 30218
acaaccctaacaaataaacgactaaaaacgacaccaatcccaaaatcccgcctataaaaaaacccgattacccccaccccgttcccgaacacgcgtaaccccaaccactaaaccaaaacgccgcccgtcaccgaaaaaaaacgcgaaaaacaatccgaaaccgcacgcgaaaaccacgctaaaacgaaaaccgcgaaaaatccacgcgcccgcgccctccccgcaccgcccgcacgtaacgcccgccccgccccgccccccgcaaatataaaaacgcgaacccgatacgcgccgccgacccgcgtaaatcctcgtcctcccaaatctaaaatccgcgccctaaaacccccgacgcgacaaacataacccgaacgacacgtacaaaaaaaaaaacctcgcgtcccgaaaaaacccccgaacctacgaaacgaaacccacctaaacaaatacccgaaccgcgccgcgaaccgcataaaaatctcgaaccccgcgcacccaaccccgccaccctcgacccgcgcccccaaacgaccgtaactcaacgaccaaataaccccgaccccgcgccccgatccccgtccccgccgcgacccgaaccccgctaccccaccgcccctcacctaacgtcgcgcgaaaaacgcgaacgcgcgacgactcctcgcgaacacgcgctatcctcgcgccgacgctcactatcgcgctcccctcgaccgccgccgccgcctaacgctcgaactccgacttcgcgaaaaacaacaaatacccccgcgccgcccgccgccaccgcacccgcccgcccgactccccaacatctaacaccgcttccgaaatccgcgacgcgcgcgtcacaccgccctaccccccgaaccacgccccctccccgccccgcg

SEQ ID NO: 30219 - DNA, 890 bp, Artificial Sequence
  chemically treated genomic DNA (Homo sapiens) CpG-island No: 30219
gtaattttggtaggtgggcggttgagagcgatattagttttaggatttcgtttgtggggagattcggttatttttatttcgttttcgggtacgcgtgattttagttattgggttagagcgtcgttcgttatcgggaggaagcgcggggggtagttcggggtcgtacgcggaagttacgttggggcggaagtcgcggagaatttacgcgttcgcgtttttttcgtatcgttcgtacgtggcgttcgtttcgtttcgtttttcgtaggtgtgaaggcgcgggttcgatgcgcgtcgtcgattcgcgtggattttcgtttttttaggtttggggttcgcgttttggggttttcggcgcggtaagtatggttcgggcggtacgtgtaggggagagagtttcgcgtttcggggaagttttcgggtttgcggggcggggtttatttgggtaggtgttcgggtcgcgtcgcgggtcgtatgagggtttcgggtttcgcgtatttaatttcgttattttcggttcgcgtttttaggcggtcgtgatttagcggttaggtagtttcggtttcgcgtttcggttttcgttttcgtcgcggttcgggtttcgttgttttatcgttttttatttggcgtcgcgcggagggcgcgggcgcgcggcggtttttcgcgggtacgcgttgttttcgcgtcggcgtttattgtcgcgtttttttcggtcgtcgtcgtcgtttggcgttcgggtttcgatttcgcgaagaataataagtgttttcgcgtcgttcgtcgttatcgtattcgttcgttcggttttttagtatttgatatcgttttcgggattcgcggcgcgcgcgttatatcgttttgtttttcgggttacgtttttttttcgtttcgcg

SEQ ID NO: 30220 - DNA, 890 bp, Artificial Sequence
  chemically treated genomic DNA (Homo sapiens) CpG-island No: 30220
cgcgaaacgaaaaaaaaacgtaacccgaaaaacaaaacgatataacgcgcgcgccgcgaatcccgaaaacgatatcaaatactaaaaaaccgaacgaacgaatacgataacgacgaacgacgcgaaaacacttattattcttcgcgaaatcgaaacccgaacgccaaacgacgacgacgaccgaaaaaaacgcgacaataaacgccgacgcgaaaacaacgcgtacccgcgaaaaaccgccgcgcgcccgcgccctccgcgcgacgccaaataaaaaacgataaaacaacgaaacccgaaccgcgacgaaaacgaaaaccgaaacgcgaaaccgaaactacctaaccgctaaatcacgaccgcctaaaaacgcgaaccgaaaataacgaaattaaatacgcgaaacccgaaaccctcatacgacccgcgacgcgacccgaacacctacccaaataaaccccgccccgcaaacccgaaaacttccccgaaacgcgaaactctctcccctacacgtaccgcccgaaccatacttaccgcgccgaaaaccccaaaacgcgaaccccaaacctaaaaaaacgaaaatccacgcgaatcgacgacgcgcatcgaacccgcgccttcacacctacgaaaaacgaaacgaaacgaacgccacgtacgaacgatacgaaaaaaacgcgaacgcgtaaattctccgcgacttccgccccaacgtaacttccgcgtacgaccccgaactaccccccgcgcttcctcccgataacgaacgacgctctaacccaataactaaaatcacgcgtacccgaaaacgaaataaaaataaccgaatctccccacaaacgaaatcctaaaactaatatcgctctcaaccgcccacctaccaaaattac

SEQ ID NO: 30221 - DNA, 555 bp, Artificial Sequence
  chemically treated genomic DNA (Homo sapiens) CpG-island No: 30221
gagaacgtttcggtgtttagcgatgatgagttggtgtttatgtcggtgcgggagttgaattagtatttgcggggttttattaaggaggaggtgattcgtttgaagtagcgtcggcgtatatttaagaatcgcggttacgcggttagttgtcgtattaagcgggtgacgtagaaggaggagttggagcggtagcgcgtggagttgtagtaggaggtggagaagttggcgcgtgagaatagtagtatgcggttggagttggacgttttgcgttttaagtacgaggcgttgtagattttcgcgcgtatcgtggttcggggatttgtggcgttttttaaggtggttattattagcgttattattatcgttaagtttatcgagtttttttttattttcgtgtttttttcggttgtattttagtgtcggtcgggggcggggggtggcgggcggcgggcggcgggtaggcgggtgggggtatatttttcgtatttgttattgggatgtagattttcgatattcgagtttaagcgtaggtttttcgggcgtaggtagtttata

SEQ ID NO: 30222 - DNA, 555 bp, Artificial Sequence
  chemically treated genomic DNA (Homo sapiens) CpG-island No: 30222
tataaactacctacgcccgaaaaacctacgcttaaactcgaatatcgaaaatctacatcccaataacaaatacgaaaaatatacccccacccgcctacccgccgcccgccgcccgccaccccccgcccccgaccgacactaaaatacaaccgaaaaaaacacgaaaataaaaaaaaactcgataaacttaacgataataataacgctaataataaccaccttaaaaaacgccacaaatccccgaaccacgatacgcgcgaaaatctacaacgcctcgtacttaaaacgcaaaacgtccaactccaaccgcatactactattctcacgcgccaacttctccacctcctactacaactccacgcgctaccgctccaactcctccttctacgtcacccgcttaatacgacaactaaccgcgtaaccgcgattcttaaatatacgccgacgctacttcaaacgaatcacctcctccttaataaaaccccgcaaatactaattcaactcccgcaccgacataaacaccaactcatcatcgctaaacaccgaaacgttctc

SEQ ID NO: 30223 - DNA, 555 bp, Artificial Sequence
  chemically treated genomic DNA (Homo sapiens) CpG-island No: 30223
tgtgagttgtttgcgttcgaggggtttgcgtttggattcggatgtcgagagtttgtattttagtgataggtacgaggggtgtgtttttattcgtttgttcgtcgttcgtcgttcgttatttttcgttttcggtcggtattaggatgtagtcgagaagggtacggaggtggaggagagttcggtggatttgacgatggtgatgacgttggtggtggttattttggagggcgttataggttttcgggttacggtgcgcgcgaaggtttgtagcgtttcgtatttggagcgtagggcgtttagttttagtcgtatgttgttgtttttacgcgttagtttttttattttttgttgtagttttacgcgttgtcgttttagtttttttttttgcgttattcgtttgatgcggtagttggtcgcgtagtcgcggtttttgagtgtgcgtcgacgttgttttaggcgggttattttttttttggtgagatttcgtaggtgttggtttagttttcgtatcgatatggatattagtttattatcgttgagtatcggggcgttttt

SEQ ID NO: 30224 - DNA, 555 bp, Artificial Sequence
  chemically treated genomic DNA (Homo sapiens) CpG-island No: 30224
aaaaacgccccgatactcaacgataataaactaatatccatatcgatacgaaaactaaaccaacacctacgaaatctcaccaaaaaaaaaataacccgcctaaaacaacgtcgacgcacactcaaaaaccgcgactacgcgaccaactaccgcatcaaacgaataacgcaaaaaaaaaaactaaaacgacaacgcgtaaaactacaacaaaaaataaaaaaactaacgcgtaaaaacaacaacatacgactaaaactaaacgccctacgctccaaatacgaaacgctacaaaccttcgcgcgcaccgtaacccgaaaacctataacgccctccaaaataaccaccaccaacgtcatcaccatcgtcaaatccaccgaactctcctccacctccgtacccttctcgactacatcctaataccgaccgaaaacgaaaaataacgaacgacgaacgacgaacaaacgaataaaaacacacccctcgtacctatcactaaaatacaaactctcgacatccgaatccaaacgcaaacccctcgaacgcaaacaactcaca

SEQ ID NO: 30225 - DNA, 576 bp, Artificial Sequence
  chemically treated genomic DNA (Homo sapiens) CpG-island No: 30225
ttgttaggtcgggtagtggtttttcgtttttcggtttcgtcgtcgtttcggttttgtagtcgcggttcgggatttttacgatacgcggtgtcgaggtcggtcgggttattggggacgtagtcgttcggggaagttcgcgggtattcgcgtttattaagtcggcgtcgcgttcggaagtggttttgcgtgcgttacgcgggttcgtttcgttcgcgggtttcgtttatttttcggaagttagggtcgcggcgtttttggtttcggagatttggggttttcgggtttttgagcggttcgggtttcgcgttgtcggtagggtttgggggcgttttagagtcgaatttcgtttttttaggaaagggcgttgcgattattttcgtttcgggttttagtttttttgttgtagattttcgggatcgtcgttggtaggagttttgtttttcgtgtttgtgtttaggattttcgaagcgtcgcgtttaggaattttttagcgttgggagttcggttttgttcgattacgggttttgggttggaggcgttatcgtcgttatagcgaacgtttatttggtatcgagt

SEQ ID NO: 30226 - DNA, 576 bp, Artificial Sequence
  chemically treated genomic DNA (Homo sapiens) CpG-island No: 30226
actcgataccaaataaacgttcgctataacgacgataacgcctccaacccaaaacccgtaatcgaacaaaaccgaactcccaacgctaaaaaattcctaaacgcgacgcttcgaaaatcctaaacacaaacacgaaaaacaaaactcctaccaacgacgatcccgaaaatctacaacaaaaaaactaaaacccgaaacgaaaataatcgcaacgccctttcctaaaaaaacgaaattcgactctaaaacgcccccaaaccctaccgacaacgcgaaacccgaaccgctcaaaaacccgaaaaccccaaatctccgaaaccaaaaacgccgcgaccctaacttccgaaaaataaacgaaacccgcgaacgaaacgaacccgcgtaacgcacgcaaaaccacttccgaacgcgacgccgacttaataaacgcgaatacccgcgaacttccccgaacgactacgtccccaataacccgaccgacctcgacaccgcgtatcgtaaaaatcccgaaccgcgactacaaaaccgaaacgacgacgaaaccgaaaaacgaaaaaccactacccgacctaacaa

SEQ ID NO: 30227 - DNA, 576 bp, Artificial Sequence
  chemically treated genomic DNA (Homo sapiens) CpG-island No: 30227
attcggtgttaaataagcgttcgttgtggcgacgatgacgtttttagtttaaagttcgtggtcgagtagggtcgggtttttagcgttagggggtttttaggcgcggcgtttcgggggttttggatatagatacgggggatagagtttttattagcgacgatttcgagggtttgtagtagaggggttgaggttcgggacgggggtggtcgtagcgtttttttttgaaaaaacggggttcggttttaaggcgtttttaagttttgtcggtagcgcggaattcgagtcgtttagaagttcgggagttttaagttttcgggattagaagcgtcgcggttttgattttcggaaggtggacggaattcgcggacggggcgggttcgcgtggcgtacgtagagttattttcgggcgcggcgtcggtttggtgagcgcgggtattcgcgggttttttcgggcggttgcgtttttagtagttcggtcggtttcggtatcgcgtgtcgtgggggtttcgggtcgcggttgtagggtcggggcggcggcgaggtcgaggggcgggaagttattgttcggtttggtag

SEQ ID NO: 30228 - DNA, 576 bp, Artificial Sequence
  chemically treated genomic DNA (Homo sapiens) CpG-island No: 30228
ctaccaaaccgaacaataacttcccgcccctcgacctcgccgccgccccgaccctacaaccgcgacccgaaacccccacgacacgcgataccgaaaccgaccgaactactaaaaacgcaaccgcccgaaaaaacccgcgaatacccgcgctcaccaaaccgacgccgcgcccgaaaataactctacgtacgccacgcgaacccgccccgtccgcgaattccgtccaccttccgaaaatcaaaaccgcgacgcttctaatcccgaaaacttaaaactcccgaacttctaaacgactcgaattccgcgctaccgacaaaacttaaaaacgccttaaaaccgaaccccgttttttcaaaaaaaaacgctacgaccacccccgtcccgaacctcaacccctctactacaaaccctcgaaatcgtcgctaataaaaactctatcccccgtatctatatccaaaacccccgaaacgccgcgcctaaaaaccccctaacgctaaaaacccgaccctactcgaccacgaactttaaactaaaaacgtcatcgtcgccacaacgaacgcttatttaacaccgaat

SEQ ID NO: 30229 - DNA, 901 bp, Artificial Sequence
  chemically treated genomic DNA (Homo sapiens) CpG-island No: 30229
gtcgcggcgttgggtcggcgtatcgtggtgggtttggttcggtttattttgtttcgtttttcgcggttttcggcggttgcggcgttatttgcggaggagttagcgtgcggttatttttttatttattcgttcgttcgttcgtttattcgtttttttgtcgtacggggtttgggtttgggattcggggatagtggtttcgcgttcgttcggcggggcgatgttgtaggagttgtagggatttcgttttttagtcgttcgggagcggtttagtcgggcggtagtaggcgacgcggacgtcgggttggaggcggtagaattagaagggacggtttagaggtcgggagcggtagtcgggagaattaggcgttcgttcggtaatgaggaagcgtttaggtcgcggtttatttatttttggtttatcgcgatcggagcgtcgtcgtcgttattcggttatttcggaatcggaaatcgattttatcgttttcgaggattcgattttcggaataatcggaaggaaaatagtgcggcgggaagcgggtttagaaggaggcgcgagaggttcgcggcgtcggtttgatgtttgtagcgttttatggcggcgggaggcgggttggtcggcgtcgcgcgtatgtggttcggtttaggtgggtcggcggcgcggggtaggcgttggtttttttatttataggtggtgttggcgttgcgaagggacgtattttaggacgtacggcggggaggagtggcgttagggattcgcggatgagttaagtggtaggttttgtacgtttcggagagcgggggcggtcggggcgtaggtattggcgagggggcgtagttcggggggttttcggggagagattttgttttaaataataataataataataataatagttttatt

SEQ ID NO: 30230 - DNA, 901 bp, Artificial Sequence
  chemically treated genomic DNA (Homo sapiens) CpG-island No: 30230
aataaaactattattattattattattattatttaaaacaaaatctctccccgaaaaccccccgaactacgccccctcgccaatacctacgccccgaccgcccccgctctccgaaacgtacaaaacctaccacttaactcatccgcgaatccctaacgccactcctccccgccgtacgtcctaaaatacgtcccttcgcaacgccaacaccacctataaataaaaaaaccaacgcctaccccgcgccgccgacccacctaaaccgaaccacatacgcgcgacgccgaccaacccgcctcccgccgccataaaacgctacaaacatcaaaccgacgccgcgaacctctcgcgcctccttctaaacccgcttcccgccgcactattttccttccgattattccgaaaatcgaatcctcgaaaacgataaaatcgatttccgattccgaaataaccgaataacgacgacgacgctccgatcgcgataaaccaaaaataaataaaccgcgacctaaacgcttcctcattaccgaacgaacgcctaattctcccgactaccgctcccgacctctaaaccgtcccttctaattctaccgcctccaacccgacgtccgcgtcgcctactaccgcccgactaaaccgctcccgaacgactaaaaaacgaaatccctacaactcctacaacatcgccccgccgaacgaacgcgaaaccactatccccgaatcccaaacccaaaccccgtacgacaaaaaaacgaataaacgaacgaacgaacgaataaataaaaaaataaccgcacgctaactcctccgcaaataacgccgcaaccgccgaaaaccgcgaaaaacgaaacaaaataaaccgaaccaaacccaccacgatacgccgacccaacgccgcgac

SEQ ID NO: 30231 - DNA, 901 bp, Artificial Sequence
  chemically treated genomic DNA (Homo sapiens) CpG-island No: 30231
aataaagttattattattattattattattatttgagatagggttttttttcgggagtttttcgggttgcgttttttcgttagtgtttgcgtttcggtcgttttcgtttttcgggacgtgtagaatttgttatttgatttattcgcggatttttgacgttattttttttcgtcgtgcgttttggagtgcgttttttcgtaacgttagtattatttgtgaatggagaggttagcgtttgtttcgcgtcgtcgatttatttggatcggattatatgcgcgcggcgtcggttagttcgtttttcgtcgttatggggcgttgtaggtattaggtcggcgtcgcgggtttttcgcgtttttttttgggttcgtttttcgtcgtattgtttttttttcggttgtttcggaagtcgggttttcgagggcggtgagatcggttttcgatttcggggtggtcgggtggcggcggcggcgtttcggtcgcgatgggttagaggtaagtgagtcgcggtttgggcgtttttttattgtcgggcgagcgtttggttttttcggttatcgttttcggtttttgggtcgttttttttggttttgtcgtttttagttcggcgttcgcgtcgtttgttgtcgttcgattgagtcgttttcgggcggttgggaggcggggtttttgtagtttttgtagtatcgtttcgtcgggcgggcgcgggattattgttttcgggttttaggtttaagtttcgtgcggtaagggagcgaatgagcgagcgaacgagcgaatgagtgaaggaatgatcgtacgttggttttttcgtaggtgacgtcgtagtcgtcgggagtcgcgagggacggggtaggatgaatcgggttaagtttattacggtgcgtcggtttagcgtcgcggt

SEQ ID NO: 30232 - DNA, 901 bp, Artificial Sequence
  chemically treated genomic DNA (Homo sapiens) CpG-island No: 30232
accgcgacgctaaaccgacgcaccgtaataaacttaacccgattcatcctaccccgtccctcgcgactcccgacgactacgacgtcacctacgaaaaaaccaacgtacgatcattccttcactcattcgctcgttcgctcgctcattcgctcccttaccgcacgaaacttaaacctaaaacccgaaaacaataatcccgcgcccgcccgacgaaacgatactacaaaaactacaaaaaccccgcctcccaaccgcccgaaaacgactcaatcgaacgacaacaaacgacgcgaacgccgaactaaaaacgacaaaaccaaaaaaaacgacccaaaaaccgaaaacgataaccgaaaaaaccaaacgctcgcccgacaataaaaaaacgcccaaaccgcgactcacttacctctaacccatcgcgaccgaaacgccgccgccgccacccgaccaccccgaaatcgaaaaccgatctcaccgccctcgaaaacccgacttccgaaacaaccgaaaaaaaaacaatacgacgaaaaacgaacccaaaaaaaaacgcgaaaaacccgcgacgccgacctaatacctacaacgccccataacgacgaaaaacgaactaaccgacgccgcgcgcatataatccgatccaaataaatcgacgacgcgaaacaaacgctaacctctccattcacaaataatactaacgttacgaaaaaacgcactccaaaacgcacgacgaaaaaaaataacgtcaaaaatccgcgaataaatcaaataacaaattctacacgtcccgaaaaacgaaaacgaccgaaacgcaaacactaacgaaaaaacgcaacccgaaaaactcccgaaaaaaaaccctatctcaaataataataataataataataataactttatt

SEQ ID NO: 30233 - DNA, 673 bp, Artificial Sequence
  chemically treated genomic DNA (Homo sapiens) CpG-island No: 30233
ttggatttcgtttgtaggttgattttcgagttatacgttagagtacggcgatttttaaggtcgtagttcggtttcgtaaggtatttttttttaacgcgtcggtcgaattcgcgcgttcgcgagtagtcggattatattttttaggaagttgtgcgtcgtttagttgttttgtttttggtcgcgaaggattatattattcggtgatattttgcgggaggcggttgttagattttaagcgtataattattggtttagcgtttggcggggagttgtacggtgattggtttaggagttcgttagtttcgttcgagtttagtagagttttgttgttaagattgcgcgaggagttagagagagcggagagcgttgagtcgggtcgtattcgtcgagtcgtgtgagtaatttttattttcgtttttttcgtcgttttttcggggattagtattttcgttttttagggtggtcgggagggagtatacgtattcgggcgtttacgagagggcggggattgtgtatatacgtgttatattagattagagaagtatttttagggatatcggcggtcgagtttcgcgtacgtttttgagtatttgagttttagggcgttttttcggatttaaggagaaaaaatatatttcgaggtatacgtggatatttaggtatttatacgggg

SEQ ID NO: 30234 - DNA, 673 bp, Artificial Sequence
  chemically treated genomic DNA (Homo sapiens) CpG-island No: 30234
ccccgtataaatacctaaatatccacgtatacctcgaaatatattttttctccttaaatccgaaaaaacgccctaaaactcaaatactcaaaaacgtacgcgaaactcgaccgccgatatccctaaaaatacttctctaatctaatataacacgtatatacacaatccccgccctctcgtaaacgcccgaatacgtatactccctcccgaccaccctaaaaaacgaaaatactaatccccgaaaaaacgacgaaaaaaacgaaaataaaaattactcacacgactcgacgaatacgacccgactcaacgctctccgctctctctaactcctcgcgcaatcttaacaacaaaactctactaaactcgaacgaaactaacgaactcctaaaccaatcaccgtacaactccccgccaaacgctaaaccaataattatacgcttaaaatctaacaaccgcctcccgcaaaatatcaccgaataatataatccttcgcgaccaaaaacaaaacaactaaacgacgcacaacttcctaaaaaatataatccgactactcgcgaacgcgcgaattcgaccgacgcgttaaaaaaaaataccttacgaaaccgaactacgaccttaaaaatcgccgtactctaacgtataactcgaaaatcaacctacaaacgaaatccaa

SEQ ID NO: 30235 - DNA, 673 bp, Artificial Sequence
  chemically treated genomic DNA (Homo sapiens) CpG-island No: 30235
tttcgtgtgggtatttaggtgtttacgtgtgtttcggggtgtgttttttttttttgagttcgaggggacgttttggagtttaggtgtttaagggcgtgcgcggggttcggtcgtcggtgtttttggagatgtttttttggtttggtgtgatacgtgtgtatatagttttcgttttttcgtgagcgttcgggtgcgtgtgttttttttcgattattttgaggagcgagggtgttggttttcgagagggcggcgagaaggacggaggtagaggttatttatacggttcggcgggtgcggttcggtttagcgtttttcgttttttttagtttttcgcgtagttttaatagtaaaattttattgagttcggacgaaattggcgggtttttgggttaattatcgtgtagtttttcgttagacgttggattaatggttgtgcgtttgaggtttggtaatcgtttttcgtaagatattatcgggtaatgtagtttttcgcgattaagggtaggatagttggacggcgtatagttttttgggagatgtagttcggttgttcgcgggcgcgcgagttcgatcgacgcgttagaaggaggtgttttgcgaagtcgggttgcgattttaggggtcgtcgtgttttggcgtgtgattcgaaagttagtttgtaggcggggtttaa

SEQ ID NO: 30236 - DNA, 673 bp, Artificial Sequence
  chemically treated genomic DNA (Homo sapiens) CpG-island No: 30236
ttaaaccccgcctacaaactaactttcgaatcacacgccaaaacacgacgacccctaaaatcgcaacccgacttcgcaaaacacctccttctaacgcgtcgatcgaactcgcgcgcccgcgaacaaccgaactacatctcccaaaaaactatacgccgtccaactatcctacccttaatcgcgaaaaactacattacccgataatatcttacgaaaaacgattaccaaacctcaaacgcacaaccattaatccaacgtctaacgaaaaactacacgataattaacccaaaaacccgccaatttcgtccgaactcaataaaattttactattaaaactacgcgaaaaactaaaaaaaacgaaaaacgctaaaccgaaccgcacccgccgaaccgtataaataacctctacctccgtccttctcgccgccctctcgaaaaccaacaccctcgctcctcaaaataatcgaaaaaaaacacacgcacccgaacgctcacgaaaaaacgaaaactatatacacacgtatcacaccaaaccaaaaaaacatctccaaaaacaccgacgaccgaaccccgcgcacgcccttaaacacctaaactccaaaacgtcccctcgaactcaaaaaaaaaaaacacaccccgaaacacacgtaaacacctaaatacccacacgaaa

SEQ ID NO: 30237 - DNA, 1101 bp, Artificial Sequence
  chemically treated genomic DNA (Homo sapiens) CpG-island No: 30237
ttattgttcggcgcgttcgaggcgaagtttttttcgttagggataggcgtgggggtcgtagtcggggttattcgggtgtagcggggcggtttttgcgcgggcgcggaacgaacgtgcgtaagggaatagtcgcgtttagagtcgttcgtagcgggttcggtgggcgtgacgttatgacgtatagtacgcgggcggcgcgttggggcggggcggtcgggggcgggaggaagaagtgggaggaggaggaggggaaagcgggggttgcgggagggggaggtggtagttgcggcgttggttttcgggagtagtcgtcgagttataattgcggaggaggagttcgggaaagcggtcgtcgggatttttttttttcgtcgttttcgtttcggttgagaggcgtttcggcgtatcggagggattttttttcgcgtttttttaggttgttgtcgtcgttgttgggagatgggtttattcgttcgttattttgcgttgtcgtcgttttgaggagttaaaggtacgggcgggtattcggaggagtttgcgtttcggagcgggagagaagggggcggttttcgtttacgatttagggagttttggtcgggtcgtagttttagcgtttttgttcgggatagaaatggattcggaagttcggtgggaaaggcgttttttttagtgtttagcgtgggttcggggtcgtggtcggtttagggggttaggtttcggttagtttcgggttttttattcggtttaggcgcgggcgtttttcgggtcgcgggggtcgaggtggagcgtgggattcgttttaagttttgtttttttggtgtttgtgcggtcggcggtcggttcggcgatattatgacgggtcgaggcggcgtttttttcgagttgttttttgtttttaaagcgggggagatttaagggcggttgtcgcggggaggcggcgggggcggaacgtatttttgacgggtgaaatcggttttaacgggatcgattttcgggtttcgttgtaaatttggagtcgggatatcgtttcgtaagtcgtgttgtttggggttttagggaggggagttgtgttcggaggaaggttagttcgggattgttatt

SEQ ID NO: 30238 - DNA, 1101 bp, Artificial Sequence
  chemically treated genomic DNA (Homo sapiens) CpG-island No: 30238
aataacaatcccgaactaaccttcctccgaacacaactcccctccctaaaaccccaaacaacacgacttacgaaacgatatcccgactccaaatttacaacgaaacccgaaaatcgatcccgttaaaaccgatttcacccgtcaaaaatacgttccgcccccgccgcctccccgcgacaaccgcccttaaatctcccccgctttaaaaacaaaaaacaactcgaaaaaaacgccgcctcgacccgtcataatatcgccgaaccgaccgccgaccgcacaaacaccaaaaaaacaaaacttaaaacgaatcccacgctccacctcgacccccgcgacccgaaaaacgcccgcgcctaaaccgaataaaaaacccgaaactaaccgaaacctaaccccctaaaccgaccacgaccccgaacccacgctaaacactaaaaaaaacgcctttcccaccgaacttccgaatccatttctatcccgaacaaaaacgctaaaactacgacccgaccaaaactccctaaatcgtaaacgaaaaccgcccccttctctcccgctccgaaacgcaaactcctccgaatacccgcccgtacctttaactcctcaaaacgacgacaacgcaaaataacgaacgaataaacccatctcccaacaacgacgacaacaacctaaaaaaacgcgaaaaaaaatccctccgatacgccgaaacgcctctcaaccgaaacgaaaacgacgaaaaaaaaaaatcccgacgaccgctttcccgaactcctcctccgcaattataactcgacgactactcccgaaaaccaacgccgcaactaccacctccccctcccgcaacccccgctttcccctcctcctcctcccacttcttcctcccgcccccgaccgccccgccccaacgcgccgcccgcgtactatacgtcataacgtcacgcccaccgaacccgctacgaacgactctaaacgcgactattcccttacgcacgttcgttccgcgcccgcgcaaaaaccgccccgctacacccgaataaccccgactacgacccccacgcctatccctaacgaaaaaaacttcgcctcgaacgcgccgaacaataa

SEQ ID NO: 30239 - DNA, 1101 bp, Artificial Sequence
  chemically treated genomic DNA (Homo sapiens) CpG-island No: 30239
ggtagtagtttcggattaattttttttcgaatatagtttttttttttaaggttttaggtagtacggtttgcggggcgatgtttcggttttaaatttgtagcgaggttcggaaatcggtttcgttagagtcgattttattcgttaggaatgcgtttcgttttcgtcgttttttcgcggtaatcgtttttgggtttttttcgttttaggggtaggagatagttcgaggggagcgtcgtttcggttcgttataatatcgtcgggtcggtcgtcggtcgtataggtattaggaggatagggtttggggcggattttacgttttatttcggttttcgcggttcgggagacgttcgcgtttgggtcgggtaggggattcggagttgatcgaggtttgattttttaagtcggttacggtttcgagtttacgttggatattggaggagacgttttttttatcggattttcgaatttatttttgtttcgggtaggggcgttagggttgcggttcggttagagttttttgggtcgtaagcgagagtcgtttttttttttttcgtttcggggcgtaagttttttcgggtgttcgttcgtatttttaattttttagagcggcggtagcgtagggtggcgggcgagtaggtttattttttagtagcggcgatagtagtttgaggaagcgcgggggagggttttttcgatgcgtcgaggcgttttttaatcggggcggagacgacggaggggaggagtttcgacggtcgttttttcgaatttttttttcgtagttgtggttcgacggttgttttcgggaattagcgtcgtaattattatttttttttttcgtagttttcgtttttttttttttttttttttatttttttttttcgttttcggtcgtttcgttttagcgcgtcgttcgcgtgttgtgcgttatggcgttacgtttatcgggttcgttgcgggcggttttggacgcggttgtttttttgcgtacgttcgtttcgcgttcgcgtaggagtcgtttcgttgtattcgggtggtttcgattgcggtttttacgtttgtttttggcggaggggatttcgtttcgagcgcgtcgggtagtgg

SEQ ID NO: 30240 - DNA, 1101 bp, Artificial Sequence
  chemically treated genomic DNA (Homo sapiens) CpG-island No: 30240
ccactacccgacgcgctcgaaacgaaatcccctccgccaaaaacaaacgtaaaaaccgcaatcgaaaccacccgaatacaacgaaacgactcctacgcgaacgcgaaacgaacgtacgcaaaaaaacaaccgcgtccaaaaccgcccgcaacgaacccgataaacgtaacgccataacgcacaacacgcgaacgacgcgctaaaacgaaacgaccgaaaacgaaaaaaaaaaataaaaaaaaaaaaaaaaaaaaacgaaaactacgaaaaaaaaaaataataattacgacgctaattcccgaaaacaaccgtcgaaccacaactacgaaaaaaaaattcgaaaaaacgaccgtcgaaactcctcccctccgtcgtctccgccccgattaaaaaacgcctcgacgcatcgaaaaaaccctcccccgcgcttcctcaaactactatcgccgctactaaaaaataaacctactcgcccgccaccctacgctaccgccgctctaaaaaattaaaaatacgaacgaacacccgaaaaaacttacgccccgaaacgaaaaaaaaaaaaacgactctcgcttacgacccaaaaaactctaaccgaaccgcaaccctaacgcccctacccgaaacaaaaataaattcgaaaatccgataaaaaaaacgtctcctccaatatccaacgtaaactcgaaaccgtaaccgacttaaaaaatcaaacctcgatcaactccgaatcccctacccgacccaaacgcgaacgtctcccgaaccgcgaaaaccgaaataaaacgtaaaatccgccccaaaccctatcctcctaatacctatacgaccgacgaccgacccgacgatattataacgaaccgaaacgacgctcccctcgaactatctcctacccctaaaacgaaaaaaacccaaaaacgattaccgcgaaaaaacgacgaaaacgaaacgcattcctaacgaataaaatcgactctaacgaaaccgatttccgaacctcgctacaaatttaaaaccgaaacatcgccccgcaaaccgtactacctaaaaccttaaaaaaaaaaactatattcgaaaaaaaattaatccgaaactactacc

SEQ ID NO: 30241 - DNA, 3115 bp, Artificial Sequence
  chemically treated genomic DNA (Homo sapiens) CpG-island No: 30241
aagaaattcgtcgatatagtattcgggtgtttaagttttcgagaattaggttgcgcgggtattacggggttagaaagttcgggttaggacgggtttaggagcgagtatcgtcgggaataagcgtcgggaataagtcgggagaaagaggaagcgtcggcgttaaaggtttttcgttcgtcgcggtttttttaggattttttttgcgttcgtaagtgttacgtcgtttataggattgcgttagtcggtcggcgttttaatagagttcgtttgggagtagcgttcgtcgggagttatgacgtttgagttatcgaggtcgtcgtcgggttaggtcgaggtcgtcgttttaatagagcgcgttagggagtagcgttcgtcggtagttatgacgtttgagttatcgaggtcgtcgtcgggttaggtagaggtcgtcgttttaatagagcgcgttagggagtagcgttcgtcggtagttatgacgtttgagttatcgaggtcgtcgtcgggttaggtagaggtcgtcgttttaatagagcgcgttagggagtagcgtttatcgggagttatgacgtttgagttatttaggtcgtcgtcgggtcgggttaaggtcgtcgttttaatagagcgcgttagggagtagcgttcgtcgggagttatgacgtttgagttatggaggtcgtcgtcgggtcgggtcgaggtcgtcgttttaatagagcgcgttagggagtagcgttcgtcgggagttatgacgtttgagttatcgaggtcgtcgtcgggtcgggtcgaggtcgtcgttttaatagagcgcgttagggagtagcgttcgtcgggagttatgacgtttgagttatcgaggtcgtcgtcgggtcgggtagaggtcgtcgttttaatagagcgcgttagggagtagcgttcgtcgggagttatgacgtttgagttatcgaggtcgtcgcggggtcgggtcgaggtcgtcgttttaatagagtacgttagggagtagcgtcggtcgggagttatgacgtttgagttatcgaggtcgtcgtcgggtcgggtcgaggtcgtcgttttaatagagcgcgttagggagtagcgttcgttaggagttatgatgtttgagttatcgaggtagtcgtcgggttaggtcgaggtcgtcgtcgttcggttaggtcgaggtcgttgttttaatagagcgcgttagggagtagcgttcgtcgggagttatgatgtttgagttatcgaggtcgtcgtcgggttaggtcgaggtcgtcgtcgttcggttaggtcgaggtcgttgttttaatagagcgcgttagggagtagcgttcgtcgggagttatgacgtttgagttatcgaggtcgtcgtcgggtcgggtcgaggtcgtcgttttaatagagcgcgttagggagtagcgttcgtcgggagttatgacgtttgagttatcgaggtcgtcgcggggtcgggtcgaggtcgtcgttttaatagagtacgttagggagtagcgtcggtcgggagttatgacgtttgagttatcgaggtcgtcgtcgggtcgggtcgaggtcgtcgttttaatagagcgcgttagggagtagcgttcgtcgggagttatgatgtttgagttatcgaggtcgtcgtcgggttaggtcgaggtcgtcgtcgttcggttaggtcgaggtcgttgttttaatagagcgcgttagggagtagcgttcgtcgggaattatgatgtttgagttatcgaggtcgtcgtcgggttaggtcgaggtcgtcgtcgttcggttaggtcgaggtcgttgttttaatagagcgcgttagggagtagcgttcgtcgggagttatgacgtttgagttatcgcggtcgtcgtcgggtcgggtcgaggtcgtcgttttaatagagcgcgttagggagtagcgttcgtcgggagttatgatgtttgagttatcgaggtcgttttcgggttaggtcgaggtcgtcgtcgttcggttaggtcgaggtcgttgttttaatagagcgcgttagggagtagcgtcggtcgggaggtatgacgtttgagttatcgaggtcgtcgtcgggtcgggtcgaggtcgtcgttttaatagagcgcgttagggagtagcgttcgttaggagttatgacgtttgagttatcgaggtcgtcgtcgggttaggtttaggtcgtcgtcgtttagttaggtcgaggtcgtcgttttaatagagcgtgttagggagtagcgttcgtcgggagttatgacgtttgagttatcgaggtcgtcgtcgggttaggtcgaggtcgtcgttttaatagagcgcgttagggagtagcgttcgtcgggagttatgacgtttgagttatcgaggtcgttatcgggtcgggtcgaggttttcgttttaatagagcgcgttagggagtagcgttcgtcgggagttatgacgtttgagttatcgcggtcgcggtcgggtcgggtcgaggtcgtcgttttaatagagcgcgttagggagtagcgttcgtcgggaggtatgacgtttgagttatcgaggtcgtcgtcgggtcgggtcgaggtcgtcgttttaatagagcgcgttagggagtagcgttcgtcgggagttatgacgtttgagttatcgaggtcgtcgtcgggtcgggtcgaggtcgtcgttttaatagagcgcgttagggagtagcgtcggtcgggagttatgacgtttgagttatcgaggtcgtcgtcgggttaggtcgaggttttcgtcgttcggttaggtcgaggtcgtcggttttttcgagatttatttatttttcgaggcgacggggcggagttttgtacggaggcgacgtatcgtttttcgtaggttttgttgtaatttatcgcgttattaatttggttttcgagacgcgtgaaattagcgtttagtttcgtagtagtcgttaattttaataggaaagcgtttgaaagttattgatttcgcgtagtcggcggaggattattgtgacgaatttgtgttttgcgttaatagtgtgtggaacgttggcgatttcggcgttcgagttgtatttcgttgggtttttggtagtattttgtgttttgagggtgttttgttcgtcgggcgtcgtggtttacgttt

SEQ ID NO: 30242 - DNA, 3115 bp, Artificial Sequence
  chemically treated genomic DNA (Homo sapiens) CpG-island No: 30242
aaacgtaaaccacgacgcccgacgaacaaaacaccctcaaaacacaaaatactaccaaaaacccaacgaaatacaactcgaacgccgaaatcgccaacgttccacacactattaacgcaaaacacaaattcgtcacaataatcctccgccgactacgcgaaatcaataactttcaaacgctttcctattaaaattaacgactactacgaaactaaacgctaatttcacgcgtctcgaaaaccaaattaataacgcgataaattacaacaaaacctacgaaaaacgatacgtcgcctccgtacaaaactccgccccgtcgcctcgaaaaataaataaatctcgaaaaaaccgacgacctcgacctaaccgaacgacgaaaacctcgacctaacccgacgacgacctcgataactcaaacgtcataactcccgaccgacgctactccctaacgcgctctattaaaacgacgacctcgacccgacccgacgacgacctcgataactcaaacgtcataactcccgacgaacgctactccctaacgcgctctattaaaacgacgacctcgacccgacccgacgacgacctcgataactcaaacgtcatacctcccgacgaacgctactccctaacgcgctctattaaaacgacgacctcgacccgacccgaccgcgaccgcgataactcaaacgtcataactcccgacgaacgctactccctaacgcgctctattaaaacgaaaacctcgacccgacccgataacgacctcgataactcaaacgtcataactcccgacgaacgctactccctaacgcgctctattaaaacgacgacctcgacctaacccgacgacgacctcgataactcaaacgtcataactcccgacgaacgctactccctaacacgctctattaaaacgacgacctcgacctaactaaacgacgacgacctaaacctaacccgacgacgacctcgataactcaaacgtcataactcctaacgaacgctactccctaacgcgctctattaaaacgacgacctcgacccgacccgacgacgacctcgataactcaaacgtcatacctcccgaccgacgctactccctaacgcgctctattaaaacaacgacctcgacctaaccgaacgacgacgacctcgacctaacccgaaaacgacctcgataactcaaacatcataactcccgacgaacgctactccctaacgcgctctattaaaacgacgacctcgacccgacccgacgacgaccgcgataactcaaacgtcataactcccgacgaacgctactccctaacgcgctctattaaaacaacgacctcgacctaaccgaacgacgacgacctcgacctaacccgacgacgacctcgataactcaaacatcataattcccgacgaacgctactccctaacgcgctctattaaaacaacgacctcgacctaaccgaacgacgacgacctcgacctaacccgacgacgacctcgataactcaaacatcataactcccgacgaacgctactccctaacgcgctctattaaaacgacgacctcgacccgacccgacgacgacctcgataactcaaacgtcataactcccgaccgacgctactccctaacgtactctattaaaacgacgacctcgacccgaccccgcgacgacctcgataactcaaacgtcataactcccgacgaacgctactccctaacgcgctctattaaaacgacgacctcgacccgacccgacgacgacctcgataactcaaacgtcataactcccgacgaacgctactccctaacgcgctctattaaaacaacgacctcgacctaaccgaacgacgacgacctcgacctaacccgacgacgacctcgataactcaaacatcataactcccgacgaacgctactccctaacgcgctctattaaaacaacgacctcgacctaaccgaacgacgacgacctcgacctaacccgacgactacctcgataactcaaacatcataactcctaacgaacgctactccctaacgcgctctattaaaacgacgacctcgacccgacccgacgacgacctcgataactcaaacgtcataactcccgaccgacgctactccctaacgtactctattaaaacgacgacctcgacccgaccccgcgacgacctcgataactcaaacgtcataactcccgacgaacgctactccctaacgcgctctattaaaacgacgacctctacccgacccgacgacgacctcgataactcaaacgtcataactcccgacgaacgctactccctaacgcgctctattaaaacgacgacctcgacccgacccgacgacgacctcgataactcaaacgtcataactcccgacgaacgctactccctaacgcgctctattaaaacgacgacctcgacccgacccgacgacgacctccataactcaaacgtcataactcccgacgaacgctactccctaacgcgctctattaaaacgacgaccttaacccgacccgacgacgacctaaataactcaaacgtcataactcccgataaacgctactccctaacgcgctctattaaaacgacgacctctacctaacccgacgacgacctcgataactcaaacgtcataactaccgacgaacgctactccctaacgcgctctattaaaacgacgacctctacctaacccgacgacgacctcgataactcaaacgtcataactaccgacgaacgctactccctaacgcgctctattaaaacgacgacctcgacctaacccgacgacgacctcgataactcaaacgtcataactcccgacgaacgctactcccaaacgaactctattaaaacgccgaccgactaacgcaatcctataaacgacgtaacacttacgaacgcaaaaaaaatcctaaaaaaaccgcgacgaacgaaaaacctttaacgccgacgcttcctctttctcccgacttattcccgacgcttattcccgacgatactcgctcctaaacccgtcctaacccgaactttctaaccccgtaatacccgcgcaacctaattctcgaaaacttaaacacccgaatactatatcgacgaatttctt

SEQ ID NO: 30243 - DNA, 3115 bp, Artificial Sequence
  chemically treated genomic DNA (Homo sapiens) CpG-island No: 30243
aggcgtgagttacggcgttcggcgggtaagatatttttagagtatagggtgttgttaagagtttagcggagtgtagttcgagcgtcgaggtcgttaacgttttatatattgttgacgtaggatataagttcgttatagtggtttttcgtcggttacgcggagttagtggtttttaggcgtttttttgttggaattggcgattgttgcggggttgagcgttggttttacgcgtttcgggagttaggttggtggcgcgatgagttgtagtaaggtttacggggagcggtacgtcgttttcgtgtagggtttcgtttcgtcgtttcgaaaggtgagtggatttcgaagagatcgacggtttcgatttggtcgggcggcggaggtttcgatttggttcggcggcggtttcgatggtttaggcgttatggttttcgatcggcgttgttttttggcgcgttttgttgaggcggcggtttcgattcggttcggcggcggtttcgatggtttaggcgttatggttttcgacgggcgttgttttttggcgcgttttgttgaggcggcggtttcgattcggttcggcggcggtttcgatggtttaggcgttatgtttttcgacgggcgttgttttttggcgcgttttgttgaggcggcggtttcgattcggttcggtcgcggtcgcgatggtttaggcgttatggttttcgacgggcgttgttttttggcgcgttttgttgaggcggaggtttcgattcggttcggtggcggtttcgatggtttaggcgttatggttttcgacgggcgttgttttttggcgcgttttgttgaggcggcggtttcgatttggttcggcggcggtttcgatggtttaggcgttatggttttcgacgggcgttgttttttggtacgttttgttgaggcggcggtttcgatttggttgggcggcggcggtttggatttggttcggcggcggtttcgatggtttaggcgttatggtttttgacgggcgttgttttttggcgcgttttgttgaggcggcggtttcgattcggttcggcggcggtttcgatggtttaggcgttatgtttttcgatcggcgttgttttttggcgcgttttgttgaggtagcggtttcgatttggtcgggcggcggcggtttcgatttggttcggaggcggtttcgatggtttaggtattatggttttcgacgggcgttgttttttgacgcgttttgttgaggcggcggtttcgattcggttcggcggcggtcgcgatggtttaggcgttatggttttcgacgggcgttgttttttggcgcgttttgttgaggtagcggtttcgatttggtcgggcggcggcggtttcgatttggttcggcggcggtttcgatggtttaggtattatggttttcgacgggcgttgttttttggcgcgttttgttgaggtagcggtttcgatttggtcgggcggcggcggtttcgatttggttcggcggcggtttcgatggtttaggtattatggttttcgacgggcgttgttttttggcgcgttttgttgaggcggcggtttcgattcggttcggcggcggtttcgatggtttaggcgttatggttttcgatcggcgttgttttttggcgtgttttgttgaggcggcggtttcgattcggtttcgcggcggtttcgatggtttaggcgttatggttttcgacgggcgttgttttttggcgcgttttgttgaggcggcggtttcgattcggttcggcggcggtttcgatggtttaggcgttatggttttcgacgggcgttgttttttggcgcgttttgttgaggtagcggtttcgatttggtcgggcggcggcggtttcgatttggttcggcggcggtttcgatggtttaggtattatggttttcgacgggcgttgttttttggcgcgttttgttgaggtagcggtttcgatttggtcgggcggcggcggtttcgatttggttcggcggttgtttcgatggtttaggtattatggtttttgacgggcgttgttttttggcgcgttttgttgaggcggcggtttcgattcggttcggcggcggtttcgatggtttaggcgttatggttttcgatcggcgttgttttttggcgtgttttgttgaggcggcggtttcgattcggtttcgcggcggtttcgatggtttaggcgttatggttttcgacgggcgttgttttttggcgcgttttgttgaggcggcggtttttattcggttcggcggcggtttcgatggtttaggcgttatggttttcgacgggcgttgttttttggcgcgttttgttgaggcggcggtttcgattcggttcggcggcggtttcgatggtttaggcgttatggttttcgacgggcgttgttttttggcgcgttttgttgaggcggcggtttcgattcggttcggcggcggtttttatggtttaggcgttatggttttcgacgggcgttgttttttggcgcgttttgttgaggcggcggttttgattcggttcggcggcggtttggatggtttaggcgttatggttttcgatgggcgttgttttttggcgcgttttgttgaggcggcggtttttatttggttcggcggcggtttcgatggtttaggcgttatggttatcgacgggcgttgttttttggcgcgttttgttgaggcggcggtttttatttggttcggcggcggtttcgatggtttaggcgttatggttatcgacgggcgttgttttttggcgcgttttgttgaggcggcggtttcgatttggttcggcggcggtttcgatggtttaggcgttatggttttcgacgggcgttgtttttaggcgggttttgttgaggcgtcggtcggttggcgtagttttgtgggcggcgtggtatttgcgagcgtaggaagagttttggggggatcgcggcgggcgggagatttttggcgtcggcgttttttttttttttcggtttgttttcgacgtttgttttcgacggtgttcgtttttgggttcgttttggttcgggttttttggtttcgtagtattcgcgtagtttggttttcgggggtttaggtattcgggtgttgtatcggcgggtttttt

SEQ ID NO: 30244 - DNA, 3115 bp, Artificial Sequence
  chemically treated genomic DNA (Homo sapiens) CpG-island No: 30244
aaaaaacccgccgatacaacacccgaatacctaaacccccgaaaaccaaactacgcgaatactacgaaaccaaaaaacccgaaccaaaacgaacccaaaaacgaacaccgtcgaaaacaaacgtcgaaaacaaaccgaaaaaaaaaaaaaacgccgacgccaaaaatctcccgcccgccgcgatccccccaaaactcttcctacgctcgcaaataccacgccgcccacaaaactacgccaaccgaccgacgcctcaacaaaacccgcctaaaaacaacgcccgtcgaaaaccataacgcctaaaccatcgaaaccgccgccgaaccaaatcgaaaccgccgcctcaacaaaacgcgccaaaaaacaacgcccgtcgataaccataacgcctaaaccatcgaaaccgccgccgaaccaaataaaaaccgccgcctcaacaaaacgcgccaaaaaacaacgcccgtcgataaccataacgcctaaaccatcgaaaccgccgccgaaccaaataaaaaccgccgcctcaacaaaacgcgccaaaaaacaacgcccatcgaaaaccataacgcctaaaccatccaaaccgccgccgaaccgaatcaaaaccgccgcctcaacaaaacgcgccaaaaaacaacgcccgtcgaaaaccataacgcctaaaccataaaaaccgccgccgaaccgaatcgaaaccgccgcctcaacaaaacgcgccaaaaaacaacgcccgtcgaaaaccataacgcctaaaccatcgaaaccgccgccgaaccgaatcgaaaccgccgcctcaacaaaacgcgccaaaaaacaacgcccgtcgaaaaccataacgcctaaaccatcgaaaccgccgccgaaccgaataaaaaccgccgcctcaacaaaacgcgccaaaaaacaacgcccgtcgaaaaccataacgcctaaaccatcgaaaccgccgcgaaaccgaatcgaaaccgccgcctcaacaaaacacgccaaaaaacaacgccgatcgaaaaccataacgcctaaaccatcgaaaccgccgccgaaccgaatcgaaaccgccgcctcaacaaaacgcgccaaaaaacaacgcccgtcaaaaaccataatacctaaaccatcgaaacaaccgccgaaccaaatcgaaaccgccgccgcccgaccaaatcgaaaccgctacctcaacaaaacgcgccaaaaaacaacgcccgtcgaaaaccataatacctaaaccatcgaaaccgccgccgaaccaaatcgaaaccgccgccgcccgaccaaatcgaaaccgctacctcaacaaaacgcgccaaaaaacaacgcccgtcgaaaaccataacgcctaaaccatcgaaaccgccgccgaaccgaatcgaaaccgccgcctcaacaaaacgcgccaaaaaacaacgcccgtcgaaaaccataacgcctaaaccatcgaaaccgccgcgaaaccgaatcgaaaccgccgcctcaacaaaacacgccaaaaaacaacgccgatcgaaaaccataacgcctaaaccatcgaaaccgccgccgaaccgaatcgaaaccgccgcctcaacaaaacgcgccaaaaaacaacgcccgtcgaaaaccataatacctaaaccatcgaaaccgccgccgaaccaaatcgaaaccgccgccgcccgaccaaatcgaaaccgctacctcaacaaaacgcgccaaaaaacaacgcccgtcgaaaaccataatacctaaaccatcgaaaccgccgccgaaccaaatcgaaaccgccgccgcccgaccaaatcgaaaccgctacctcaacaaaacgcgccaaaaaacaacgcccgtcgaaaaccataacgcctaaaccatcgcgaccgccgccgaaccgaatcgaaaccgccgcctcaacaaaacgcgtcaaaaaacaacgcccgtcgaaaaccataatacctaaaccatcgaaaccgcctccgaaccaaatcgaaaccgccgccgcccgaccaaatcgaaaccgctacctcaacaaaacgcgccaaaaaacaacgccgatcgaaaaacataacgcctaaaccatcgaaaccgccgccgaaccgaatcgaaaccgccgcctcaacaaaacgcgccaaaaaacaacgcccgtcaaaaaccataacgcctaaaccatcgaaaccgccgccgaaccaaatccaaaccgccgccgcccaaccaaatcgaaaccgccgcctcaacaaaacgtaccaaaaaacaacgcccgtcgaaaaccataacgcctaaaccatcgaaaccgccgccgaaccaaatcgaaaccgccgcctcaacaaaacgcgccaaaaaacaacgcccgtcgaaaaccataacgcctaaaccatcgaaaccgccaccgaaccgaatcgaaacctccgcctcaacaaaacgcgccaaaaaacaacgcccgtcgaaaaccataacgcctaaaccatcgcgaccgcgaccgaaccgaatcgaaaccgccgcctcaacaaaacgcgccaaaaaacaacgcccgtcgaaaaacataacgcctaaaccatcgaaaccgccgccgaaccgaatcgaaaccgccgcctcaacaaaacgcgccaaaaaacaacgcccgtcgaaaaccataacgcctaaaccatcgaaaccgccgccgaaccgaatcgaaaccgccgcctcaacaaaacgcgccaaaaaacaacgccgatcgaaaaccataacgcctaaaccatcgaaaccgccgccgaaccaaatcgaaacctccgccgcccgaccaaatcgaaaccgtcgatctcttcgaaatccactcacctttcgaaacgacgaaacgaaaccctacacgaaaacgacgtaccgctccccgtaaaccttactacaactcatcgcgccaccaacctaactcccgaaacgcgtaaaaccaacgctcaaccccgcaacaatcgccaattccaacaaaaaaacgcctaaaaaccactaactccgcgtaaccgacgaaaaaccactataacgaacttatatcctacgtcaacaatatataaaacgttaacgacctcgacgctcgaactacactccgctaaactcttaacaacaccctatactctaaaaatatcttacccgccgaacgccgtaactcacgcct

SEQ ID NO: 30245 - DNA, 515 bp, Artificial Sequence
  chemically treated genomic DNA (Homo sapiens) CpG-island No: 30245
gagtaggcgtcgatgaggttaatggtgtcgtggttattgtggaaagagaatttgtagaaggtgtagagtaatttgttgttattgcggtagtattcgatgatgcggttggatgggtggtggatgtagattttttcgttttgtttttcggcgttggtgtttataaagacgtggttttgtatggttatattcgagtggaaggttttgaggtagtcgttgtataggttgaggcggtaggtgatgtagcgtttgtaagcgatgcgtttgttgcggtagatttggtagaggatgggttcggaggagcggttaaagcgttatttgaggtagtcgtgtttttgtatgtagcgtttggtgagacgttcgtgtaggtagttttcgggtagttgtattttgttgttgtagggtatgtagtgcgagcggtcgtatattgggtagatgaggatgaagaagttttcggtgatttcggcgtgtttttgtagttgtcgtaggtatttttcgtataggttgtggttgtaggg

SEQ ID NO: 30246 - DNA, 515 bp, Artificial Sequence
  chemically treated genomic DNA (Homo sapiens) CpG-island No: 30246
ccctacaaccacaacctatacgaaaaatacctacgacaactacaaaaacacgccgaaatcaccgaaaacttcttcatcctcatctacccaatatacgaccgctcgcactacataccctacaacaacaaaatacaactacccgaaaactacctacacgaacgtctcaccaaacgctacatacaaaaacacgactacctcaaataacgctttaaccgctcctccgaacccatcctctaccaaatctaccgcaacaaacgcatcgcttacaaacgctacatcacctaccgcctcaacctatacaacgactacctcaaaaccttccactcgaatataaccatacaaaaccacgtctttataaacaccaacgccgaaaaacaaaacgaaaaaatctacatccaccacccatccaaccgcatcatcgaatactaccgcaataacaacaaattactctacaccttctacaaattctctttccacaataaccacgacaccattaacctcatcgacgcctactc

SEQ ID NO: 30247 - DNA, 515 bp, Artificial Sequence
  chemically treated genomic DNA (Homo sapiens) CpG-island No: 30247
ttttgtaattatagtttgtgcgagaagtgtttgcggtagttgtagaagtacgtcgaggttatcgagaatttttttatttttatttgtttagtgtgcgatcgttcgtattgtatgttttatagtaataagatgtagttgttcgagaattatttgtacgggcgttttattaagcgttatatgtaggagtacggttattttaagtggcgttttgatcgttttttcgggtttattttttgttaggtttgtcgtaataggcgtatcgtttataagcgttgtattatttgtcgttttaatttgtgtaacgattgttttaaggttttttattcggatgtggttatgtaagattacgtttttgtggatattagcgtcgaggaataggacgagaagatttgtatttattatttatttagtcgtattatcgagtattgtcgtaatgataataaattgttttgtattttttgtaagttttttttttataatggttacgatattattagttttatcgacgtttgttt

SEQ ID NO: 30248 - DNA, 515 bp, Artificial Sequence
  chemically treated genomic DNA (Homo sapiens) CpG-island No: 30248
aaacaaacgtcgataaaactaataatatcgtaaccattataaaaaaaaaacttacaaaaaatacaaaacaatttattatcattacgacaatactcgataatacgactaaataaataataaatacaaatcttctcgtcctattcctcgacgctaatatccacaaaaacgtaatcttacataaccacatccgaataaaaaaccttaaaacaatcgttacacaaattaaaacgacaaataatacaacgcttataaacgatacgcctattacgacaaacctaacaaaaaataaacccgaaaaaacgatcaaaacgccacttaaaataaccgtactcctacatataacgcttaataaaacgcccgtacaaataattctcgaacaactacatcttattactataaaacatacaatacgaacgatcgcacactaaacaaataaaaataaaaaaattctcgataacctcgacgtacttctacaactaccgcaaacacttctcgcacaaactataattacaaaa

SEQ ID NO: 30249 - DNA, 601 bp, Artificial Sequence
  chemically treated genomic DNA (Homo sapiens) CpG-island No: 30249
ttagtcgtttcggcgttttttttttttttttacgttttatttgtttggttaagaatttgtttaatttattgcggtttttttcgtttttggttgcgattaatcgtagcggcgcggttgttatttttagtaagaagtgttttatgatttagggtttttatttcgagcggttatttgcgttttttatttcgcggttagcgtttttaagtcgtcgaggttttagtgttcgagtagttagtaattacgttcgtaggaaaggcgtttttagttttagcgtttatatcgggagaggggtattatacgtgggtgagtatacggcgtttgacgttattagttcgggacggttacgttgcgttttttcggttttagttttttagcggcggaaacgttagttttcgttgtttcgtttttttcgggagggaaatggaaataaaaatttagtcggtttggatgtaggagtgatggggattcgcgaatatagtacgtggtgggatagaaagaagagtgcgttaggtcggggaggaaagagggggcgtgtgagttttagtttatcgtgttttgtttttgttttaatatacggaaagattagatgtgagagaaaagt

SEQ ID NO: 30250 - DNA, 601 bp, Artificial Sequence
  chemically treated genomic DNA (Homo sapiens) CpG-island No: 30250
acttttctctcacatctaatctttccgtatattaaaacaaaaacaaaacacgataaactaaaactcacacgccccctctttcctccccgacctaacgcactcttctttctatcccaccacgtactatattcgcgaatccccatcactcctacatccaaaccgactaaatttttatttccatttccctcccgaaaaaaacgaaacaacgaaaactaacgtttccgccgctaaaaaactaaaaccgaaaaaacgcaacgtaaccgtcccgaactaataacgtcaaacgccgtatactcacccacgtataatacccctctcccgatataaacgctaaaactaaaaacgcctttcctacgaacgtaattactaactactcgaacactaaaacctcgacgacttaaaaacgctaaccgcgaaataaaaaacgcaaataaccgctcgaaataaaaaccctaaatcataaaacacttcttactaaaaataacaaccgcgccgctacgattaatcgcaaccaaaaacgaaaaaaaccgcaataaattaaacaaattcttaaccaaacaaataaaacgtaaaaaaaaaaaaaaaacgccgaaacgactaa

SEQ ID NO: 30251 - DNA, 601 bp, Artificial Sequence
  chemically treated genomic DNA (Homo sapiens) CpG-island No: 30251
gttttttttttatatttgattttttcgtgtgttaaggtagaagtaaggtacggtgggttgagatttatacgttttttttttttttttcggtttaacgtatttttttttttgttttattacgtgttgtgttcgcgagtttttattatttttgtatttaaatcgattagatttttgtttttatttttttttcggaaaaggcgggatagcgaagattggcgttttcgtcgttgaggggttgaggtcgggagggcgtagcgtagtcgtttcgagttgatgacgttaaacgtcgtgtgtttatttacgtgtggtgtttttttttcggtgtaggcgttggagttgaggacgttttttttgcgggcgtagttgttggttgttcgggtattgggatttcggcggtttggggacgttggtcgcgaagtagggagcgtaggtggtcgttcggggtgagggttttgggttatggagtattttttgttggaggtggtagtcgcgtcgttgcggttaatcgtagttaagaacgagaagagtcgtagtgagttgggtaggtttttggttaagtaggtaagacgtgaagggagagggaaagcgtcggaacgattgg

SEQ ID NO: 30252 - DNA, 601 bp, Artificial Sequence
  chemically treated genomic DNA (Homo sapiens) CpG-island No: 30252
ccaatcgttccgacgctttccctctcccttcacgtcttacctacttaaccaaaaacctacccaactcactacgactcttctcgttcttaactacgattaaccgcaacgacgcgactaccacctccaacaaaaaatactccataacccaaaaccctcaccccgaacgaccacctacgctccctacttcgcgaccaacgtccccaaaccgccgaaatcccaatacccgaacaaccaacaactacgcccgcaaaaaaaacgtcctcaactccaacgcctacaccgaaaaaaaaacaccacacgtaaataaacacacgacgtttaacgtcatcaactcgaaacgactacgctacgccctcccgacctcaacccctcaacgacgaaaacgccaatcttcgctatcccgccttttccgaaaaaaaaataaaaacaaaaatctaatcgatttaaatacaaaaataataaaaactcgcgaacacaacacgtaataaaacaaaaaaaaaaatacgttaaaccgaaaaaaaaaaaaaaaacgtataaatctcaacccaccgtaccttacttctaccttaacacacgaaaaaatcaaatataaaaaaaaaac

SEQ ID NO: 30253 - DNA, 555 bp, Artificial Sequence
  chemically treated genomic DNA (Homo sapiens) CpG-island No: 30253
gggagggcggcggttttggtttcgttagttttaagtttaatttggggtgcgggtgcgtgggtcgcgtgtatgtttgcgtggagtaagcgcgtcgagagcggtcggggttggcgtcggggcgttttaatttattaattcggcgagtaggagtaagttcggttttacgagggcgttcgttcgttgcgggttgtttttatcgtagacgggaagttgtttagtatcggttttagtaggatgagtgagcggtaattcgcgttttgggattcggtaggttaggtcgcgtcgggcgcgttagttcgttttttttttgggtttgtcgggagcgttttttcgggttgtggttggcgtttaagaggttagagcggagcggggagtttttattcgggaaaagtttcgttgcgatttcggggagttagtagatatttttgttttagggatcggtttttgagcgcgtttaagggttcgggatcggttgagagtcgcgtgttttttgttttttttaggttcggatgttttttaggttaggggttagacgtggtttcgtaggaagttgag

SEQ ID NO: 30254 - DNA, 555 bp, Artificial Sequence
  chemically treated genomic DNA (Homo sapiens) CpG-island No: 30254
ctcaacttcctacgaaaccacgtctaacccctaacctaaaaaacatccgaacctaaaaaaaacaaaaaacacgcgactctcaaccgatcccgaacccttaaacgcgctcaaaaaccgatccctaaaacaaaaatatctactaactccccgaaatcgcaacgaaacttttcccgaataaaaactccccgctccgctctaacctcttaaacgccaaccacaacccgaaaaaacgctcccgacaaacccaaaaaaaaaacgaactaacgcgcccgacgcgacctaacctaccgaatcccaaaacgcgaattaccgctcactcatcctactaaaaccgatactaaacaacttcccgtctacgataaaaacaacccgcaacgaacgaacgccctcgtaaaaccgaacttactcctactcgccgaattaataaattaaaacgccccgacgccaaccccgaccgctctcgacgcgcttactccacgcaaacatacacgcgacccacgcacccgcaccccaaattaaacttaaaactaacgaaaccaaaaccgccgccctccc

SEQ ID NO: 30255 - DNA, 555 bp, Artificial Sequence
  chemically treated genomic DNA (Homo sapiens) CpG-island No: 30255
tttagttttttgcggggttacgtttggtttttgatttggagagtattcgggtttggagagagtaggaggtacgcggtttttagtcgatttcgaatttttaagcgcgtttaaaggtcgatttttagagtaggggtgtttgttggtttttcggagtcgtagcgaggtttttttcgaatgggagtttttcgtttcgttttggttttttgggcgttagttatagttcgggaaggcgttttcggtagatttagagaaggagcgagttagcgcgttcggcgcggtttggtttatcgggttttagagcgcgagttgtcgtttatttattttgttgaagtcggtgttgagtagtttttcgtttgcggtgaagatagttcgtagcgggcgggcgttttcgtgaggtcgggtttgtttttgttcgtcgggttagtgggttagagcgtttcggcgttagtttcgatcgttttcggcgcgtttgttttacgtagatatgtacgcggtttacgtattcgtattttaggttagatttgaggttggcgaggttagggtcgtcgttttttt

SEQ ID NO: 30256 - DNA, 555 bp, Artificial Sequence
  chemically treated genomic DNA (Homo sapiens) CpG-island No: 30256
aaaaaaacgacgaccctaacctcgccaacctcaaatctaacctaaaatacgaatacgtaaaccgcgtacatatctacgtaaaacaaacgcgccgaaaacgatcgaaactaacgccgaaacgctctaacccactaacccgacgaacaaaaacaaacccgacctcacgaaaacgcccgcccgctacgaactatcttcaccgcaaacgaaaaactactcaacaccgacttcaacaaaataaataaacgacaactcgcgctctaaaacccgataaaccaaaccgcgccgaacgcgctaactcgctccttctctaaatctaccgaaaacgccttcccgaactataactaacgcccaaaaaaccaaaacgaaacgaaaaactcccattcgaaaaaaacctcgctacgactccgaaaaaccaacaaacacccctactctaaaaatcgacctttaaacgcgcttaaaaattcgaaatcgactaaaaaccgcgtacctcctactctctccaaacccgaatactctccaaatcaaaaaccaaacgtaaccccgcaaaaaactaaa

SEQ ID NO: 30257 - DNA, 543 bp, Artificial Sequence
  chemically treated genomic DNA (Homo sapiens) CpG-island No: 30257
cgcgaggcggtggttttagtttttagtcgtcgttttgtaggcgcgtaggtcggggtttgtttggtttttggttttgggcgtggcgcgcgtggcgttggcgagggtttcggtagggggcgttattgttcggttagtgagagttttaggatgcgttttagttttttttttttttggcgcgcgcgtcgtcgtttttttttttgtttttgcgtcgatagttttatcgttagtcgtagttgttcgtcgtagtttcggaatacgtggtcgtcggaatttggttttgagttgggtcgagggttgggtattgacgtcgggggcgtaggttggcgttgcggcgtgggcggggcgtttttgggggtggggaaggaatgtcgcgggttttcgggcgtatttatttatcggtcggggtcgggatacggcgtggaggttttagggcggttcgcggttattattttttagtggaggcggttagtttcgcggcgttttggtttttatttggtcgtggcggagtttagattttattaagtttttttcgttaatgtttgg

SEQ ID NO: 30258 - DNA, 543 bp, Artificial Sequence
  chemically treated genomic DNA (Homo sapiens) CpG-island No: 30258
ccaaacattaacgaaaaaaacttaataaaatctaaactccgccacgaccaaataaaaaccaaaacgccgcgaaactaaccgcctccactaaaaaataataaccgcgaaccgccctaaaacctccacgccgtatcccgaccccgaccgataaataaatacgcccgaaaacccgcgacattccttccccacccccaaaaacgccccgcccacgccgcaacgccaacctacgcccccgacgtcaatacccaaccctcgacccaactcaaaaccaaattccgacgaccacgtattccgaaactacgacgaacaactacgactaacgataaaactatcgacgcaaaaacaaaaaaaaaaacgacgacgcgcgcgccaaaaaaaaaaaaaactaaaacgcatcctaaaactctcactaaccgaacaataacgccccctaccgaaaccctcgccaacgccacgcgcgccacgcccaaaaccaaaaaccaaacaaaccccgacctacgcgcctacaaaacgacgactaaaaactaaaaccaccgcctcgcg

SEQ ID NO: 30259 - DNA, 543 bp, Artificial Sequence
  chemically treated genomic DNA (Homo sapiens) CpG-island No: 30259
ttaggtattgacggggagaatttggtagggtttgggtttcgttacgattaggtgggggttaggacgtcgcgggattgatcgtttttattagagggtggtggtcgcgggtcgttttggagtttttacgtcgtgtttcggtttcggtcggtgggtgggtgcgttcgggagttcgcgatattttttttttatttttaggagcgtttcgtttacgtcgtagcgttagtttgcgttttcggcgttagtgtttagttttcggtttagtttagggttaggtttcggcggttacgtgtttcggagttacgacgagtagttgcggttggcgatggaattgtcggcgtaggagtaggaggagaggcggcggcgcgcgcgttaggaggaggaggagttggagcgtattttgaggtttttattgatcgagtagtagcgttttttgtcgggattttcgttagcgttacgcgcgttacgtttagggttaggagttagataaatttcggtttgcgcgtttgtagagcggcggttggagattggagttatcgtttcgcg

SEQ ID NO: 30260 - DNA, 543 bp, Artificial Sequence
  chemically treated genomic DNA (Homo sapiens) CpG-island No: 30260
cgcgaaacgataactccaatctccaaccgccgctctacaaacgcgcaaaccgaaatttatctaactcctaaccctaaacgtaacgcgcgtaacgctaacgaaaatcccgacaaaaaacgctactactcgatcaataaaaacctcaaaatacgctccaactcctcctcctcctaacgcgcgcgccgccgcctctcctcctactcctacgccgacaattccatcgccaaccgcaactactcgtcgtaactccgaaacacgtaaccgccgaaacctaaccctaaactaaaccgaaaactaaacactaacgccgaaaacgcaaactaacgctacgacgtaaacgaaacgctcctaaaaataaaaaaaaaatatcgcgaactcccgaacgcacccacccaccgaccgaaaccgaaacacgacgtaaaaactccaaaacgacccgcgaccaccaccctctaataaaaacgatcaatcccgcgacgtcctaacccccacctaatcgtaacgaaacccaaaccctaccaaattctccccgtcaatacctaa

SEQ ID NO: 30261 - DNA, 523 bp, Artificial Sequence
  chemically treated genomic DNA (Homo sapiens) CpG-island No: 30261
gtgggcgttagtcgtggcggcgcggagtttcgtggtttcgcgcgttcgcggagacgtatttggttatatttattgttcgttttaagtaggttttgttggatggcgaattgtagtaggtcgtcgtcgtcgtttcgggtcgtcgtttttcgttggtcgtttattatgttgtagtcgcgcggggtttcgaataacgttggggagatttcgtagtcgcggtaggaggttgggggcgcgggggttgggttaggtacggtcgggcgcgttttttttatttatttcggggagagtcgaggggtaggcgttttcgcggggggttttattcgtggagttggagttgttgacgttggaggagtcgttgtttggggaaggcgtttcgttgttggggttgtttcgtatcgatggtatcggttcgtcgtagtcgttgaggttttcgaaggtgatgcgggcgttgaggatgtggaagatcgggatttttgaggatgaggaaatttttaggcgttattatttagttttttatatttta

SEQ ID NO: 30262 - DNA, 523 bp, Artificial Sequence
  chemically treated genomic DNA (Homo sapiens) CpG-island No: 30262
taaaatataaaaaactaaataataacgcctaaaaatttcctcatcctcaaaaatcccgatcttccacatcctcaacgcccgcatcaccttcgaaaacctcaacgactacgacgaaccgataccatcgatacgaaacaaccccaacaacgaaacgccttccccaaacaacgactcctccaacgtcaacaactccaactccacgaataaaaccccccgcgaaaacgcctacccctcgactctccccgaaataaataaaaaaaacgcgcccgaccgtacctaacccaacccccgcgcccccaacctcctaccgcgactacgaaatctccccaacgttattcgaaaccccgcgcgactacaacataataaacgaccaacgaaaaacgacgacccgaaacgacgacgacgacctactacaattcgccatccaacaaaacctacttaaaacgaacaataaatataaccaaatacgtctccgcgaacgcgcgaaaccacgaaactccgcgccgccacgactaacgcccac

SEQ ID NO: 30263 - DNA, 523 bp, Artificial Sequence
  chemically treated genomic DNA (Homo sapiens) CpG-island No: 30263
tgaggtgtgaggggttgagtggtggcgtttaaaggtttttttatttttagaaatttcgattttttatatttttaacgttcgtattattttcgggaattttaacggttgcgacgaatcggtgttatcggtgcgaggtagttttagtagcgagacgttttttttaggtagcgatttttttagcgttagtagttttagttttacgagtgaggtttttcgcgagaacgtttgtttttcggtttttttcggggtgggtgggaggggcgcgttcggtcgtgtttgatttagttttcgcgtttttagttttttgtcgcggttgcgagatttttttagcgttgttcgaggtttcgcgcggttatagtatgatgggcggttagcgggaggcggcgattcgggacgacgacgacgatttgttgtaattcgttatttagtagagtttgtttgaggcgggtagtgagtatgattaggtgcgttttcgcgggcgcgcggggttacgggatttcgcgtcgttacggttaacgtttat

SEQ ID NO: 30264 - DNA, 523 bp, Artificial Sequence
  chemically treated genomic DNA (Homo sapiens) CpG-island No: 30264
ataaacgttaaccgtaacgacgcgaaatcccgtaaccccgcgcgcccgcgaaaacgcacctaatcatactcactacccgcctcaaacaaactctactaaataacgaattacaacaaatcgtcgtcgtcgtcccgaatcgccgcctcccgctaaccgcccatcatactataaccgcgcgaaacctcgaacaacgctaaaaaaatctcgcaaccgcgacaaaaaactaaaaacgcgaaaactaaatcaaacacgaccgaacgcgcccctcccacccaccccgaaaaaaaccgaaaaacaaacgttctcgcgaaaaacctcactcgtaaaactaaaactactaacgctaaaaaaatcgctacctaaaaaaaacgtctcgctactaaaactacctcgcaccgataacaccgattcgtcgcaaccgttaaaattcccgaaaataatacgaacgttaaaaatataaaaaatcgaaatttctaaaaataaaaaaacctttaaacgccaccactcaacccctcacacctca

SEQ ID NO: 30265 - DNA, 887 bp, Artificial Sequence
  chemically treated genomic DNA (Homo sapiens) CpG-island No: 30265
gtttcggtcggaggggagcgggtagggttcgttttttattattttttttcggttaataagtataaaagtcgcggtcgtaaataaagacgcgtcgtaaattcgttagggaggcgggatagttcgcgtcgtattttttttttaggtcggacgggcgtgttcggtcgcggggttttcgcggcgtttcgaaggcgtttttatttggttcgcgcggatttttttttttagttcgcggtggcggttgtgttatacgaggtagtgtagcggatatttgttttcgggtttttttttggcggaggcgttggcggggattatcgttcgttttttatgtcggggtcgcggcgttcggtcggggaggagggacggcgtcggagtcggggttcggggtcgcggggcggggggtcggcgttgtttgttcgcggggttgcggttcgggtatgtgcgagcggcggcgggcgggggcggcgcgttcggcgcggtgcgggcggcgcgggcgacgggcgttttcgcgaggcggcggcggcgggcggcgcggagaggtttttattcgttttgggagggagcgggtattcggcggcgttgcgcggattcgcgttcgttttttatattttcgtatataaagacgtcgttcggcggagggagtaggcgttcgtagcgggcgcgggggcgtacgggacgcgggtttcggggacgtcgtcgtagggacgcgcgttcgtagttttcgggtttttatagttgtatagttcggtttttagttcgagcggtcggcgcgggatacggggatgtggggatgatggggagagaggaaggggattaggcgtttcgggtagagtttgttagtttagtttcgcggtattatggggtttgtagttcgtttcgtgaaattgggg

SEQ ID NO: 30266 - DNA, 887 bp, Artificial Sequence
  chemically treated genomic DNA (Homo sapiens) CpG-island No: 30266
ccccaatttcacgaaacgaactacaaaccccataataccgcgaaactaaactaacaaactctacccgaaacgcctaatccccttcctctctccccatcatccccacatccccgtatcccgcgccgaccgctcgaactaaaaaccgaactatacaactataaaaacccgaaaactacgaacgcgcgtccctacgacgacgtccccgaaacccgcgtcccgtacgcccccgcgcccgctacgaacgcctactccctccgccgaacgacgtctttatatacgaaaatataaaaaacgaacgcgaatccgcgcaacgccgccgaatacccgctccctcccaaaacgaataaaaacctctccgcgccgcccgccgccgccgcctcgcgaaaacgcccgtcgcccgcgccgcccgcaccgcgccgaacgcgccgcccccgcccgccgccgctcgcacatacccgaaccgcaaccccgcgaacaaacaacgccgaccccccgccccgcgaccccgaaccccgactccgacgccgtccctcctccccgaccgaacgccgcgaccccgacataaaaaacgaacgataatccccgccaacgcctccgccaaaaaaaaacccgaaaacaaatatccgctacactacctcgtataacacaaccgccaccgcgaactaaaaaaaaaaatccgcgcgaaccaaataaaaacgccttcgaaacgccgcgaaaaccccgcgaccgaacacgcccgtccgacctaaaaaaaaaatacgacgcgaactatcccgcctccctaacgaatttacgacgcgtctttatttacgaccgcgacttttatacttattaaccgaaaaaaaataataaaaaacgaaccctacccgctcccctccgaccgaaac

SEQ ID NO: 30267 - DNA, 887 bp, Artificial Sequence
  chemically treated genomic DNA (Homo sapiens) CpG-island No: 30267
ttttagttttacgaggcggattataaattttatgatgtcgcggggttgagttgataagttttattcggggcgtttggttttttttttttttttttattatttttatattttcgtatttcgcgtcggtcgttcgggttgagggtcgggttatgtagttgtggggattcgggggttgcgggcgcgcgtttttgcggcggcgttttcggggttcgcgtttcgtgcgttttcgcgttcgttgcgggcgtttgtttttttcgtcgagcggcgtttttgtgtgcgggggtgtgggaggcgagcgcgagttcgcgtagcgtcgtcgagtgttcgtttttttttagggcgggtgggggttttttcgcgtcgttcgtcgtcgtcgtttcgcgaggacgttcgtcgttcgcgtcgttcgtatcgcgtcgggcgcgtcgttttcgttcgtcgtcgttcgtatatgttcgagtcgtagtttcgcgagtaggtagcgtcggtttttcgtttcgcggtttcgggtttcggtttcggcgtcgtttttttttttcggtcgggcgtcgcggtttcggtatgaggagcgggcgatgattttcgttaacgttttcgttaggaaggggttcgagggtaagtattcgttgtattatttcgtgtggtataatcgttatcgcgagttggagaaggaggttcgcgcgggttaggtaggagcgttttcggggcgtcgcggggatttcgcggtcgggtacgttcgttcggtttggggagggggtgcggcgcgggttgtttcgtttttttggcgagtttgcggcgcgtttttgtttgcggtcgcggtttttgtgtttgttgatcgggaaagggtgatggggagcgggttttgttcgttttttttcggtcgggat

SEQ ID NO: 30268 - DNA, 887 bp, Artificial Sequence
  chemically treated genomic DNA (Homo sapiens) CpG-island No: 30268
atcccgaccgaaaaaaaacgaacaaaacccgctccccatcaccctttcccgatcaacaaacacaaaaaccgcgaccgcaaacaaaaacgcgccgcaaactcgccaaaaaaacgaaacaacccgcgccgcaccccctccccaaaccgaacgaacgtacccgaccgcgaaatccccgcgacgccccgaaaacgctcctacctaacccgcgcgaacctccttctccaactcgcgataacgattataccacacgaaataatacaacgaatacttaccctcgaaccccttcctaacgaaaacgttaacgaaaatcatcgcccgctcctcataccgaaaccgcgacgcccgaccgaaaaaaaaaaacgacgccgaaaccgaaacccgaaaccgcgaaacgaaaaaccgacgctacctactcgcgaaactacgactcgaacatatacgaacgacgacgaacgaaaacgacgcgcccgacgcgatacgaacgacgcgaacgacgaacgtcctcgcgaaacgacgacgacgaacgacgcgaaaaaacccccacccgccctaaaaaaaaacgaacactcgacgacgctacgcgaactcgcgctcgcctcccacacccccgcacacaaaaacgccgctcgacgaaaaaaacaaacgcccgcaacgaacgcgaaaacgcacgaaacgcgaaccccgaaaacgccgccgcaaaaacgcgcgcccgcaacccccgaatccccacaactacataacccgaccctcaacccgaacgaccgacgcgaaatacgaaaatataaaaataataaaaaaaaaaaaaaaaaaccaaacgccccgaataaaacttatcaactcaaccccgcgacatcataaaatttataatccgcctcgtaaaactaaaa

SEQ ID NO: 30269 - DNA, 672 bp, Artificial Sequence
  chemically treated genomic DNA (Homo sapiens) CpG-island No: 30269
gtaggttacgttgttcgtcggggtcgggtatttgtcgcggtttttttaagcgttttcgtttttttttgttcgcgttcgggttttttttttttagggggcgcggtcggtagcgcgcggcggggcgggggtgcggtttttttttttgtgggtagggtttgcgtcgttttttgtagaagcggtcgggagtcgcgtagggggcggagagaggagtcgcgagcggcggcggggcggcgcggggcggagggcgttcgagggcgagcgggtaggcgggtacggcgggtttcgggttagtttcggggcggacggttggtcgggcgcgcggagtttcgtcggggtttcgtcggagtcgggtcgggtagtaggggtcgtcgtcgtcgttcgggttcgtcgttcgcgttttttacgttggtttagagggttgcggtcgcgtcgtcgttgaggatgtttcgaaaggggtcgcgagcggaggtgtgtgcggattgtagcgtttcgggtaagcgcggcggggtcgggggcgggatcgtatagttaggtcgtcgtcgggcgggcgtcggggtttggtaagagcgttgtgcggggtcggagggttgggcggggcggggggttgcggtttttaggttgggttttcgtttcggttattgcggagttgcgtttttggcgggagggtcggtt

SEQ ID NO: 30270 - DNA, 672 bp, Artificial Sequence
  chemically treated genomic DNA (Homo sapiens) CpG-island No: 30270
aaccgaccctcccgccaaaaacgcaactccgcaataaccgaaacgaaaacccaacctaaaaaccgcaaccccccgccccgcccaaccctccgaccccgcacaacgctcttaccaaaccccgacgcccgcccgacgacgacctaactatacgatcccgcccccgaccccgccgcgcttacccgaaacgctacaatccgcacacacctccgctcgcgacccctttcgaaacatcctcaacgacgacgcgaccgcaaccctctaaaccaacgtaaaaaacgcgaacgacgaacccgaacgacgacgacgacccctactacccgacccgactccgacgaaaccccgacgaaactccgcgcgcccgaccaaccgtccgccccgaaactaacccgaaacccgccgtacccgcctacccgctcgccctcgaacgccctccgccccgcgccgccccgccgccgctcgcgactcctctctccgccccctacgcgactcccgaccgcttctacaaaaaacgacgcaaaccctacccacaaaaaaaaaaaccgcacccccgccccgccgcgcgctaccgaccgcgccccctaaaaaaaaaaaacccgaacgcgaacaaaaaaaaacgaaaacgcttaaaaaaaccgcgacaaatacccgaccccgacgaacaacgtaacctac

SEQ ID NO: 30271 - DNA, 672 bp, Artificial Sequence
  chemically treated genomic DNA (Homo sapiens) CpG-island No: 30271
ggtcggttttttcgttaagggcgtagtttcgtagtggtcgaggcgggggtttagtttggaggtcgtagtttttcgtttcgtttagtttttcggtttcgtatagcgtttttgttaggtttcggcgttcgttcggcggcggtttggttgtgcggtttcgttttcggtttcgtcgcgtttattcggggcgttgtagttcgtatatattttcgttcgcggtttttttcgggatatttttagcggcgacgcggtcgtagttttttgggttagcgtggggggcgcgggcggcgggttcgggcggcggcggcggtttttgttgttcggttcggtttcggcgaggtttcggcgaggtttcgcgcgttcggttaatcgttcgtttcggggttggttcggaattcgtcgtgttcgtttgttcgttcgttttcgggcgtttttcgtttcgcgtcgtttcgtcgtcgttcgcggttttttttttcgttttttgcgcggttttcggtcgtttttgtaggaagcggcgtaggttttgtttatagggggaggggtcgtattttcgtttcgtcgcgcgttgtcggtcgcgttttttagagaaaggaagttcgggcgcgggtaggagggggcgggggcgtttaaaggggtcgcggtagatgttcggtttcggcgggtagcgtggtttgt

SEQ ID NO: 30272 - DNA, 672 bp, Artificial Sequence
  chemically treated genomic DNA (Homo sapiens) CpG-island No: 30272
acaaaccacgctacccgccgaaaccgaacatctaccgcgacccctttaaacgcccccgccccctcctacccgcgcccgaacttcctttctctaaaaaacgcgaccgacaacgcgcgacgaaacgaaaatacgacccctccccctataaacaaaacctacgccgcttcctacaaaaacgaccgaaaaccgcgcaaaaaacgaaaaaaaaaaccgcgaacgacgacgaaacgacgcgaaacgaaaaacgcccgaaaacgaacgaacaaacgaacacgacgaattccgaaccaaccccgaaacgaacgattaaccgaacgcgcgaaacctcgccgaaacctcgccgaaaccgaaccgaacaacaaaaaccgccgccgccgcccgaacccgccgcccgcgccccccacgctaacccaaaaaactacgaccgcgtcgccgctaaaaatatcccgaaaaaaaccgcgaacgaaaatatatacgaactacaacgccccgaataaacgcgacgaaaccgaaaacgaaaccgcacaaccaaaccgccgccgaacgaacgccgaaacctaacaaaaacgctatacgaaaccgaaaaactaaacgaaacgaaaaactacgacctccaaactaaacccccgcctcgaccactacgaaactacgcccttaacgaaaaaaccgacc

SEQ ID NO: 30273 - DNA, 516 bp, Artificial Sequence
  chemically treated genomic DNA (Homo sapiens) CpG-island No: 30273
gtcggtttttagcgtttttgagcgtcgtagggcgcgtagtaggtattgggttagggtcgacggtttgtaaataaggttgtattttttcggtagtggttcgcgttcgtcgttgaattggttcgtcgggttttcgtcgttcgtttttttttcgtcgtttcggttttgggttttcggtagggtttttttttcgacggcgcgtttttagggttttcggagtcgcgggtcgagtaggtcgagaagggcgagtacggttaagatgagcgcgagggcggcgttttacggcggtatggcgaagttggagagtttcggcgggtagcgggcggcggggtcgtttattcggcgagtttcgcgttttgttcgcggtttcgttcgtcggcggcggttgtttagggttttttcgcgcgggcgcgttttggattggtcgtggtcgggtagaggtagttagttcgggttcggttgttttcgttcgttttttattttcgtttcggttttttgtatagtaattgtaataagtgg

SEQ ID NO: 30274 - DNA, 516 bp, Artificial Sequence
  chemically treated genomic DNA (Homo sapiens) CpG-island No: 30274
ccacttattacaattactatacaaaaaaccgaaacgaaaataaaaaacgaacgaaaacaaccgaacccgaactaactacctctacccgaccacgaccaatccaaaacgcgcccgcgcgaaaaaaccctaaacaaccgccgccgacgaacgaaaccgcgaacaaaacgcgaaactcgccgaataaacgaccccgccgcccgctacccgccgaaactctccaacttcgccataccgccgtaaaacgccgccctcgcgctcatcttaaccgtactcgcccttctcgacctactcgacccgcgactccgaaaaccctaaaaacgcgccgtcgaaaaaaaaaccctaccgaaaacccaaaaccgaaacgacgaaaaaaaaacgaacgacgaaaacccgacgaaccaattcaacgacgaacgcgaaccactaccgaaaaaatacaaccttatttacaaaccgtcgaccctaacccaatacctactacgcgccctacgacgctcaaaaacgctaaaaaccgac

SEQ ID NO: 30275 - DNA, 516 bp, Artificial Sequence
  chemically treated genomic DNA (Homo sapiens) CpG-island No: 30275
ttatttgttgtaattgttgtataaagggtcggggcgggggtggggggcgggcgagggtagtcgggttcgaattggttgtttttgttcggttacggttaatttagagcgcgttcgcgcgggagggttttgggtagtcgtcgtcggcgggcggagtcgcgggtaaagcgcggagttcgtcgagtagacggtttcgtcgttcgttgttcgtcggggttttttagtttcgttatgtcgtcgtggggcgtcgttttcgcgtttattttggtcgtgttcgtttttttcggtttgttcggttcgcggtttcggggattttgggggcgcgtcgtcggagagaggattttgtcgggggtttaagatcgagacgacggggaggaggcggacggcggaggttcggcggattagtttagcgacgggcgcgagttattgtcgggagggtgtagttttgtttgtaagtcgtcggttttggtttagtgtttgttgcgcgttttgcggcgtttagaggcgttggaggtcggt

SEQ ID NO: 30276 - DNA, 516 bp, Artificial Sequence
  chemically treated genomic DNA (Homo sapiens) CpG-island No: 30276
accgacctccaacgcctctaaacgccgcaaaacgcgcaacaaacactaaaccaaaaccgacgacttacaaacaaaactacaccctcccgacaataactcgcgcccgtcgctaaactaatccgccgaacctccgccgtccgcctcctccccgtcgtctcgatcttaaacccccgacaaaatcctctctccgacgacgcgcccccaaaatccccgaaaccgcgaaccgaacaaaccgaaaaaaacgaacacgaccaaaataaacgcgaaaacgacgccccacgacgacataacgaaactaaaaaaccccgacgaacaacgaacgacgaaaccgtctactcgacgaactccgcgctttacccgcgactccgcccgccgacgacgactacccaaaaccctcccgcgcgaacgcgctctaaattaaccgtaaccgaacaaaaacaaccaattcgaacccgactaccctcgcccgccccccacccccgccccgaccctttatacaacaattacaacaaataa

SEQ ID NO: 30277 - DNA, 824 bp, Artificial Sequence
  chemically treated genomic DNA (Homo sapiens) CpG-island No: 30277
atatcggggtcgcggtatttttcggattttgagagggagtcggtcgtcgttcgcggatcgagttttagtcggggtagaggagttggttagtagataaaggaatgaagtagaaagagacgcgattatagcggggtcggggtatagacgttgtaagtcgttggaggggcgggtttttcggtttttttcgcgggcgtttcggtttttacgttgtttcgaggcgttcggggcggtaggaggtttttagagtcggggattcgggggattcgcggcgcgttaggagggtttttttagttcgtttgtcgtttattcgggattttagtagtttcgttcggttgtagtttcgaaacggtttcggtcggttttgcgcggtcggtaaagtatatacgcgcgcgcgtatatatatatatatatatatatatatatatatatataggattaggaggacggtagatgatgcgttatcgtacgtggttttggagttggcggggtggggcgcggtttcggcgattcgagttcggtttcgtagaggttgcggcggtcgcgttttttatttttgttgtagtagtagcgatttgttaaagggaaagacgtaagaggcggcggtagtagcggcggcgttaggcgagttttacgagatttgggcggaattttcgcgtagtcgggagttttcgtttcgtttaataggtttagcgcgggaggtgaaaggggaatcgagaggaaggcggttgaggtggagttgggggttgagcgaaaaggggaaagggatttgggagcgaggggagttaagttaggtgttggggatattttgttatcgcgcggttttt

SEQ ID NO: 30278 - DNA, 824 bp, Artificial Sequence
  chemically treated genomic DNA (Homo sapiens) CpG-island No: 30278
aaaaaccgcgcgataacaaaatatccccaacacctaacttaactcccctcgctcccaaatccctttccccttttcgctcaacccccaactccacctcaaccgccttcctctcgattcccctttcacctcccgcgctaaacctattaaacgaaacgaaaactcccgactacgcgaaaattccgcccaaatctcgtaaaactcgcctaacgccgccgctactaccgccgcctcttacgtctttccctttaacaaatcgctactactacaacaaaaataaaaaacgcgaccgccgcaacctctacgaaaccgaactcgaatcgccgaaaccgcgccccaccccgccaactccaaaaccacgtacgataacgcatcatctaccgtcctcctaatcctatatatatatatatatatatatatatatatatatatacgcgcgcgcgtatatactttaccgaccgcgcaaaaccgaccgaaaccgtttcgaaactacaaccgaacgaaactactaaaatcccgaataaacgacaaacgaactaaaaaaaccctcctaacgcgccgcgaatcccccgaatccccgactctaaaaacctcctaccgccccgaacgcctcgaaacaacgtaaaaaccgaaacgcccgcgaaaaaaaccgaaaaacccgcccctccaacgacttacaacgtctataccccgaccccgctataatcgcgtctctttctacttcattcctttatctactaaccaactcctctaccccgactaaaactcgatccgcgaacgacgaccgactccctctcaaaatccgaaaaataccgcgaccccgatat

SEQ ID NO: 30279 - DNA, 824 bp, Artificial Sequence
  chemically treated genomic DNA (Homo sapiens) CpG-island No: 30279
gagggtcgcgcggtagtaaagtgtttttagtatttagtttggtttttttcgtttttaaatttttttttttttttcgtttaatttttaattttattttagtcgtttttttttcggttttttttttatttttcgcgttgggtttgttgggcggggcgagggttttcggttgcgcgagagtttcgtttaaatttcgtgagattcgtttgacgtcgtcgttgttgtcgtcgttttttacgtttttttttttgataagtcgttgttgttgtagtaaaaataaaggacgcgatcgtcgtagtttttgcggagtcgggttcgggtcgtcggagtcgcgttttatttcgttagttttagagttacgtacggtaacgtattatttatcgtttttttggttttgtgtgtgtgtgtgtgtgtgtgtgtgtgtgtgtgtgtgcgcgcgcgcgtgtgtgttttgtcggtcgcgtagggtcggtcggggtcgtttcgggattgtagtcgagcggggttgttggggtttcgggtgggcggtaggcgagttgggggagtttttttggcgcgtcgcggatttttcgggttttcggttttagaggttttttgtcgtttcgggcgtttcggagtagcgtagaagtcgaggcgttcgcggagagggtcgagagattcgtttttttagcggtttataacgtttgtgtttcggtttcgttgtggtcgcgtttttttttgttttatttttttatttgttgattagtttttttgtttcggttggggttcggttcgcgggcggcggtcgatttttttttagggttcggggagtgtcgcgatttcggtgt

SEQ ID NO: 30280 - DNA, 824 bp, Artificial Sequence
  chemically treated genomic DNA (Homo sapiens) CpG-island No: 30280
acaccgaaatcgcgacactccccgaaccctaaaaaaaaatcgaccgccgcccgcgaaccgaaccccaaccgaaacaaaaaaactaatcaacaaataaaaaaataaaacaaaaaaaaacgcgaccacaacgaaaccgaaacacaaacgttataaaccgctaaaaaaacgaatctctcgaccctctccgcgaacgcctcgacttctacgctactccgaaacgcccgaaacgacaaaaaacctctaaaaccgaaaacccgaaaaatccgcgacgcgccaaaaaaactcccccaactcgcctaccgcccacccgaaaccccaacaaccccgctcgactacaatcccgaaacgaccccgaccgaccctacgcgaccgacaaaacacacacgcgcgcgcgcacacacacacacacacacacacacacacacacacacaaaaccaaaaaaacgataaataatacgttaccgtacgtaactctaaaactaacgaaataaaacgcgactccgacgacccgaacccgactccgcaaaaactacgacgatcgcgtcctttatttttactacaacaacaacgacttatcaaaaaaaaaaacgtaaaaaacgacgacaacaacgacgacgtcaaacgaatctcacgaaatttaaacgaaactctcgcgcaaccgaaaaccctcgccccgcccaacaaacccaacgcgaaaaataaaaaaaaaaccgaaaaaaaaacgactaaaataaaattaaaaattaaacgaaaaaaaaaaaaaaatttaaaaacgaaaaaaaccaaactaaatactaaaaacactttactaccgcgcgaccctc

SEQ ID NO: 30281 - DNA, 692 bp, Artificial Sequence
  chemically treated genomic DNA (Homo sapiens) CpG-island No: 30281
atttaggttttaaattgaaaagcgcgtaagcgtggttttcgatttagagttcggcgtcgggcgagaagtcgttacgcggatcgtattacgcggagcggtattttatatacgcgagggtagggtcgagttatggcgtttttttatttttttcgtttcgtggtcgttttttttggcgtcgatgtttttagttaggtagttgagcgacgcggaagtgaggtcggggacgcgcgcgaggtgatatgcgtagtttcgtttagggattataggggcgcgttaaaggcggttttgcgtaaggttcggtttggcgagggcgtgcgaagtttttttagcggaacgttttttacgtcgtttaaatatataagagttttaaattttcgaaaaattttaatcgggttagtattaagcgatgttttttatttaggttcgagagttatcgtgcggggcgtggtcggttttattcggagttttttatatttcgttgggggcgggttattttgttcggttcgtatatcgtgtgttcgttttagttgaagagtttgcgcgcgcgtatcggacgtttacgttatcgcgtacgcgtttttattcgttcggagttcgtcgcgtaggcgtaaaaggagacgcgagtagtatttttttgattttttttttaatattaggagtttaaacggttttagagtagtagtaagattttt

SEQ ID NO: 30282 - DNA, 692 bp, Artificial Sequence
  chemically treated genomic DNA (Homo sapiens) CpG-island No: 30282
aaaaatcttactactactctaaaaccgtttaaactcctaatattaaaaaaaaaatcaaaaaaatactactcgcgtctccttttacgcctacgcgacgaactccgaacgaataaaaacgcgtacgcgataacgtaaacgtccgatacgcgcgcgcaaactcttcaactaaaacgaacacacgatatacgaaccgaacaaaataacccgcccccaacgaaatataaaaaactccgaataaaaccgaccacgccccgcacgataactctcgaacctaaataaaaaacatcgcttaatactaacccgattaaaatttttcgaaaatttaaaactcttatatatttaaacgacgtaaaaaacgttccgctaaaaaaacttcgcacgccctcgccaaaccgaaccttacgcaaaaccgcctttaacgcgcccctataatccctaaacgaaactacgcatatcacctcgcgcgcgtccccgacctcacttccgcgtcgctcaactacctaactaaaaacatcgacgccaaaaaaaacgaccacgaaacgaaaaaaataaaaaaacgccataactcgaccctaccctcgcgtatataaaataccgctccgcgtaatacgatccgcgtaacgacttctcgcccgacgccgaactctaaatcgaaaaccacgcttacgcgcttttcaatttaaaacctaaat

SEQ ID NO: 30283 - DNA, 692 bp, Artificial Sequence
  chemically treated genomic DNA (Homo sapiens) CpG-island No: 30283
aagggttttgttgttgttttggggtcgtttggatttttggtgttgggggaggggttagggaggtgttgttcgcgtttttttttgcgtttgcgcggcgggtttcgagcgggtaggagcgcgtgcgcggtgacgtggacgttcggtgcgcgcgcgtaggttttttagttggagcggatatacggtgtgcgaatcgaatagaataattcgtttttagcgggatgtgaaggatttcgggtgaggtcggttacgtttcgtacggtaattttcgggtttgggtggagggtatcgtttagtattggttcgattggagtttttcgagagtttgaagtttttgtgtatttgaacggcgtgagaaacgtttcgttgagagagtttcgtacgttttcgttaggtcgggttttgcgtagggtcgtttttggcgcgtttttgtggtttttgagcgaggttgcgtatgttatttcgcgcgcgttttcggttttattttcgcgtcgtttagttatttaattgggaatatcgacgttagagagagcggttacgaagcgggaggggtgagaaagcgttatggttcggttttgttttcgcgtgtgtggggtgtcgtttcgcgtggtacggttcgcgtgacgatttttcgttcggcgtcgggttttaggtcgagagttacgtttacgcgttttttagtttagagtttaggt

SEQ ID NO: 30284 - DNA, 692 bp, Artificial Sequence
  chemically treated genomic DNA (Homo sapiens) CpG-island No: 30284
acctaaactctaaactaaaaaacgcgtaaacgtaactctcgacctaaaacccgacgccgaacgaaaaatcgtcacgcgaaccgtaccacgcgaaacgacaccccacacacgcgaaaacaaaaccgaaccataacgctttctcacccctcccgcttcgtaaccgctctctctaacgtcgatattcccaattaaataactaaacgacgcgaaaataaaaccgaaaacgcgcgcgaaataacatacgcaacctcgctcaaaaaccacaaaaacgcgccaaaaacgaccctacgcaaaacccgacctaacgaaaacgtacgaaactctctcaacgaaacgtttctcacgccgttcaaatacacaaaaacttcaaactctcgaaaaactccaatcgaaccaatactaaacgataccctccacccaaacccgaaaattaccgtacgaaacgtaaccgacctcacccgaaatccttcacatcccgctaaaaacgaattattctattcgattcgcacaccgtatatccgctccaactaaaaaacctacgcgcgcgcaccgaacgtccacgtcaccgcgcacgcgctcctacccgctcgaaacccgccgcgcaaacgcaaaaaaaaacgcgaacaacacctccctaacccctcccccaacaccaaaaatccaaacgaccccaaaacaacaacaaaaccctt

SEQ ID NO: 30285 - DNA, 832 bp, Artificial Sequence
  chemically treated genomic DNA (Homo sapiens) CpG-island No: 30285
aacgattcggcgtcgtttcgagttcggtgttaggtgattagcgggtaggggcgggtttgcgattagtacgtgattcgaattggtagttaatgattagtcgggtggtttagtagcgcgaggatttcgggattcgcgaacggagcggcgcgtgggtcggttgcggtcggtttcggtaggtatgcgtaggcgttttgtttgttacgcgttacgttcgtttttacgcgtttggtggcgtgtttttggcgcgaagtgttaagagtttgggtgtttttgtgcgttggggcgaaggagagagtggcgggggtaggggggcgttgatgcgttacgtggacgttatagttaattttaggtcgaggcgtatttatagtttttttcggcgtttcggggtgcgacgtgtttattgaggttcgatcgggttttgacggtttgagcggtttttcgaagcgcgtgtgcggtttgtaaattttggtcgcggtttttcgtggcgttttgtttcgcggtgagtatagacgataagtttttagtaaaatggttgttggaaagagtcgttaagtagggggagtgttggggtcgcgtgaaggttatatgacgaggttggtagcgcgtgttgttggcgcggggtagggggagggtggggggcgtggcgggttacgtgttttcgattgcgtcggtttgtggttttttagcgtttttgttgcggtcggattgtttgtttttattttttttatatcgaagcgtggtaagcgtcggtgagaagttgtgtggtgtattgggatgagtcgagatttgggaattcggaggtttggggtttaggtttttggttagttttatt

SEQ ID NO: 30286 - DNA, 832 bp, Artificial Sequence
  chemically treated genomic DNA (Homo sapiens) CpG-island No: 30286
aataaaactaaccaaaaacctaaaccccaaacctccgaattcccaaatctcgactcatcccaatacaccacacaacttctcaccgacgcttaccacgcttcgatataaaaaaaataaaaacaaacaatccgaccgcaacaaaaacgctaaaaaaccacaaaccgacgcaatcgaaaacacgtaacccgccacgccccccaccctccccctaccccgcgccaacaacacgcgctaccaacctcgtcatataaccttcacgcgaccccaacactccccctacttaacgactctttccaacaaccattttactaaaaacttatcgtctatactcaccgcgaaacaaaacgccacgaaaaaccgcgaccaaaatttacaaaccgcacacgcgcttcgaaaaaccgctcaaaccgtcaaaacccgatcgaacctcaataaacacgtcgcaccccgaaacgccgaaaaaaactataaatacgcctcgacctaaaattaactataacgtccacgtaacgcatcaacgcccccctacccccgccactctctccttcgccccaacgcacaaaaacacccaaactcttaacacttcgcgccaaaaacacgccaccaaacgcgtaaaaacgaacgtaacgcgtaacaaacaaaacgcctacgcatacctaccgaaaccgaccgcaaccgacccacgcgccgctccgttcgcgaatcccgaaatcctcgcgctactaaaccacccgactaatcattaactaccaattcgaatcacgtactaatcgcaaacccgcccctacccgctaatcacctaacaccgaactcgaaacgacgccgaatcgtt

SEQ ID NO: 30287 - DNA, 832 bp, Artificial Sequence
  chemically treated genomic DNA (Homo sapiens) CpG-island No: 30287
gatgaaattagttaaaggtttggattttaggttttcgaatttttagatttcggtttattttagtatattatatagttttttatcgacgtttgttacgtttcgatgtgggaggagtaaaaataggtaattcgatcgtagtaaagacgttggaaaattataggtcggcgtagtcgaaggtacgtgattcgttacgttttttattttttttttatttcgcgttagtagtacgcgttgttaatttcgttatgtgatttttacgcggttttagtattttttttgtttggcgattttttttagtagttattttgttgagaatttgtcgtttgtgtttatcgcggagtaggacgttacgaaaagtcgcggttagaatttataggtcgtatacgcgtttcgaaagatcgtttaggtcgttagggttcggtcgaattttagtgaatacgtcgtatttcggggcgtcggggaaagttgtgggtgcgtttcggtttgagattggttgtggcgtttacgtgacgtattagcgtttttttgttttcgttattttttttttcgttttaacgtataaaaatatttagatttttaatatttcgcgttaagaatacgttattaggcgcgtggggacgggcgtagcgcgtggtaagtaaggcgtttgcgtatatttgtcggggtcgatcgtaatcgatttacgcgtcgtttcgttcgcgggtttcggaattttcgcgttgttggattattcggttagttattggttgttagttcgggttacgtgttggtcgtaagttcgtttttattcgttaattatttggtatcgagttcgaagcggcgtcgagtcgtt

SEQ ID NO: 30288 - DNA, 832 bp, Artificial Sequence
  chemically treated genomic DNA (Homo sapiens) CpG-island No: 30288
aacgactcgacgccgcttcgaactcgataccaaataattaacgaataaaaacgaacttacgaccaacacgtaacccgaactaacaaccaataactaaccgaataatccaacaacgcgaaaattccgaaacccgcgaacgaaacgacgcgtaaatcgattacgatcgaccccgacaaatatacgcaaacgccttacttaccacgcgctacgcccgtccccacgcgcctaataacgtattcttaacgcgaaatattaaaaatctaaatatttttatacgttaaaacgaaaaaaaaaataacgaaaacaaaaaaacgctaatacgtcacgtaaacgccacaaccaatctcaaaccgaaacgcacccacaactttccccgacgccccgaaatacgacgtattcactaaaattcgaccgaaccctaacgacctaaacgatctttcgaaacgcgtatacgacctataaattctaaccgcgacttttcgtaacgtcctactccgcgataaacacaaacgacaaattctcaacaaaataactactaaaaaaaatcgccaaacaaaaaaaatactaaaaccgcgtaaaaatcacataacgaaattaacaacgcgtactactaacgcgaaataaaaaaaaaataaaaaacgtaacgaatcacgtaccttcgactacgccgacctataattttccaacgtctttactacgatcgaattacctatttttactcctcccacatcgaaacgtaacaaacgtcgataaaaaactatataatatactaaaataaaccgaaatctaaaaattcgaaaacctaaaatccaaacctttaactaatttcatc

SEQ ID NO: 30289 - DNA, 636 bp, Artificial Sequence
  chemically treated genomic DNA (Homo sapiens) CpG-island No: 30289
ggggtacgtcgggggaaggcgttgggtagtagggatcgcggacgtacgaggtcgggttaaggcgtttagagtcgggtcgggtagggtttcgatgttagagtgaaggggtcgataggggagaacgaattcgggaaatttttttcggtgatattttaagtgtcgtatgatgcgttagttgattaggggtttttattttttttttttttattgatttcgtaattattgattacgtaatcgttgtttacgtcgttattttatttttttagtttttgtattgcgggatgtagtagtatttgttttcgaattggttcgtgtttacgtgtttttttattttttttgatagcgatttttataaggcgcggaataaattttgagattaatttatgtcgtttatttagtttttagcgttgttagtagcgggattcgtagtaggggtaatgttttagtcgtcgatttagtttatcgaggcggagaagttaggtcggtttttattttggagtttttttagtaacggcgtttattattggtcggatatattatcgattgattaatgggagattttgttgttttagtttcgtttttgagttttgttatggcgacgtttagtgttttagtcggtgtgaggatacgatatgt

SEQ ID NO: 30290 - DNA, 636 bp, Artificial Sequence
  chemically treated genomic DNA (Homo sapiens) CpG-island No: 30290
acatatcgtatcctcacaccgactaaaacactaaacgtcgccataacaaaactcaaaaacgaaactaaaacaacaaaatctcccattaatcaatcgataatatatccgaccaataataaacgccgttactaaaaaaactccaaaataaaaaccgacctaacttctccgcctcgataaactaaatcgacgactaaaacattacccctactacgaatcccgctactaacaacgctaaaaactaaataaacgacataaattaatctcaaaatttattccgcgccttataaaaatcgctatcaaaaaaaataaaaaaacacgtaaacacgaaccaattcgaaaacaaatactactacatcccgcaatacaaaaactaaaaaaataaaataacgacgtaaacaacgattacgtaatcaataattacgaaatcaataaaaaaaaaaaaaataaaaacccctaatcaactaacgcatcatacgacacttaaaatatcaccgaaaaaaatttcccgaattcgttctcccctatcgaccccttcactctaacatcgaaaccctacccgacccgactctaaacgccttaacccgacctcgtacgtccgcgatccctactacccaacgccttcccccgacgtacccc

SEQ ID NO: 30291 - DNA, 636 bp, Artificial Sequence
  chemically treated genomic DNA (Homo sapiens) CpG-island No: 30291
gtatatcgtgtttttatatcggttggagtattggacgtcgttatgatagagtttaggggcgggattggaatagtagagttttttattggttagtcggtgatatattcggttaatggtgagcgtcgttattagaagggttttaggatggaggtcgatttgattttttcgtttcggtgggttgggtcggcggttggagtattatttttattgcgggtttcgttgttggtagcgttggaaattgggtggacggtatgggttggttttaggatttgtttcgcgttttgtggagatcgttgttaagggaagtgaaggagtacgtgggtacggattaattcgggaataaatattattatatttcgtagtataagaattggagaggtgaggtggcggcgtgggtagcgattgcgtggttagtgattgcgaggttagtaaaggagggaaaagtgagagtttttagttaattaacgtattatgcgatatttagggtgttatcggagagaatttttcgagttcgtttttttttgtcgatttttttattttggtatcggagttttattcggttcggttttgggcgttttggttcggtttcgtgcgttcgcggtttttattatttagcgttttttttcggcgtgtttt

SEQ ID NO: 30292 - DNA, 636 bp, Artificial Sequence
  chemically treated genomic DNA (Homo sapiens) CpG-island No: 30292
aaaacacgccgaaaaaaaacgctaaataataaaaaccgcgaacgcacgaaaccgaaccaaaacgcccaaaaccgaaccgaataaaactccgataccaaaataaaaaaatcgacaaaaaaaaacgaactcgaaaaattctctccgataacaccctaaatatcgcataatacgttaattaactaaaaactctcacttttccctcctttactaacctcgcaatcactaaccacgcaatcgctacccacgccgccacctcacctctccaattcttatactacgaaatataataatatttattcccgaattaatccgtacccacgtactccttcacttcccttaacaacgatctccacaaaacgcgaaacaaatcctaaaaccaacccataccgtccacccaatttccaacgctaccaacaacgaaacccgcaataaaaataatactccaaccgccgacccaacccaccgaaacgaaaaaatcaaatcgacctccatcctaaaacccttctaataacgacgctcaccattaaccgaatatatcaccgactaaccaataaaaaactctactattccaatcccgcccctaaactctatcataacgacgtccaatactccaaccgatataaaaacacgatatac

SEQ ID NO: 30293 - DNA, 600 bp, Artificial Sequence
  chemically treated genomic DNA (Homo sapiens) CpG-island No: 30293
cgatgggcggaatcgtaatggggttcgtgaggattgtttttttagtttcgtatttttttagattcgaggataagggattggagaatgttttgattaaatttcgttttatcgggataaacggggaaaggaaggttagaaggagcggtgttcgattttaggcgtggagatagtagtcggattgaggagtcgttttagattttggtgtttgttagttcgtttgttcgtcgtcgtcgggattatcgggtagtcgcggtcgaaggtttatcgtaaggtcggattgagtttggttgtgtcgaggcgggttttttaaaacggagatcggatgggggttattaggatacgttttttaataaagcgttgaacgggaagcggtcgtttttttaatattttttatattcgggtacgtgataaatttcgcgtcggaagttgatcgcgtagagaaggaagaagtagcgatgggagaaaaagggagcggttaatagacgcggaggggcggggcgttaatcgacgggcgtggttaggcggaataaggttttattggaggggcgtgttagggaagggtaggggcggggtttttgtggtatagaaattgatttggga

SEQ ID NO: 30294 - DNA, 600 bp, Artificial Sequence
  chemically treated genomic DNA (Homo sapiens) CpG-island No: 30294
tcccaaatcaatttctataccacaaaaaccccgcccctacccttccctaacacgcccctccaataaaaccttattccgcctaaccacgcccgtcgattaacgccccgcccctccgcgtctattaaccgctccctttttctcccatcgctacttcttccttctctacgcgatcaacttccgacgcgaaatttatcacgtacccgaatataaaaaatattaaaaaaacgaccgcttcccgttcaacgctttattaaaaaacgtatcctaataacccccatccgatctccgttttaaaaaacccgcctcgacacaaccaaactcaatccgaccttacgataaaccttcgaccgcgactacccgataatcccgacgacgacgaacaaacgaactaacaaacaccaaaatctaaaacgactcctcaatccgactactatctccacgcctaaaatcgaacaccgctccttctaaccttcctttccccgtttatcccgataaaacgaaatttaatcaaaacattctccaatcccttatcctcgaatctaaaaaaatacgaaactaaaaaaacaatcctcacgaaccccattacgattccgcccatcg

SEQ ID NO: 30295 - DNA, 600 bp, Artificial Sequence
  chemically treated genomic DNA (Homo sapiens) CpG-island No: 30295
ttttaagttagtttttgtgttataaaggtttcgtttttgtttttttttgatacgtttttttaatgaggttttgtttcgtttggttacgttcgtcggttggcgtttcgttttttcgcgtttattggtcgtttttttttttttttatcgttgttttttttttttttacgcggttaattttcggcgcggagtttgttacgtgttcggatataggaagtgttgggggaacggtcgtttttcgtttaacgttttattgaggggcgtattttagtggtttttattcggttttcgttttggaagattcgtttcggtatagttaggtttagttcggttttgcggtaagttttcggtcgcggttgttcggtagtttcggcggcggcggatagacgagttgataggtattagggtttaaggcggttttttagttcggttgttgtttttacgtttggggtcgggtatcgttttttttgattttttttttttcgtttgtttcggtaagacgaagtttggttagagtattttttagttttttgttttcgggtttaggagaatgcggagttgggagggtagtttttacgggttttattacggtttcgtttatcg

SEQ ID NO: 30296 - DNA, 600 bp, Artificial Sequence
  chemically treated genomic DNA (Homo sapiens) CpG-island No: 30296
cgataaacgaaaccgtaataaaacccgtaaaaactaccctcccaactccgcattctcctaaacccgaaaacaaaaaactaaaaaatactctaaccaaacttcgtcttaccgaaacaaacgaaaaaaaaaaaatcaaaaaaaacgatacccgaccccaaacgtaaaaacaacaaccgaactaaaaaaccgccttaaaccctaatacctatcaactcgtctatccgccgccgccgaaactaccgaacaaccgcgaccgaaaacttaccgcaaaaccgaactaaacctaactataccgaaacgaatcttccaaaacgaaaaccgaataaaaaccactaaaatacgcccctcaataaaacgttaaacgaaaaacgaccgttcccccaacacttcctatatccgaacacgtaacaaactccgcgccgaaaattaaccgcgtaaaaaaaaaaaaaacaacgataaaaaaaaaaaaaaacgaccaataaacgcgaaaaaacgaaacgccaaccgacgaacgtaaccaaacgaaacaaaacctcattaaaaaaacgtatcaaaaaaaaacaaaaacgaaacctttataacacaaaaactaacttaaaa

SEQ ID NO: 30297 - DNA, 970 bp, Artificial Sequence
  chemically treated genomic DNA (Homo sapiens) CpG-island No: 30297
cgggattcgaagcgtttttttttcgttttcgttttgtttcgcggggtcgcggtcgggcgttttatcgtgatgttgtagtggagcgtgagtggcggcggtagcgagtgcgggttgttttgttgcggtattaggaattggtagtgtagttcgtttagtttttaattgacgatgcggaatcgttcgtggtttttgtcgaagatggacgttaggaattttagttcggttttgagttttgatacggatattttttttttattttcggcgggaggggcgcggaaggggagtcgggcgcggaaggggagtcgggttcggagtcgtcgttacggtcgcgatcgtttcgcggggtcggtttgggtcgcgttttcgcggtttcgtttcgtcgagcgttgttggaaaatggcgaggggcgcggaagtttcggcgtgtggcggtttgggtggcgttttttttgtaatcgattttagcggtaggaggcggcggtttcgcggtttaaaagggtaatagcgacgtcgttttcgttatcgtttgggaaagggttgtttttatttcgttttcgttttttttattttggcgcgttttgcgcgtttcggttttagcgcgtgtacgaggttagagcgcgcgcgttcggtcgtttttttttcgttttgatttagtttttttgttttcgatttatttgtttcgtttttcgtattcgcggattggaggttcggggttagttggcgttcgggttttagaagtcggggaggagtcggagattttcgcgcgttttcgttttcggtttggagtcggatacgtgcgtggcggatcgcgtcggttacgtcggcgtcgttgtagattagcgttagtttttgggggcggttttttagtttggcgttcggcgcggtattcgttaattttattggggggatttcgtgggagacgcgggtgcggtttatttagcgttattttcgttatttttattttagttcga

SEQ ID NO: 30298 - DNA, 970 bp, Artificial Sequence
  chemically treated genomic DNA (Homo sapiens) CpG-island No: 30298
tcgaactaaaataaaaataacgaaaataacgctaaataaaccgcacccgcgtctcccacgaaatccccccaataaaattaacgaataccgcgccgaacgccaaactaaaaaaccgcccccaaaaactaacgctaatctacaacgacgccgacgtaaccgacgcgatccgccacgcacgtatccgactccaaaccgaaaacgaaaacgcgcgaaaatctccgactcctccccgacttctaaaacccgaacgccaactaaccccgaacctccaatccgcgaatacgaaaaacgaaacaaataaatcgaaaacaaaaaaactaaatcaaaacgaaaaaaaaacgaccgaacgcgcgcgctctaacctcgtacacgcgctaaaaccgaaacgcgcaaaacgcgccaaaataaaaaaaacgaaaacgaaataaaaacaaccctttcccaaacgataacgaaaacgacgtcgctattacccttttaaaccgcgaaaccgccgcctcctaccgctaaaatcgattacaaaaaaaacgccacccaaaccgccacacgccgaaacttccgcgcccctcgccattttccaacaacgctcgacgaaacgaaaccgcgaaaacgcgacccaaaccgaccccgcgaaacgatcgcgaccgtaacgacgactccgaacccgactccccttccgcgcccgactccccttccgcgcccctcccgccgaaaataaaaaaaaaatatccgtatcaaaactcaaaaccgaactaaaattcctaacgtccatcttcgacaaaaaccacgaacgattccgcatcgtcaattaaaaactaaacgaactacactaccaattcctaataccgcaacaaaacaacccgcactcgctaccgccgccactcacgctccactacaacatcacgataaaacgcccgaccgcgaccccgcgaaacaaaacgaaaacgaaaaaaaaacgcttcgaatcccg

SEQ ID NO: 30299 - DNA, 970 bp, Artificial Sequence
  chemically treated genomic DNA (Homo sapiens) CpG-island No: 30299
tcggattagggtgaaagtagcggaggtaacgttgggtgagtcgtattcgcgttttttacgaggtttttttagtgaggttagcgggtgtcgcgtcgagcgttaagttgaggagtcgtttttaggggttggcgttagtttgtagcggcgtcgacgtggtcggcgcgattcgttacgtacgtgttcggttttaggtcgggggcgggggcgcgcgggggttttcggttttttttcgatttttggggttcgggcgttagttggtttcgagtttttagttcgcgggtgcgaagaacggagtagatgggtcgggaataagggagttgggttaaggcgaggagggggcggtcgggcgcgcgcgttttggtttcgtgtacgcgttgaaatcggagcgcgtagggcgcgttagggtgagggggacgggggcggggtgggggtagtttttttttaggcggtagcgggggcggcgtcgttgttgtttttttaagtcgcggggtcgtcgttttttgtcgttggagtcggttataaaggaagcgttatttaggtcgttatacgtcgaggttttcgcgtttttcgttattttttagtagcgttcgacgaggcggagtcgcgagagcgcggtttaggtcggtttcgcggggcggtcgcggtcgtgacggcggtttcgggttcggtttttttttcgcgttcggtttttttttcgcgtttttttcgtcggagatgaggggaagatgttcgtgttagggtttaaggtcgagttgaagtttttggcgtttattttcgataagaattacgagcgatttcgtatcgttagttggaagttggacgagttgtattgttagtttttggtgtcgtagtagggtagttcgtattcgttgtcgtcgttatttacgttttattgtaatattacggtgaggcgttcggtcgcggtttcgcggggtagggcgaggacggagagggggcgtttcgagtttcg

SEQ ID NO: 30300 - DNA, 970 bp, Artificial Sequence
  chemically treated genomic DNA (Homo sapiens) CpG-island No: 30300
cgaaactcgaaacgccccctctccgtcctcgccctaccccgcgaaaccgcgaccgaacgcctcaccgtaatattacaataaaacgtaaataacgacgacaacgaatacgaactaccctactacgacaccaaaaactaacaatacaactcgtccaacttccaactaacgatacgaaatcgctcgtaattcttatcgaaaataaacgccaaaaacttcaactcgaccttaaaccctaacacgaacatcttcccctcatctccgacgaaaaaaacgcgaaaaaaaaaccgaacgcgaaaaaaaaaccgaacccgaaaccgccgtcacgaccgcgaccgccccgcgaaaccgacctaaaccgcgctctcgcgactccgcctcgtcgaacgctactaaaaaataacgaaaaacgcgaaaacctcgacgtataacgacctaaataacgcttcctttataaccgactccaacgacaaaaaacgacgaccccgcgacttaaaaaaacaacaacgacgccgcccccgctaccgcctaaaaaaaaactacccccaccccgcccccgtccccctcaccctaacgcgccctacgcgctccgatttcaacgcgtacacgaaaccaaaacgcgcgcgcccgaccgccccctcctcgccttaacccaactcccttattcccgacccatctactccgttcttcgcacccgcgaactaaaaactcgaaaccaactaacgcccgaaccccaaaaatcgaaaaaaaaccgaaaacccccgcgcgcccccgcccccgacctaaaaccgaacacgtacgtaacgaatcgcgccgaccacgtcgacgccgctacaaactaacgccaacccctaaaaacgactcctcaacttaacgctcgacgcgacacccgctaacctcactaaaaaaacctcgtaaaaaacgcgaatacgactcacccaacgttacctccgctactttcaccctaatccga

SEQ ID NO: 30301 - DNA, 831 bp, Artificial Sequence
  chemically treated genomic DNA (Homo sapiens) CpG-island No: 30301
gcggtcgttcgtatgtgcgaggtggaggtaaagtttgataaatgatgattatttcgggaaggggaagaatttaggtagttaaaaattcgcgcggggtgtgttagggaagaagtcgcgttaggaagcgttacgtattttgttgcggtgttaggcgcggaggttgaggagagagtcggtggaggtggcggggcgagagtttagttttggtcgcgggttttttttcggggcgagcggagtcgtcgtcgtcgcggtcgggcgtagggtcgagcggtcgtcgtttcgttaaaggcgttgggtaacgttatttatttggttcggggaagttgggtagttttcgtcgcggtttcggtattcggcgagagtaatacgtttagtttgaattttttagttttagtttcggtaaatttatatttacgtatatacgcgcgcgcgcggatagttttttagaggcgcgcgagcgggtttcggtggttttttggtcgcgttttgttttttttttcgtttttattggcgcggaggtgattgttttatttatttatttttttttttcggttttatttttttttttcgcgttttttttttcggtttttttttttttttttttttttcggtttgcggggtcggtcgcggcggtcgttttagttgtagcgtggcggggttgcgcggcgggattcggcgggggcgtaacgggtgggggcgtttcgggcgggggcgcggggtcgggcgggcggggacgtcggggttgtcgttttggttgaggtgagggaatgtgggggaggcgaggggaggacgttgtcgtttgtcgtattgtgttgtgtcgggggtatttag

SEQ ID NO: 30302 - DNA, 831 bp, Artificial Sequence
  chemically treated genomic DNA (Homo sapiens) CpG-island No: 30302
ctaaatacccccgacacaacacaatacgacaaacgacaacgtcctcccctcgcctcccccacattccctcacctcaaccaaaacgacaaccccgacgtccccgcccgcccgaccccgcgcccccgcccgaaacgcccccacccgttacgcccccgccgaatcccgccgcgcaaccccgccacgctacaactaaaacgaccgccgcgaccgaccccgcaaaccgaaaaaaaaaaaaaaaaaaaaaaaccgaaaaaaaaaacgcgaaaaaaaaaaataaaaccgaaaaaaaaaaataaataaataaaacaatcacctccgcgccaataaaaacgaaaaaaaaaacaaaacgcgaccaaaaaaccaccgaaacccgctcgcgcgcctctaaaaaactatccgcgcgcgcgcgtatatacgtaaatataaatttaccgaaactaaaactaaaaaattcaaactaaacgtattactctcgccgaataccgaaaccgcgacgaaaactacccaacttccccgaaccaaataaataacgttacccaacgcctttaacgaaacgacgaccgctcgaccctacgcccgaccgcgacgacgacgactccgctcgccccgaaaaaaaacccgcgaccaaaactaaactctcgccccgccacctccaccgactctctcctcaacctccgcgcctaacaccgcaacaaaatacgtaacgcttcctaacgcgacttcttccctaacacaccccgcgcgaatttttaactacctaaattcttccccttcccgaaataatcatcatttatcaaactttacctccacctcgcacatacgaacgaccgc

SEQ ID NO: 30303 - DNA, 831 bp, Artificial Sequence
  chemically treated genomic DNA (Homo sapiens) CpG-island No: 30303
ttgggtgttttcggtatagtatagtgcggtaggcggtagcgtttttttttcgttttttttatatttttttattttagttaaggcggtagtttcggcgttttcgttcgttcggtttcgcgttttcgttcggagcgtttttattcgttgcgttttcgtcgggtttcgtcgcgtagtttcgttacgttgtagttggagcgatcgtcgcggtcggtttcgtagatcggggaggaggaggaggaggggaagtcggagagggaggcgcggggaggagggatggagtcgggaggaggaaataaataaataaaataattattttcgcgttaataagagcgagggagagagtaagacgcgattagagagttatcggggttcgttcgcgcgtttttgagaggttgttcgcgcgcgcgcgtgtgtgcgtgagtgtggatttgtcgggattggagttggaaagtttaaattaaacgtgttgttttcgtcgagtgtcgaggtcgcggcggaggttgtttaattttttcgggttaagtgagtggcgttgtttagcgtttttggcgaggcggcggtcgttcggttttgcgttcggtcgcggcggcggcggtttcgttcgtttcgggagggagttcgcggttagggttggattttcgtttcgttatttttatcgattttttttttagttttcgcgtttggtatcgtagtaaggtacgtggcgttttttggcgcggttttttttttagtatatttcgcgcggatttttggttgtttagatttttttttttttcggagtggttattatttgttaaattttatttttatttcgtatatgcgggcggtcgt
